United States Patent Application Publication US 2007/0214517 A1 - sequence listing, part 30

SEQ ID NO: 35854 - protein, 215 aa, Arabidopsis thaliana
  peptide (1)..(215): Ceres Seq. ID no. 13592326
  misc_feature (38)..(198): Pfam Name: haloacid dehalogenase-like hydrolase Pfam Description: haloacid dehalogenase-like hydrolase
  misc_feature (38)..(198): Pfam Name: haloacid dehalogenase-like hydrolase Pfam Description: haloacid dehalogenase-like hydrolase
  misc_feature (68)..(181): Homolog of NCBI NO: 21622506 NR Description: conserved hypothetical protein [Neurospora crassa]
  misc_feature (37)..(195): Homolog of NCBI NO: 28900419 NR Description: hypothetical protein [Vibrio parahaemolyticus
  misc_feature (38)..(191): Homolog of NCBI NO: 26991442 NR Description: hydrolase, haloacid dehalogenase-like family
  misc_feature (36)..(205): Homolog of NCBI NO: 27366476 NR Description: Predicted phosphatases [Vibrio vulnificus CMCP6]
  misc_feature (42)..(195): Homolog of NCBI NO: 39995800 NR Description: HAD-superfamily hydrolase, subfamily IA, variant
  misc_feature (68)..(181): Homolog of NCBI NO: 21622506 NR Description: conserved hypothetical protein [Neurospora crassa]
  misc_feature (38)..(191): Homolog of NCBI NO: 26991442 NR Description: hydrolase, haloacid dehalogenase-like family
  misc_feature (42)..(195): Homolog of NCBI NO: 39995800 NR Description: HAD-superfamily hydrolase, subfamily IA, variant
  misc_feature (6)..(198): Homolog of NCBI NO: 20196855 NR Description: unknown protein [Arabidopsis thaliana]
  misc_feature (27)..(198): Homolog of NCBI NO: 30685622 NR Description: haloacid dehalogenase-like hydrolase family
  misc_feature (13)..(198): Homolog of NCBI NO: 25408252 NR Description: hypothetical protein At2g33250 [imported] -
  misc_feature (38)..(200): Homolog of NCBI NO: 6324705 NR Description: Hypothetical ORF; Yor131cp [Saccharomyces
  misc_feature (27)..(195): Homolog of NCBI NO: 24375526 NR Description: hydrolase, haloacid dehalogenase-like family
  misc_feature (36)..(205): Homolog of NCBI NO: 27366476 NR Description: Predicted phosphatases [Vibrio vulnificus CMCP6]
  misc_feature (37)..(195): Homolog of NCBI NO: 28900419 NR Description: hypothetical protein [Vibrio parahaemolyticus
  misc_feature (27)..(195): Homolog of NCBI NO: 24375526 NR Description: hydrolase, haloacid dehalogenase-like family
  misc_feature (38)..(200): Homolog of NCBI NO: 6324705 NR Description: Hypothetical ORF; Yor131cp [Saccharomyces
  misc_feature (13)..(198): Homolog of NCBI NO: 25408252 NR Description: hypothetical protein At2g33250 [imported] -
  misc_feature (27)..(198): Homolog of NCBI NO: 30685622 NR Description: haloacid dehalogenase-like hydrolase family
  misc_feature (6)..(198): Homolog of NCBI NO: 20196855 NR Description: unknown protein [Arabidopsis thaliana]
DHFFSMTFLLSRTFISLTLRPSCSISMANLTTNAKSRLRGVVFDMDGTLTVPVIDFAAMYRAVLGEDAYKRIKAESPSGIDILHHIESWSPDKQQKAYEIIADYEKQGIDKLQIMPGTAELCGFLDSKKIKRGLITRNVQKAIDIFHQRFEVIFSPALGREFRPYKPNPDPLLHICSTWDIQPNEVMMVGDSLKDDVSDRHDDKPLVNPFSIANR

SEQ ID NO: 35855 - protein, 210 aa, Arabidopsis thaliana
  peptide (1)..(210): Ceres Seq. ID no. 13592327
  misc_feature (33)..(193): Pfam Name: haloacid dehalogenase-like hydrolase Pfam Description: haloacid dehalogenase-like hydrolase
  misc_feature (33)..(193): Pfam Name: haloacid dehalogenase-like hydrolase Pfam Description: haloacid dehalogenase-like hydrolase
  misc_feature (63)..(176): Homolog of NCBI NO: 21622506 NR Description: conserved hypothetical protein [Neurospora crassa]
  misc_feature (32)..(190): Homolog of NCBI NO: 28900419 NR Description: hypothetical protein [Vibrio parahaemolyticus
  misc_feature (33)..(186): Homolog of NCBI NO: 26991442 NR Description: hydrolase, haloacid dehalogenase-like family
  misc_feature (31)..(200): Homolog of NCBI NO: 27366476 NR Description: Predicted phosphatases [Vibrio vulnificus CMCP6]
  misc_feature (37)..(190): Homolog of NCBI NO: 39995800 NR Description: HAD-superfamily hydrolase, subfamily IA, variant
  misc_feature (63)..(176): Homolog of NCBI NO: 21622506 NR Description: conserved hypothetical protein [Neurospora crassa]
  misc_feature (33)..(186): Homolog of NCBI NO: 26991442 NR Description: hydrolase, haloacid dehalogenase-like family
  misc_feature (37)..(190): Homolog of NCBI NO: 39995800 NR Description: HAD-superfamily hydrolase, subfamily IA, variant
  misc_feature (1)..(193): Homolog of NCBI NO: 20196855 NR Description: unknown protein [Arabidopsis thaliana]
  misc_feature (22)..(193): Homolog of NCBI NO: 30685622 NR Description: haloacid dehalogenase-like hydrolase family
  misc_feature (8)..(193): Homolog of NCBI NO: 25408252 NR Description: hypothetical protein At2g33250 [imported] -
  misc_feature (33)..(195): Homolog of NCBI NO: 6324705 NR Description: Hypothetical ORF; Yor131cp [Saccharomyces
  misc_feature (22)..(190): Homolog of NCBI NO: 24375526 NR Description: hydrolase, haloacid dehalogenase-like family
  misc_feature (31)..(200): Homolog of NCBI NO: 27366476 NR Description: Predicted phosphatases [Vibrio vulnificus CMCP6]
  misc_feature (32)..(190): Homolog of NCBI NO: 28900419 NR Description: hypothetical protein [Vibrio parahaemolyticus
  misc_feature (22)..(190): Homolog of NCBI NO: 24375526 NR Description: hydrolase, haloacid dehalogenase-like family
  misc_feature (33)..(195): Homolog of NCBI NO: 6324705 NR Description: Hypothetical ORF; Yor131cp [Saccharomyces
  misc_feature (8)..(193): Homolog of NCBI NO: 25408252 NR Description: hypothetical protein At2g33250 [imported] -
  misc_feature (22)..(193): Homolog of NCBI NO: 30685622 NR Description: haloacid dehalogenase-like hydrolase family
  misc_feature (1)..(193): Homolog of NCBI NO: 20196855 NR Description: unknown protein [Arabidopsis thaliana]
MTFLLSRTFISLTLRPSCSISMANLTTNAKSRLRGVVFDMDGTLTVPVIDFAAMYRAVLGEDAYKRIKAESPSGIDILHHIESWSPDKQQKAYEIIADYEKQGIDKLQIMPGTAELCGFLDSKKIKRGLITRNVQKAIDIFHQRFEVIFSPALGREFRPYKPNPDPLLHICSTWDIQPNEVMMVGDSLKDDVSDRHDDKPLVNPFSIANR

SEQ ID NO: 35856 - protein, 189 aa, Arabidopsis thaliana
  peptide (1)..(189): Ceres Seq. ID no. 13592328
  misc_feature (12)..(172): Pfam Name: haloacid dehalogenase-like hydrolase Pfam Description: haloacid dehalogenase-like hydrolase
  misc_feature (12)..(172): Pfam Name: haloacid dehalogenase-like hydrolase Pfam Description: haloacid dehalogenase-like hydrolase
  misc_feature (42)..(155): Homolog of NCBI NO: 21622506 NR Description: conserved hypothetical protein [Neurospora crassa]
  misc_feature (11)..(169): Homolog of NCBI NO: 28900419 NR Description: hypothetical protein [Vibrio parahaemolyticus
  misc_feature (12)..(165): Homolog of NCBI NO: 26991442 NR Description: hydrolase, haloacid dehalogenase-like family
  misc_feature (10)..(179): Homolog of NCBI NO: 27366476 NR Description: Predicted phosphatases [Vibrio vulnificus CMCP6]
  misc_feature (16)..(169): Homolog of NCBI NO: 39995800 NR Description: HAD-superfamily hydrolase, subfamily IA, variant
  misc_feature (42)..(155): Homolog of NCBI NO: 21622506 NR Description: conserved hypothetical protein [Neurospora crassa]
  misc_feature (12)..(165): Homolog of NCBI NO: 26991442 NR Description: hydrolase, haloacid dehalogenase-like family
  misc_feature (16)..(169): Homolog of NCBI NO: 39995800 NR Description: HAD-superfamily hydrolase, subfamily IA, variant
  misc_feature (1)..(172): Homolog of NCBI NO: 20196855 NR Description: unknown protein [Arabidopsis thaliana]
  misc_feature (1)..(172): Homolog of NCBI NO: 30685622 NR Description: haloacid dehalogenase-like hydrolase family
  misc_feature (1)..(172): Homolog of NCBI NO: 25408252 NR Description: hypothetical protein At2g33250 [imported] -
  misc_feature (12)..(174): Homolog of NCBI NO: 6324705 NR Description: Hypothetical ORF; Yor131cp [Saccharomyces
  misc_feature (1)..(169): Homolog of NCBI NO: 24375526 NR Description: hydrolase, haloacid dehalogenase-like family
  misc_feature (10)..(179): Homolog of NCBI NO: 27366476 NR Description: Predicted phosphatases [Vibrio vulnificus CMCP6]
  misc_feature (11)..(169): Homolog of NCBI NO: 28900419 NR Description: hypothetical protein [Vibrio parahaemolyticus
  misc_feature (1)..(169): Homolog of NCBI NO: 24375526 NR Description: hydrolase, haloacid dehalogenase-like family
  misc_feature (12)..(174): Homolog of NCBI NO: 6324705 NR Description: Hypothetical ORF; Yor131cp [Saccharomyces
  misc_feature (1)..(172): Homolog of NCBI NO: 25408252 NR Description: hypothetical protein At2g33250 [imported] -
  misc_feature (1)..(172): Homolog of NCBI NO: 30685622 NR Description: haloacid dehalogenase-like hydrolase family
  misc_feature (1)..(172): Homolog of NCBI NO: 20196855 NR Description: unknown protein [Arabidopsis thaliana]
MANLTTNAKSRLRGVVFDMDGTLTVPVIDFAAMYRAVLGEDAYKRIKAESPSGIDILHHIESWSPDKQQKAYEIIADYEKQGIDKLQIMPGTAELCGFLDSKKIKRGLITRNVQKAIDIFHQRFEVIFSPALGREFRPYKPNPDPLLHICSTWDIQPNEVMMVGDSLKDDVSDRHDDKPLVNPFSIANR

SEQ ID NO: 35857 - DNA, 1284 bp, Arabidopsis thaliana
  misc_feature (1)..(1284): Ceres Seq. ID no. 12348687
  misc_feature: MA Experiment ID: 108434 Result: Up-regulated in Transcription
  misc_feature: MA Experiment 108434 PARAMETER Experiment Name: At_Root_Tips_cDNA_P Parameter: Tissue Value: Root Tips
  misc_feature: MA Experiment ID: 108576 Result: Up-regulated in Transcription
  misc_feature: MA Experiment 108576 PARAMETER Experiment Name: At_42deg_Heat_cDNA_P Parameter: Temperature (deg C) Value: 42 vs. 22
  misc_feature: MA Experiment 108576 PARAMETER Experiment Name: At_42deg_Heat_cDNA_P Parameter: Timepoint (hr) Value: 1
  misc_feature: MA Experiment 108576 PARAMETER Experiment Name: At_42deg_Heat_cDNA_P Parameter: Tissue Value: Aerial
  misc_feature: MA Experiment ID: 108595 Result: Up-regulated in Transcription
  misc_feature: MA Experiment 108595 PARAMETER Experiment Name: At_Ler-pi_Ovule_cDNA_P Parameter: Plant Line Value: null
  misc_feature: MA Experiment ID: 20000179 Result: Up-regulated in Transcription
  misc_feature: MA Experiment 20000179 PARAMETER Experiment Name: At_Germinating_Seeds_P Parameter: Age (hr) Value: 6 vs. 0
  misc_feature: MA Experiment 20000179 PARAMETER Experiment Name: At_Germinating_Seeds_P Parameter: Tissue Value: Germinating Seeds
  misc_feature: MA Experiment ID: 20000224 Result: Down-regulated in Transcription
agattagatcttggttccaaatttcactcttttcctctaaaacgcatttatcactttccctcattaaacacaaaaactcattcatcgtcctctctcgcttgacctacaacacccgattctctaatcgaaaccgtttctctctttttgatcagatctcagatctttccctctttgattcttcttccttagatcgattctctctagaaacaacaatggcgtctgggcgtgaagagttcgtatacatggctaagctcgcggagcaagcggagaggtacgaagagatggtagagtttatggagaaagtctccgccgccgttgatggcgatgaactcaccgtagaagagcgaaatcttctctccgtcgcttataagaatgtgattggtgctcgccgtgcctcgtggcgtatcatttcatcgatcgagcagaaggaagagagccgtggtaacgatgaccacgtcacggcgatccgtgaatataggtctaagatcgagacggaactctccggaatctgcgacggaatccttaagttgcttgactctagactcatccctgccgctgcttctggtgattccaaggtcttttaccttaagatgaagggagattatcacaggtacttggctgagtttaagactggtcaagagaggaaagacgccgccgaacatacactcgccgcttacaaatctgctcaggatattgctaatgcagagcttgctccaacacacccaattcgtcttggtcttgcattgaacttctctgtgttctattacgagatcctcaattctcctgatcgtgcctgtaacctcgccaaacaggcctttgatgaggcgattgcagagttggacactcttggtgaagagtcatacaaagacagtaccttgatcatgcagcttcttcgtgacaatctcactctctggacatctgatatgcaggatgatgctgcggatgagatcaaggaagcagcagcgccaaaaccgaccgaggaacagcagtgatcttttgagtgaaactgctagttttcttctagggtttggaatttcttctctttctcgtccatatgtttttcttaatccatctaagaggtcgctcttgccatttcgctcatcttcaaaagcttattcattcatcatatttgtggcaagtctgaaccatcaatcatctttttatctctttttaatttattttctcttttcttatttctttgttgttatcgatttcaatgtctgtgtaatcgaaacttgctttcttttctcatcaatttgaagatcataaagtctcttgtctctt

SEQ ID NO: 35858 - protein, 329 aa, Arabidopsis thaliana
  peptide (1)..(329): Ceres Seq. ID no. 12348688
  misc_feature (75)..(312): Pfam Name: 14-3-3 protein Pfam Description: 14-3-3 protein
  misc_feature (73)..(329): Homolog of NCBI NO: 8099063 NR Description: 14-3-3 protein [Populus x canescens]
  misc_feature (72)..(329): Homolog of NCBI NO: 20340229 NR Description: 14-3-3-like protein [Thellungiella halophila]
  misc_feature (72)..(329): Homolog of NCBI NO: 1702986 NR Description: 14-3-3-like protein GF14 chi (General regulatory
  misc_feature (71)..(329): Homolog of NCBI NO: 1361987 NR Description: 14-3-3 protein homolog GF14 chi chain -
  misc_feature (72)..(329): Homolog of NCBI NO: 18413181 NR Description: 14-3-3 protein GF14 chi (grf1)
  misc_feature (72)..(327): Homolog of NCBI NO: 14532442 NR Description: At1g35160/T32G9_30 [Arabidopsis thaliana]
  misc_feature (72)..(329): Homolog of NCBI NO: 18399524 NR Description: 14-3-3 protein GF14 phi (grf4)
  misc_feature (73)..(329): Homolog of NCBI NO: 13447104 NR Description: GF14 omega [Brassica napus]
  misc_feature (71)..(329): Homolog of NCBI NO: 487791 NR Description: GF14omega isoform
  misc_feature (71)..(329): Homolog of NCBI NO: 18411901 NR Description: 14-3-3 protein GF14 omega (grf2)
IRSWFQISLFSSKTHLSLSLIKHKNSFIVLSRLTYNTRFSNRNRFSLFDQISDLSLFDSSSLDRFSLETTMASGREEFVYMAKLAEQAERYEEMVEFMEKVSAAVDGDELTVEERNLLSVAYKNVIGARRASWRIISSIEQKEESRGNDDHVTAIREYRSKIETELSGICDGILKLLDSRLIPAAASGDSKVFYLKMKGDYHRYLAEFKTGQERKDAAEHTLAAYKSAQDIANAELAPTHPIRLGLALNFSVFYYEILNSPDRACNLAKQAFDEAIAELDTLGEESYKDSTLIMQLLRDNLTLWTSDMQDDAADEIKEAAAPKPTEEQQ

SEQ ID NO: 35859 - protein, 259 aa, Arabidopsis thaliana
  peptide (1)..(259): Ceres Seq. ID no. 12348689
  misc_feature (5)..(242): Pfam Name: 14-3-3 protein Pfam Description: 14-3-3 protein
  misc_feature (3)..(259): Homolog of NCBI NO: 8099063 NR Description: 14-3-3 protein [Populus x canescens]
  misc_feature (2)..(259): Homolog of NCBI NO: 20340229 NR Description: 14-3-3-like protein [Thellungiella halophila]
  misc_feature (2)..(259): Homolog of NCBI NO: 1702986 NR Description: 14-3-3-like protein GF14 chi (General regulatory
  misc_feature (1)..(259): Homolog of NCBI NO: 1361987 NR Description: 14-3-3 protein homolog GF14 chi chain -
  misc_feature (2)..(259): Homolog of NCBI NO: 18413181 NR Description: 14-3-3 protein GF14 chi (grf1)
  misc_feature (2)..(257): Homolog of NCBI NO: 14532442 NR Description: At1g35160/T32G9_30 [Arabidopsis thaliana]
  misc_feature (2)..(259): Homolog of NCBI NO: 18399524 NR Description: 14-3-3 protein GF14 phi (grf4)
  misc_feature (3)..(259): Homolog of NCBI NO: 13447104 NR Description: GF14 omega [Brassica napus]
  misc_feature (1)..(259): Homolog of NCBI NO: 487791 NR Description: GF14omega isoform
  misc_feature (1)..(259): Homolog of NCBI NO: 18411901 NR Description: 14-3-3 protein GF14 omega (grf2)
MASGREEFVYMAKLAEQAERYEEMVEFMEKVSAAVDGDELTVEERNLLSVAYKNVIGARRASWRIISSIEQKEESRGNDDHVTAIREYRSKIETELSGICDGILKLLDSRLIPAAASGDSKVFYLKMKGDYHRYLAEFKTGQERKDAAEHTLAAYKSAQDIANAELAPTHPIRLGLALNFSVFYYEILNSPDRACNLAKQAFDEAIAELDTLGEESYKDSTLIMQLLRDNLTLWTSDMQDDAADEIKEAAAPKPTEEQQ

SEQ ID NO: 35860 - protein, 249 aa, Arabidopsis thaliana
  peptide (1)..(249): Ceres Seq. ID no. 12348690
  misc_feature (1)..(232): Pfam Name: 14-3-3 protein Pfam Description: 14-3-3 protein
  misc_feature (1)..(249): Homolog of NCBI NO: 8099063 NR Description: 14-3-3 protein [Populus x canescens]
  misc_feature (1)..(249): Homolog of NCBI NO: 20340229 NR Description: 14-3-3-like protein [Thellungiella halophila]
  misc_feature (1)..(249): Homolog of NCBI NO: 1702986 NR Description: 14-3-3-like protein GF14 chi (General regulatory
  misc_feature (1)..(249): Homolog of NCBI NO: 1361987 NR Description: 14-3-3 protein homolog GF14 chi chain -
  misc_feature (1)..(249): Homolog of NCBI NO: 18413181 NR Description: 14-3-3 protein GF14 chi (grf1)
  misc_feature (1)..(247): Homolog of NCBI NO: 14532442 NR Description: At1g35160/T32G9_30 [Arabidopsis thaliana]
  misc_feature (1)..(249): Homolog of NCBI NO: 18399524 NR Description: 14-3-3 protein GF14 phi (grf4)
  misc_feature (1)..(249): Homolog of NCBI NO: 13447104 NR Description: GF14 omega [Brassica napus]
  misc_feature (1)..(249): Homolog of NCBI NO: 487791 NR Description: GF14omega isoform
  misc_feature (1)..(249): Homolog of NCBI NO: 18411901 NR Description: 14-3-3 protein GF14 omega (grf2)
MAKLAEQAERYEEMVEFMEKVSAAVDGDELTVEERNLLSVAYKNVIGARRASWRIISSIEQKEESRGNDDHVTAIREYRSKIETELSGICDGILKLLDSRLIPAAASGDSKVFYLKMKGDYHRYLAEFKTGQERKDAAEHTLAAYKSAQDIANAELAPTHPIRLGLALNFSVFYYEILNSPDRACNLAKQAFDEAIAELDTLGEESYKDSTLIMQLLRDNLTLWTSDMQDDAADEIKEAAAPKPTEEQQ

SEQ ID NO: 35861 - DNA, 861 bp, Arabidopsis thaliana
  misc_feature (1)..(861): Ceres Seq. ID no. 12372082
  misc_feature: MA Experiment ID: 108462 Result: Down-regulated in Transcription
  misc_feature: MA Experiment 108462 PARAMETER Experiment Name: At_Germinating_Seeds_cDNA_P Parameter: Age (day) Value: 2 vs. 0
  misc_feature: MA Experiment 108462 PARAMETER Experiment Name: At_Germinating_Seeds_cDNA_P Parameter: Tissue Value: Germinating Seeds
  misc_feature: MA Experiment ID: 108463 Result: Down-regulated in Transcription
  misc_feature: MA Experiment 108463 PARAMETER Experiment Name: At_Germinating_Seeds_cDNA_P Parameter: Age (day) Value: 3 vs. 0
  misc_feature: MA Experiment 108463 PARAMETER Experiment Name: At_Germinating_Seeds_cDNA_P Parameter: Tissue Value: Germinating Seeds
  misc_feature: MA Experiment ID: 108464 Result: Down-regulated in Transcription
  misc_feature: MA Experiment 108464 PARAMETER Experiment Name: At_Germinating_Seeds_cDNA_P Parameter: Age (day) Value: 4 vs. 0
  misc_feature: MA Experiment 108464 PARAMETER Experiment Name: At_Germinating_Seeds_cDNA_P Parameter: Tissue Value: Germinating Seeds
  misc_feature: MA Experiment ID: 108573 Result: Down-regulated in Transcription
  misc_feature: MA Experiment 108573 PARAMETER Experiment Name: At_Drought_cDNA_P Parameter: Timepoint (hr) Value: 6
  misc_feature: MA Experiment 108573 PARAMETER Experiment Name: At_Drought_cDNA_P Parameter: Tissue Value: Aerial
  misc_feature: MA Experiment 108573 PARAMETER Experiment Name: At_Drought_cDNA_P Parameter: Treatment Value: Drought vs. No Drought
  misc_feature: MA Experiment ID: 108595 Result: Up-regulated in Transcription
  misc_feature: MA Experiment 108595 PARAMETER Experiment Name: At_Ler-pi_Ovule_cDNA_P Parameter: Plant Line Value: null
  misc_feature: MA Experiment ID: 20000090 Result: Up-regulated in Transcription
  misc_feature: MA Experiment ID: 20000113 Result: Up-regulated in Transcription
  misc_feature: MA Experiment 20000113 PARAMETER Experiment Name: At_42deg_Heat_cDNA_P Parameter: Temperature (deg C) Value: 42 vs. 22
  misc_feature: MA Experiment 20000113 PARAMETER Experiment Name: At_42deg_Heat_cDNA_P Parameter: Timepoint (hr) Value: 8
  misc_feature: MA Experiment 20000113 PARAMETER Experiment Name: At_42deg_Heat_cDNA_P Parameter: Tissue Value: Aerial
  misc_feature: MA Experiment ID: 20000227 Result: Up-regulated in Transcription
  misc_feature: MA Experiment 20000227 PARAMETER Experiment Name: At_Root-Tips-vs-Tops_P Parameter: Tissue Value: Root Tips vs. Root Tops
aaaaaagggactgtggagaaacactttagcacggtgcgacaagatggcgagctcagtgacgctgcttctatggagtcttcttcttctcggtacactaagcgctattcaggccaaaaagtctaaggaaaacttaaaggagatcacacacaaggtttattttgatgttgaaattgatgggaaagcagctggtcgtattgtcatgggtctatttggcaagacagtccccaaaactgtagagaatttccgagctttatgcactggggagaaaggaataggtaagaatgggaaggcgctccattacaaggggagttcatttcataggatcataccaagctttatgctccaaggaggcgattttacacatggaaatggaatgggaggagaatctatctatggtgagaagtttgctgatgagaacttcaaactcaagcatactggtccagggttcttatcaatggcaaatgccggtcaagataccaacggatcacagtttttcatcacaactgtaacaaccagctggttggatgggcgacatgtggtattcgggaaggtagtgacaggaatggatgtggtgtacaaagtcgaagctgaaggaaatcagagtggaactcctaagagtaaagtggtgattgtagacagtggtgagcttcccctgtaactcaacaactctagttttctccatctgatcatccattgatgtgagctctagtgtgcttgatgacttttgtgttaaaacgagtgtcttggttactttatgaaagattctaccggctttatttctttcgtctgctttctagctcgagctatgtctgactttatacacaaatgtctttcagtagcaaaaattctgcacttatgccg

SEQ ID NO: 35862 - protein, 218 aa, Arabidopsis thaliana
  peptide (1)..(218): Ceres Seq. ID no. 12372083
  misc_feature (50)..(216): Homolog of NCBI NO: 863016 NR Description: cyclophilin
  misc_feature (42)..(218): Homolog of NCBI NO: 11270308 NR Description: peptidylprolyl isomerase (EC 5.2.1.8) F27K19.100
  misc_feature (50)..(216): Homolog of NCBI NO: 17566266 NR Description: CYcloPhilin family CYP-7 (18.4 kD) (cyp-7)
  misc_feature (27)..(216): Homolog of NCBI NO: 5731960 NR Description: cyclophilin B [Dictyostelium discoideum]
  misc_feature (42)..(218): Homolog of NCBI NO: 18410386 NR Description: cyclophilin-like protein
  misc_feature (5)..(218): Homolog of NCBI NO: 32351008 NR Description: cyclophilin [Triticum aestivum]
  misc_feature (15)..(218): Homolog of NCBI NO: 21554007 NR Description: cyclophilin [Arabidopsis thaliana]
  misc_feature (15)..(218): Homolog of NCBI NO: 15227674 NR Description: cyclophilin
  misc_feature (15)..(218): Homolog of NCBI NO: 11270326 NR Description: peptidylprolyl isomerase (EC 5.2.1.8) CYP5
  misc_feature (15)..(218): Homolog of NCBI NO: 15237739 NR Description: cyclophilin ROC7
KKGLWRNTLARCDKMASSVTLLLWSLLLLGTLSAIQAKKSKENLKEITHKVYFDVEIDGKAAGRIVMGLFGKTVPKTVENFRALCTGEKGIGKNGKALHYKGSSFHRIIPSFMLQGGDFTHGNGMGGESIYGEKFADENFKLKHTGPGFLSMANAGQDTNGSQFFITTVTTSWLDGRHVVFGKVVTGMDVVYKVEAEGNQSGTPKSKVVIVDSGELPL

SEQ ID NO: 35863 - protein, 204 aa, Arabidopsis thaliana
  peptide (1)..(204): Ceres Seq. ID no. 12372084
  misc_feature (36)..(202): Homolog of NCBI NO: 863016 NR Description: cyclophilin
  misc_feature (28)..(204): Homolog of NCBI NO: 11270308 NR Description: peptidylprolyl isomerase (EC 5.2.1.8) F27K19.100
  misc_feature (36)..(202): Homolog of NCBI NO: 17566266 NR Description: CYcloPhilin family CYP-7 (18.4 kD) (cyp-7)
  misc_feature (13)..(202): Homolog of NCBI NO: 5731960 NR Description: cyclophilin B [Dictyostelium discoideum]
  misc_feature (28)..(204): Homolog of NCBI NO: 18410386 NR Description: cyclophilin-like protein
  misc_feature (1)..(204): Homolog of NCBI NO: 32351008 NR Description: cyclophilin [Triticum aestivum]
  misc_feature (1)..(204): Homolog of NCBI NO: 21554007 NR Description: cyclophilin [Arabidopsis thaliana]
  misc_feature (1)..(204): Homolog of NCBI NO: 15227674 NR Description: cyclophilin
  misc_feature (1)..(204): Homolog of NCBI NO: 11270326 NR Description: peptidylprolyl isomerase (EC 5.2.1.8) CYP5
  misc_feature (1)..(204): Homolog of NCBI NO: 15237739 NR Description: cyclophilin ROC7
MASSVTLLLWSLLLLGTLSAIQAKKSKENLKEITHKVYFDVEIDGKAAGRIVMGLFGKTVPKTVENFRALCTGEKGIGKNGKALHYKGSSFHRIIPSFMLQGGDFTHGNGMGGESIYGEKFADENFKLKHTGPGFLSMANAGQDTNGSQFFITTVTTSWLDGRHVVFGKVVTGMDVVYKVEAEGNQSGTPKSKVVIVDSGELPL

SEQ ID NO: 35864 - protein, 152 aa, Arabidopsis thaliana
  peptide (1)..(152): Ceres Seq. ID no. 12372085
  misc_feature (1)..(150): Homolog of NCBI NO: 863016 NR Description: cyclophilin
  misc_feature (1)..(152): Homolog of NCBI NO: 11270308 NR Description: peptidylprolyl isomerase (EC 5.2.1.8) F27K19.100
  misc_feature (1)..(150): Homolog of NCBI NO: 17566266 NR Description: CYcloPhilin family CYP-7 (18.4 kD) (cyp-7)
  misc_feature (1)..(150): Homolog of NCBI NO: 5731960 NR Description: cyclophilin B [Dictyostelium discoideum]
  misc_feature (1)..(152): Homolog of NCBI NO: 18410386 NR Description: cyclophilin-like protein
  misc_feature (1)..(152): Homolog of NCBI NO: 32351008 NR Description: cyclophilin [Triticum aestivum]
  misc_feature (1)..(152): Homolog of NCBI NO: 21554007 NR Description: cyclophilin [Arabidopsis thaliana]
  misc_feature (1)..(152): Homolog of NCBI NO: 15227674 NR Description: cyclophilin
  misc_feature (1)..(152): Homolog of NCBI NO: 11270326 NR Description: peptidylprolyl isomerase (EC 5.2.1.8) CYP5
  misc_feature (1)..(152): Homolog of NCBI NO: 15237739 NR Description: cyclophilin ROC7
MGLFGKTVPKTVENFRALCTGEKGIGKNGKALHYKGSSFHRIIPSFMLQGGDFTHGNGMGGESIYGEKFADENFKLKHTGPGFLSMANAGQDTNGSQFFITTVTTSWLDGRHVVFGKVVTGMDVVYKVEAEGNQSGTPKSKVVIVDSGELPL

SEQ ID NO: 35865 - DNA, 1354 bp, Arabidopsis thaliana
  misc_feature (1)..(1354): Ceres Seq. ID no. 13487647
  misc_feature: MA Experiment ID: 108461 Result: Up-regulated in Transcription
  misc_feature: MA Experiment 108461 PARAMETER Experiment Name: At_Germinating_Seeds_cDNA_P Parameter: Age (day) Value: 1 vs. 0
  misc_feature: MA Experiment 108461 PARAMETER Experiment Name: At_Germinating_Seeds_cDNA_P Parameter: Tissue Value: Germinating Seeds
  misc_feature: MA Experiment ID: 108462 Result: Up-regulated in Transcription
  misc_feature: MA Experiment 108462 PARAMETER Experiment Name: At_Germinating_Seeds_cDNA_P Parameter: Age (day) Value: 2 vs. 0
  misc_feature: MA Experiment 108462 PARAMETER Experiment Name: At_Germinating_Seeds_cDNA_P Parameter: Tissue Value: Germinating Seeds
  misc_feature: MA Experiment ID: 108463 Result: Up-regulated in Transcription
  misc_feature: MA Experiment 108463 PARAMETER Experiment Name: At_Germinating_Seeds_cDNA_P Parameter: Age (day) Value: 3 vs. 0
  misc_feature: MA Experiment 108463 PARAMETER Experiment Name: At_Germinating_Seeds_cDNA_P Parameter: Tissue Value: Germinating Seeds
  misc_feature: MA Experiment ID: 108464 Result: Up-regulated in Transcription
  misc_feature: MA Experiment 108464 PARAMETER Experiment Name: At_Germinating_Seeds_cDNA_P Parameter: Age (day) Value: 4 vs. 0
  misc_feature: MA Experiment 108464 PARAMETER Experiment Name: At_Germinating_Seeds_cDNA_P Parameter: Tissue Value: Germinating Seeds
  misc_feature: MA Experiment ID: 20000185 Result: Up-regulated in Transcription
  misc_feature: MA Experiment 20000185 PARAMETER Experiment Name: At_Roots__P Parameter: Age (day) Value: 7 vs. 21
  misc_feature: MA Experiment 20000185 PARAMETER Experiment Name: At_Roots__P Parameter: Organism Value: A. thaliana
  misc_feature: MA Experiment 20000185 PARAMETER Experiment Name: At_Roots__P Parameter: Tissue Value: Roots vs. Whole Plant
  misc_feature: MA Experiment ID: 20000227 Result: Down-regulated in Transcription
  misc_feature: MA Experiment 20000227 PARAMETER Experiment Name: At_Root-Tips-vs-Tops_P Parameter: Tissue Value: Root Tips vs. Root Tops
  misc_feature: MA Experiment ID: 20000264 Result: Down-regulated in Transcription
  misc_feature: MA Experiment 20000264 PARAMETER Experiment Name: At_Open_Flower_P Parameter: Age (day) Value: 21
  misc_feature: MA Experiment 20000264 PARAMETER Experiment Name: At_Open_Flower_P Parameter: Plant Line Value: WS
  misc_feature: MA Experiment 20000264 PARAMETER Experiment Name: At_Open_Flower_P Parameter: Tissue Value: Open Flower vs. Whole Plant
  misc_feature: MA Experiment ID: 20000438 Result: Down-regulated in Transcription
  misc_feature: MA Experiment 20000438 PARAMETER Experiment Name: At_Shoots__P Parameter: Age (day) Value: 14
  misc_feature: MA Experiment 20000438 PARAMETER Experiment Name: At_Shoots__P Parameter: Tissue Value: Shoots vs. Whole Plant
  misc_feature: MA Experiment ID: 20000439 Result: Up-regulated in Transcription
  misc_feature: MA Experiment 20000439 PARAMETER Experiment Name: At_Roots__P Parameter: Age (day) Value: 14 vs. 21
  misc_feature: MA Experiment 20000439 PARAMETER Experiment Name: At_Roots__P Parameter: Organism Value: A. thaliana
  misc_feature: MA Experiment 20000439 PARAMETER Experiment Name: At_Roots__P Parameter: Tissue Value: Roots vs. Whole Plant
gttttatcttttgatagttctgattgtaattagattttggtaggtcacttgtatagagagatcagtaaaataagaaggatgagttggtgtgatggttcagatgataactacgatcttaatcttgaaagagtatcgaacactgatcatccatcggttcaactcaaagaccaatctcaatcatgtgtaacgagccgtccagattccaagattagcgctgaaactcctatcacgagttgtccttcttgcggacacaagctccatcatcaccaagacgaccaggttggtagcatcaaagatttaccaagcttaccggcaggagtcaaattcgatccgtcggataaagagatccttatgcatttggaggcgaaggtatcatccgataagcgaaaacttcatccgttgattgatgaatttatacctacgcttgaaggagagaatggaatttgttatacgcatcctgagaaacttcctggagtaagcaaggacgggcaagtacggcacttcttccaccggccatcaaaggcttatacgaccggaacacgaaaacgaagaaaagtgagcacagatgaggaaggccatgaaacaaggtggcacaaaacaggcaagactcgacctgttttgtctcaatcaggagaaaccggtttcaagaagatcctagtgctctacaccaactatggtcgccagaagaagcctgagaagacgaattgggtgatgcatcagtatcatttaggtagcagcgaggacgaaaaagacggtgaaccagtcctctctaaagtcttctaccaaacacagcctaggcaatgcggttcgatggaacctaaaccgaaaaatctcgtaaacctaaaccggtttagttatgaaaatattcaggccggtttcgggtatgagcatggtggtaaaagtgaagagacgacgcaggtgattcgagagttggtagttcgtgaaggcgatgggtcatgttcgtttcttagttttacttgtgatgcaagtaagggtaaagaaagcttcatgaagaatcaatagaacataacatatataatatatataaatggaggtgctttgttggagtaaagatgaggaaaagaatgagagagcacatattctttgtgtgtaggtgttgggtaactatcatagtaatctacctcaaagcttttgggagattttaggttttaaccttttttattattaaattgggggcgtaactttaacctcgagacatgactgatatttgtttatatttctattcttctagataaaatatgtcaaaacaatactgtaatagctcgtctttcaattattgtaacaaatatttcaagtaataatgaaattaaaaatggataaaataggactttgg

SEQ ID NO: 35866 - protein, 314 aa, Arabidopsis thaliana
  peptide (1)..(314): Ceres Seq. ID no. 13487648
  misc_feature (77)..(218): Pfam Name: No apical meristem (NAM) protein Pfam Description: No apical meristem (NAM) protein
  misc_feature (22)..(241): Homolog of NCBI NO: 30689293 NR Description: No apical meristem (NAM) protein family
  misc_feature (22)..(241): Homolog of NCBI NO: 12320749 NR Description: unknown protein [Arabidopsis thaliana]
  misc_feature (32)..(242): Homolog of NCBI NO: 34906416 NR Description: P0710E05.22 [Oryza sativa (japonica
  misc_feature (53)..(244): Homolog of NCBI NO: 15241889 NR Description: No apical meristem (NAM) protein family
  misc_feature (41)..(242): Homolog of NCBI NO: 15233497 NR Description: No apical meristem (NAM) protein family
  misc_feature (46)..(243): Homolog of NCBI NO: 15235314 NR Description: No apical meristem (NAM) protein family
  misc_feature (1)..(265): Homolog of NCBI NO: 34911014 NR Description: OJ1125_C04.12 [Oryza sativa (japonica
  misc_feature (64)..(314): Homolog of NCBI NO: 6560767 NR Description: F3M18.9 [Arabidopsis thaliana]
  misc_feature (1)..(314): Homolog of NCBI NO: 21554371 NR Description: NAM protein, putative [Arabidopsis thaliana]
  misc_feature (1)..(314): Homolog of NCBI NO: 18396807 NR Description: No apical meristem (NAM) protein family
MSWCDGSDDNYDLNLERVSNTDHPSVQLKDQSQSCVTSRPDSKISAETPITSCPSCGHKLHHHQDDQVGSIKDLPSLPAGVKFDPSDKEILMHLEAKVSSDKRKLHPLIDEFIPTLEGENGICYTHPEKLPGVSKDGQVRHFFHRPSKAYTTGTRKRRKVSTDEEGHETRWHKTGKTRPVLSQSGETGFKKILVLYTNYGRQKKPEKTNWVMHQYHLGSSEDEKDGEPVLSKVFYQTQPRQCGSMEPKPKNLVNLNRFSYENIQAGFGYEHGGKSEETTQVIRELVVREGDGSCSFLSFTCDASKGKESFMKNQ

SEQ ID NO: 35867 - protein, 223 aa, Arabidopsis thaliana
  peptide (1)..(223): Ceres Seq. ID no. 13487649
  misc_feature (1)..(127): Pfam Name: No apical meristem (NAM) protein Pfam Description: No apical meristem (NAM) protein
  misc_feature (1)..(150): Homolog of NCBI NO: 30689293 NR Description: No apical meristem (NAM) protein family
  misc_feature (1)..(150): Homolog of NCBI NO: 12320749 NR Description: unknown protein [Arabidopsis thaliana]
  misc_feature (1)..(151): Homolog of NCBI NO: 34906416 NR Description: P0710E05.22 [Oryza sativa (japonica
  misc_feature (1)..(153): Homolog of NCBI NO: 15241889 NR Description: No apical meristem (NAM) protein family
  misc_feature (1)..(151): Homolog of NCBI NO: 15233497 NR Description: No apical meristem (NAM) protein family
  misc_feature (1)..(152): Homolog of NCBI NO: 15235314 NR Description: No apical meristem (NAM) protein family
  misc_feature (1)..(174): Homolog of NCBI NO: 34911014 NR Description: OJ1125_C04.12 [Oryza sativa (japonica
  misc_feature (1)..(223): Homolog of NCBI NO: 6560767 NR Description: F3M18.9 [Arabidopsis thaliana]
  misc_feature (1)..(223): Homolog of NCBI NO: 21554371 NR Description: NAM protein, putative [Arabidopsis thaliana]
  misc_feature (1)..(223): Homolog of NCBI NO: 18396807 NR Description: No apical meristem (NAM) protein family
MHLEAKVSSDKRKLHPLIDEFIPTLEGENGICYTHPEKLPGVSKDGQVRHFFHRPSKAYTTGTRKRRKVSTDEEGHETRWHKTGKTRPVLSQSGETGFKKILVLYTNYGRQKKPEKTNWVMHQYHLGSSEDEKDGEPVLSKVFYQTQPRQCGSMEPKPKNLVNLNRFSYENIQAGFGYEHGGKSEETTQVIRELVVREGDGSCSFLSFTCDASKGKESFMKNQ

SEQ ID NO: 35868 - DNA, 1086 bp, Arabidopsis thaliana
  misc_feature (1)..(1086): Ceres Seq. ID no. 12580498
  misc_feature: MA Experiment ID: 108461 Result: Up-regulated in Transcription
  misc_feature: MA Experiment 108461 PARAMETER Experiment Name: At_Germinating_Seeds_cDNA_P Parameter: Age (day) Value: 1 vs. 0
  misc_feature: MA Experiment 108461 PARAMETER Experiment Name: At_Germinating_Seeds_cDNA_P Parameter: Tissue Value: Germinating Seeds
  misc_feature: MA Experiment ID: 108462 Result: Up-regulated in Transcription
  misc_feature: MA Experiment 108462 PARAMETER Experiment Name: At_Germinating_Seeds_cDNA_P Parameter: Age (day) Value: 2 vs. 0
  misc_feature: MA Experiment 108462 PARAMETER Experiment Name: At_Germinating_Seeds_cDNA_P Parameter: Tissue Value: Germinating Seeds
  misc_feature: MA Experiment ID: 108463 Result: Up-regulated in Transcription
  misc_feature: MA Experiment 108463 PARAMETER Experiment Name: At_Germinating_Seeds_cDNA_P Parameter: Age (day) Value: 3 vs. 0
  misc_feature: MA Experiment 108463 PARAMETER Experiment Name: At_Germinating_Seeds_cDNA_P Parameter: Tissue Value: Germinating Seeds
  misc_feature: MA Experiment ID: 108464 Result: Up-regulated in Transcription
  misc_feature: MA Experiment 108464 PARAMETER Experiment Name: At_Germinating_Seeds_cDNA_P Parameter: Age (day) Value: 4 vs. 0
  misc_feature: MA Experiment 108464 PARAMETER Experiment Name: At_Germinating_Seeds_cDNA_P Parameter: Tissue Value: Germinating Seeds
agaattagatatttccgacacgaggcaaattcctagtggctcatggcgtcatcatctgatcacacggcgaagataatcgacggcaaggcgattgctcataccatcagatcagagatcgccgaggaagttcgcggtctatctgagaaacacggcaaggtcccaggactagctgtagttattgttgggagccgaaaggattcacagacctatgtgaatacgaagaggaaagcgtgcgctgaggttgggattaagtcatttgacgtgggcctaccagaggaagtttctgaagctgatcttattagcaaagttcatgaactaaattcaaatccggatgtccatggcatattagttcaactcccattgccgaaacatattaatgaggagaatatattgggtgcaatcagcattgataaagatgtcgatggcttccatcctttgaatattggtaagctagccatgaaaggcagagaacccctcttccttccttgcaccccaaagggatgtttggaactcctagctagaagcggcgtaaagataaaggggcaacgagcagttgttgtaggtcggagtaacattgttggtttgcccgtttcacttcttttgctcaaggctgatgctactgtcacaactgtacattctcacaccaaggatcctgaggctatcatacgggaagctgacattgttattgctgcatgcggacaagcccacatgattaagggcaactggataaagccaggggctgcagtaattgatgttggaactaatgcagtcagcgacccgagcaagaaatcaggataccggttggttggagatgttgatttcgcagaagcttcaaaagttgcaggtttcataactccggtccctggtggtgtaggcccaatgacagtggcaatgcttctcaggaacaccgtagacggtgccaagcgtgtctttggcgagtaaaacaatctactgtatgtaataaagaaaccaagagtttctccattctgtaattgtgtacttggcttgacgatatttttccactcaaataaattgaaattggcgttccctttggattaaaaaaaaaaaaaaaaaaaaaaaacaaaa

SEQ ID NO: 35869 - protein, 299 aa, Arabidopsis thaliana
  peptide (1)..(299): Ceres Seq. ID no. 12580499
  misc_feature (129)..(297): Pfam Name: Tetrahydrofolate dehydrogenase/cyclohydrolase, Pfam Description: Tetrahydrofolate dehydrogenase/cyclohydrolase,
  misc_feature (9)..(295): Homolog of NCBI NO: 23001349 NR Description: hypothetical protein [Magnetococcus sp. MC-1]
  misc_feature (9)..(297): Homolog of NCBI NO: 32405166 NR Description: hypothetical protein [Neurospora crassa]
  misc_feature (9)..(295): Homolog of NCBI NO: 9992889 NR Description: C1-THFS protein [Yarrowia lipolytica]
  misc_feature (11)..(297): Homolog of NCBI NO: 30687594 NR Description: tetrahydrofolate dehydrogenase/cyclohydrolase,
  misc_feature (11)..(297): Homolog of NCBI NO: 25284864 NR Description: methylenetetrahydrofolate dehydrogenase
  misc_feature (3)..(296): Homolog of NCBI NO: 15236888 NR Description: putative tetrahydrofolate synthase
  misc_feature (9)..(295): Homolog of NCBI NO: 12083525 NR Description: similar to Pisum sativum
  misc_feature (9)..(299): Homolog of NCBI NO: 11252953 NR Description: methylenetetrahydrofolate dehydrogenase (NADP)
  misc_feature (1)..(299): Homolog of NCBI NO: 15230449 NR Description: 5,10-methylenetetrahydrofolate
  misc_feature (1)..(299): Homolog of NCBI NO: 21553669 NR Description: 5,10-methylenetetrahydrofolate
MASSSDHTAKIIDGKAIAHTIRSEIAEEVRGLSEKHGKVPGLAVVIVGSRKDSQTYVNTKRKACAEVGIKSFDVGLPEEVSEADLISKVHELNSNPDVHGILVQLPLPKHINEENILGAISIDKDVDGFHPLNIGKLAMKGREPLFLPCTPKGCLELLARSGVKIKGQRAVVVGRSNIVGLPVSLLLLKADATVTTVHSHTKDPEAIIREADIVIAACGQAHMIKGNWIKPGAAVIDVGTNAVSDPSKKSGYRLVGDVDFAEASKVAGFITPVPGGVGPMTVAMLLRNTVDGAKRVFGE

SEQ ID NO: 35870 - protein, 161 aa, Arabidopsis thaliana
  peptide (1)..(161): Ceres Seq. ID no. 12580500
  misc_feature (1)..(159): Pfam Name: Tetrahydrofolate dehydrogenase/cyclohydrolase, Pfam Description: Tetrahydrofolate dehydrogenase/cyclohydrolase,
  misc_feature (1)..(157): Homolog of NCBI NO: 23001349 NR Description: hypothetical protein [Magnetococcus sp. MC-1]
  misc_feature (1)..(159): Homolog of NCBI NO: 32405166 NR Description: hypothetical protein [Neurospora crassa]
  misc_feature (1)..(157): Homolog of NCBI NO: 9992889 NR Description: C1-THFS protein [Yarrowia lipolytica]
  misc_feature (1)..(159): Homolog of NCBI NO: 30687594 NR Description: tetrahydrofolate dehydrogenase/cyclohydrolase,
  misc_feature (1)..(159): Homolog of NCBI NO: 25284864 NR Description: methylenetetrahydrofolate dehydrogenase
  misc_feature (1)..(158): Homolog of NCBI NO: 15236888 NR Description: putative tetrahydrofolate synthase
  misc_feature (1)..(157): Homolog of NCBI NO: 12083525 NR Description: similar to Pisum sativum
  misc_feature (1)..(161): Homolog of NCBI NO: 11252953 NR Description: methylenetetrahydrofolate dehydrogenase (NADP)
  misc_feature (1)..(161): Homolog of NCBI NO: 15230449 NR Description: 5,10-methylenetetrahydrofolate
  misc_feature (1)..(161): Homolog of NCBI NO: 21553669 NR Description: 5,10-methylenetetrahydrofolate
MKGREPLFLPCTPKGCLELLARSGVKIKGQRAVVVGRSNIVGLPVSLLLLKADATVTTVHSHTKDPEAIIREADIVIAACGQAHMIKGNWIKPGAAVIDVGTNAVSDPSKKSGYRLVGDVDFAEASKVAGFITPVPGGVGPMTVAMLLRNTVDGAKRVFGE

SEQ ID NO: 35871 - DNA, 948 bp, Arabidopsis thaliana
  misc_feature (1)..(948): Ceres Seq. ID no. 13488006
  misc_feature: MA Experiment ID: 20001451 Result: Down-regulated in Transcription
  misc_feature: MA Experiment 20001451 PARAMETER Experiment Name: At_Far-red-induction_P Parameter: Age (day) Value: 7
  misc_feature: MA Experiment 20001451 PARAMETER Experiment Name: At_Far-red-induction_P Parameter: Light Value: Far-red vs. White
  misc_feature: MA Experiment 20001451 PARAMETER Experiment Name: At_Far-red-induction_P Parameter: Organism Value: A. thaliana
  misc_feature: MA Experiment 20001451 PARAMETER Experiment Name: At_Far-red-induction_P Parameter: Plant Line Value: Columbia
  misc_feature: MA Experiment 20001451 PARAMETER Experiment Name: At_Far-red-induction_P Parameter: Timepoint (hr) Value: 24
  misc_feature: MA Experiment 20001451 PARAMETER Experiment Name: At_Far-red-induction_P Parameter: Tissue Value: Whole Plant
atagccagatagagagatcctggagaaagcttaaacctaacaatttctctcagagtgttatcatcaaaagattcttggtctccgatccagtcacctgaagattctccgagcttcttttgaccacacactttcaatggcggatgctgtgaacgctcaaactccatcgctctccgagcaatatcatttggagaaagaagtgaagcaagacacaagtgcaaagcctgttgaagtgaaagaggtggcaccagaagttactacacaagctgaagaggttaagacggagcaagctaaggaagaatctcctgttgaggaagcggtttctgtagttgaagagaagtctgaatctgctcctgaatcaacggaagtggcttctgaggctcctgctgcagcggaagacaatgctgaagagactcctgctgctgctgaagaaaataatgacgaaaacgctagtgaagaagttgctgaagaaacccctgatgagatcaagcttgagacagctcctgctgatttccgtttccctacaacaaaccaaacaaggcattgtttcactcgctacgttgaatatcacagatgtgtagctgctaagggtgatgatgctccagaatgcgataagtttgcaaagttttatcgatctctttgccccagcgaatgggttgataggtggaacgagcaaagagaaaatggaacattccctggtcctctaccctgaagaaaaatcatattgccatcattcctcttttgctgttaccttcatgagattacactgcagagtttaataagattttacaaaaccagcacttctggttcccatcatcataaaatgtgagaatttaacaaaactttatgaatctcaaatttttctcttatataagtttttgaggatcatctgatttttctgaattgttgttcttcctgattatgctttactatggcaagcttcaaattctt

SEQ ID NO: 35872 - protein, 191 aa, Arabidopsis thaliana; identical to SEQ ID NO: 23771
  peptide (1)..(191): Ceres Seq. ID no. 13488007
  misc_feature (116)..(189): Pfam Name: Cytochrome oxidase c subunit VIb Pfam Description: Cytochrome oxidase c subunit VIb
  misc_feature (117)..(189): Homolog of NCBI NO: 32401320 NR Description: cytochrome c oxidase subunit 6b-1 [Griffithsia
  misc_feature (117)..(190): Homolog of NCBI NO: 15234375 NR Description: hypothetical protein [Arabidopsis thaliana]
  misc_feature (116)..(190): Homolog of NCBI NO: 9967162 NR Description: cytochrome c oxidase subunit 6b
  misc_feature (115)..(190): Homolog of NCBI NO: 21592329 NR Description: cytochrome c oxidase subunit 6b [Arabidopsis
  misc_feature (115)..(190): Homolog of NCBI NO: 18424030 NR Description: expressed protein [Arabidopsis thaliana]
  misc_feature (39)..(190): Homolog of NCBI NO: 22204116 NR Description: putative cytochrome c oxidase subunit [Triticum
  misc_feature (30)..(190): Homolog of NCBI NO: 34906824 NR Description: putative cytochrome c oxidase subunit 6b-1
  misc_feature (28)..(190): Homolog of NCBI NO: 4586449 NR Description: cytochrome c oxidase subunit 6b-1
  misc_feature (1)..(191): Homolog of NCBI NO: 21554378 NR Description: cytochrome c oxidase subunit, putative
  misc_feature (1)..(191): Homolog of NCBI NO: 15219886 NR Description: cytochrome c oxidase subunit -related

SEQ ID NO: 35873 - DNA, 751 bp, Arabidopsis thaliana
  misc_feature (1)..(751): Ceres Seq. ID no. 12340049
  misc_feature: MA Experiment ID: 108595 Result: Down-regulated in Transcription
  misc_feature: MA Experiment 108595 PARAMETER Experiment Name: At_Ler-pi_Ovule_cDNA_P Parameter: Plant Line Value: null
  misc_feature: MA Experiment ID: 20000179 Result: Up-regulated in Transcription
  misc_feature: MA Experiment 20000179 PARAMETER Experiment Name: At_Germinating_Seeds_P Parameter: Age (hr) Value: 6 vs. 0
  misc_feature: MA Experiment 20000179 PARAMETER Experiment Name: At_Germinating_Seeds_P Parameter: Tissue Value: Germinating Seeds
  misc_feature: MA Experiment ID: 20000180 Result: Up-regulated in Transcription
  misc_feature: MA Experiment 20000180 PARAMETER Experiment Name: At_Germinating_Seeds_P Parameter: Age (hr) Value: 24 vs. 0
  misc_feature: MA Experiment 20000180 PARAMETER Experiment Name: At_Germinating_Seeds_P Parameter: Tissue Value: Germinating Seeds
  misc_feature: MA Experiment ID: 20000185 Result: Down-regulated in Transcription
  misc_feature: MA Experiment 20000185 PARAMETER Experiment Name: At_Roots__P Parameter: Age (day) Value: 7 vs. 21
  misc_feature: MA Experiment 20000185 PARAMETER Experiment Name: At_Roots__P Parameter: Organism Value: A. thaliana
  misc_feature: MA Experiment 20000185 PARAMETER Experiment Name: At_Roots__P Parameter: Tissue Value: Roots vs. Whole Plant
  misc_feature: MA Experiment ID: 20000286 Result: Down-regulated in Transcription
  misc_feature: MA Experiment 20000286 PARAMETER Experiment Name: At_Open_Flower_P Parameter: Age (day) Value: 21
  misc_feature: MA Experiment 20000286 PARAMETER Experiment Name: At_Open_Flower_P Parameter: Plant Line Value: WS
  misc_feature: MA Experiment 20000286 PARAMETER Experiment Name: At_Open_Flower_P Parameter: Tissue Value: Half Open vs. Whole Plant
  misc_feature: MA Experiment ID: 20000437 Result: Down-regulated in Transcription
  misc_feature: MA Experiment 20000437 PARAMETER Experiment Name: At_Drought_P Parameter: Age (day) Value: 8
  misc_feature: MA Experiment 20000437 PARAMETER Experiment Name: At_Drought_P Parameter: Organism Value: A. thaliana
  misc_feature: MA Experiment 20000437 PARAMETER Experiment Name: At_Drought_P Parameter: Plant Line Value: WS
  misc_feature: MA Experiment 20000437 PARAMETER Experiment Name: At_Drought_P Parameter: Timepoint (hr) Value: 24
  misc_feature: MA Experiment 20000437 PARAMETER Experiment Name: At_Drought_P Parameter: Tissue Value: Whole Plant
  misc_feature: MA Experiment 20000437 PARAMETER Experiment Name: At_Drought_P Parameter: Treatment Value: Drought vs. No Drought
  misc_feature: MA Experiment ID: 20000438 Result: Up-regulated in Transcription
  misc_feature: MA Experiment 20000438 PARAMETER Experiment Name: At_Shoots__P Parameter: Age (day) Value: 14
  misc_feature: MA Experiment 20000438 PARAMETER Experiment Name: At_Shoots__P Parameter: Tissue Value: Shoots vs. Whole Plant
  misc_feature: MA Experiment ID: 20000439 Result: Down-regulated in Transcription
  misc_feature: MA Experiment 20000439 PARAMETER Experiment Name: At_Roots__P Parameter: Age (day) Value: 14 vs. 21
  misc_feature: MA Experiment 20000439 PARAMETER Experiment Name: At_Roots__P Parameter: Organism Value: A. thaliana
  misc_feature: MA Experiment 20000439 PARAMETER Experiment Name: At_Roots__P Parameter: Tissue Value: Roots vs. Whole Plant
  misc_feature: MA Experiment ID: 20000496 Result: Down-regulated in Transcription
  misc_feature: MA Experiment 20000496 PARAMETER Experiment Name: At_Guard_Cells_P Parameter: Harvest Date Value: 7/19/2002
  misc_feature: MA Experiment 20000496 PARAMETER Experiment Name: At_Guard_Cells_P Parameter: Organism Value: Canola
  misc_feature: MA Experiment 20000496 PARAMETER Experiment Name: At_Guard_Cells_P Parameter: Tissue Value: Guard Cells vs. Leaves
  misc_feature: MA Experiment ID: 20000794 Result: Down-regulated in Transcription
  misc_feature: MA Experiment 20000794 PARAMETER Experiment Name: At_Petals_P Parameter: Age (day) Value: 23-25 days
  misc_feature: MA Experiment 20000794 PARAMETER Experiment Name: At_Petals_P Parameter: Plant Line Value: WS
  misc_feature: MA Experiment 20000794 PARAMETER Experiment Name: At_Petals_P Parameter: Tissue Value: Petals vs. Whole plant
  misc_feature: MA Experiment ID: 20001248 Result: Down-regulated in Transcription
  misc_feature: MA Experiment 20001248 PARAMETER Experiment Name: At_Far-red-induction_P Parameter: Age (day) Value: 7
  misc_feature: MA Experiment 20001248 PARAMETER Experiment Name: At_Far-red-induction_P Parameter: Light Value: Far-red vs. White
  misc_feature: MA Experiment 20001248 PARAMETER Experiment Name: At_Far-red-induction_P Parameter: Organism Value: A. thaliana
  misc_feature: MA Experiment 20001248 PARAMETER Experiment Name: At_Far-red-induction_P Parameter: Plant Line Value: Columbia
  misc_feature: MA Experiment 20001248 PARAMETER Experiment Name: At_Far-red-induction_P Parameter: Timepoint (hr) Value: 4
  misc_feature: MA Experiment 20001248 PARAMETER Experiment Name: At_Far-red-induction_P Parameter: Tissue Value: Whole Plant
  misc_feature: MA Experiment ID: 20001451 Result: Down-regulated in Transcription
  misc_feature: MA Experiment 20001451 PARAMETER Experiment Name: At_Far-red-induction_P Parameter: Age (day) Value: 7
  misc_feature: MA Experiment 20001451 PARAMETER Experiment Name: At_Far-red-induction_P Parameter: Light Value: Far-red vs. White
  misc_feature: MA Experiment 20001451 PARAMETER Experiment Name: At_Far-red-induction_P Parameter: Organism Value: A. thaliana
  misc_feature: MA Experiment 20001451 PARAMETER Experiment Name: At_Far-red-induction_P Parameter: Plant Line Value: Columbia
  misc_feature: MA Experiment 20001451 PARAMETER Experiment Name: At_Far-red-induction_P Parameter: Timepoint (hr) Value: 24
  misc_feature: MA Experiment 20001451 PARAMETER Experiment Name: At_Far-red-induction_P Parameter: Tissue Value: Whole Plant
  misc_feature: MA Experiment ID: 20001558 Result: Down-regulated in Transcription
  misc_feature: MA Experiment 20001558 PARAMETER Experiment Name: At_Drought_Soil_Dry_P Parameter: Age (day) Value: 27
  misc_feature: MA Experiment 20001558 PARAMETER Experiment Name: At_Drought_Soil_Dry_P Parameter: Organism Value: A. thaliana
  misc_feature: MA Experiment 20001558 PARAMETER Experiment Name: At_Drought_Soil_Dry_P Parameter: Plant Line Value: WS
  misc_feature: MA Experiment 20001558 PARAMETER Experiment Name: At_Drought_Soil_Dry_P Parameter: Post Timepoint (hr) Value: 6
  misc_feature: MA Experiment 20001558 PARAMETER Experiment Name: At_Drought_Soil_Dry_P Parameter: Post-Treatment Value: Re-Water vs. No Drought
  misc_feature: MA Experiment 20001558 PARAMETER Experiment Name: At_Drought_Soil_Dry_P Parameter: Timepoint (day) Value: 13
  misc_feature: MA Experiment 20001558 PARAMETER Experiment Name: At_Drought_Soil_Dry_P Parameter: Treatment Value: Drought vs. No Drought
  misc_feature: MA Experiment ID: 20001757 Result: Up-regulated in Transcription
  misc_feature: MA Experiment 20001757 PARAMETER Experiment Name: At_50mM_NH4NO3_L-to-H_P Parameter: Timepoint (hr) Value: 6
  misc_feature: MA Experiment 20001757 PARAMETER Experiment Name: At_50mM_NH4NO3_L-to-H_P Parameter: Tissue Value: Leaf
  misc_feature: MA Experiment 20001757 PARAMETER Experiment Name: At_50mM_NH4NO3_L-to-H_P Parameter: Treatment Value: 50mM NH4NO3 vs 100mM Mannitol
  misc_feature: MA Experiment ID: 20001905 Result: Down-regulated in Transcription
  misc_feature: MA Experiment 20001905 PARAMETER Experiment Name: At_Drought_Reproduction_P Parameter: Age (day) Value: 40
  misc_feature: MA Experiment 20001905 PARAMETER Experiment Name: At_Drought_Reproduction_P Parameter: Organism Value: A. thaliana
  misc_feature: MA Experiment 20001905 PARAMETER Experiment Name: At_Drought_Reproduction_P Parameter: Plant Line Value: WS
  misc_feature: MA Experiment 20001905 PARAMETER Experiment Name: At_Drought_Reproduction_P Parameter: Timepoint (day) Value: 10
  misc_feature: MA Experiment 20001905 PARAMETER Experiment Name: At_Drought_Reproduction_P Parameter: Tissue Value: Rosettes
  misc_feature: MA Experiment 20001905 PARAMETER Experiment Name: At_Drought_Reproduction_P Parameter: Treatment Value: Drought vs. No Drought
  misc_feature: MA Experiment ID: 20001906 Result: Down-regulated in Transcription
  misc_feature: MA Experiment 20001906 PARAMETER Experiment Name: At_Drought_Reproduction_P Parameter: Age (day) Value: 35
  misc_feature: MA Experiment 20001906 PARAMETER Experiment Name: At_Drought_Reproduction_P Parameter: Organism Value: A. thaliana
  misc_feature: MA Experiment 20001906 PARAMETER Experiment Name: At_Drought_Reproduction_P Parameter: Plant Line Value: WS
  misc_feature: MA Experiment 20001906 PARAMETER Experiment Name: At_Drought_Reproduction_P Parameter: Timepoint (day) Value: 5
  misc_feature: MA Experiment 20001906 PARAMETER Experiment Name: At_Drought_Reproduction_P Parameter: Tissue Value: Siliques
  misc_feature: MA Experiment 20001906 PARAMETER Experiment Name: At_Drought_Reproduction_P Parameter: Treatment Value: Drought vs. No Drought
  misc_feature: MA Experiment ID: 20001908 Result: Down-regulated in Transcription
  misc_feature: MA Experiment 20001908 PARAMETER Experiment Name: At_Drought_Reproduction_P Parameter: Age (day) Value: 40
  misc_feature: MA Experiment 20001908 PARAMETER Experiment Name: At_Drought_Reproduction_P Parameter: Organism Value: A. thaliana
  misc_feature: MA Experiment 20001908 PARAMETER Experiment Name: At_Drought_Reproduction_P Parameter: Plant Line Value: WS
  misc_feature: MA Experiment 20001908 PARAMETER Experiment Name: At_Drought_Reproduction_P Parameter: Timepoint (day) Value: 10
  misc_feature: MA Experiment 20001908 PARAMETER Experiment Name: At_Drought_Reproduction_P Parameter: Tissue Value: Siliques
  misc_feature: MA Experiment 20001908 PARAMETER Experiment Name: At_Drought_Reproduction_P Parameter: Treatment Value: Drought vs. No Drought
atttgctcattagagaacagagaaaaaaaaaacaatggcaactcaagccgccgggatcttcaactccgccataacaaccgccgcaacctccggcgtcaagaaactccactttttctcaacaacccaccgtcccaaatccctctccttcaccaaaaccgcaatccgctccgagaaaacagattcctccgccgccgctgctgcagcccccgccacgaaagaagctcccgtgggattcacgccaccgcagctagacccaaacacaccgtctccgatcttcgctggaagcaccggtggtcttctacgtaaagcgcaagtggaagagttctacgttatcacgtggaactcaccgaaagaacagatctttgagatgccgacagggaggagcagcgatcatgagagaaggtccgaatcttctgaagctagcgaggaaagagcagtgtttagctttggggacaaggcttagatccaagtacaagatcacttaccagttttacagagtgtttcctaacggtgaggttcaatatcttcatcctaaagatggtgtttatccagagaaggcgaatccaggaagagaaggtgttggtctcaacatgagatctattgggaaaaatgttagtcccattgaagttaagtttactggcaaacaaagttatgatttgtaagatctgtaaactaaaaaaaccaaaaactatgttcatgtggtgatgattatgactatgtttcatgttaatttttaatggattttgttttg

SEQ ID NO: 35874 - protein, 142 aa, Arabidopsis thaliana
  peptide (1)..(142): Ceres Seq. ID no. 12340050
  misc_feature (1)..(115): Homolog of NCBI NO: 131166 NR Description: Photosystem I reaction center subunit II,
  misc_feature (1)..(115): Homolog of NCBI NO: 34787117 NR Description: putative photosystem I reaction centre PSI-D
  misc_feature (1)..(115): Homolog of NCBI NO: 417544 NR Description: Photosystem I reaction center subunit II,
  misc_feature (1)..(115): Homolog of NCBI NO: 19855891 NR Description: Photosystem I reaction center subunit II,
  misc_feature (1)..(115): Homolog of NCBI NO: 21293 NR Description: 20 kDa protein (AA 1-212) [Spinacia oleracea]
  misc_feature (1)..(115): Homolog of NCBI NO: 72680 NR Description: photosystem I chain II precursor - spinach
  misc_feature (1)..(115): Homolog of NCBI NO: 5732201 NR Description: photosystem I subunit II precursor [Arabidopsis
  misc_feature (1)..(115): Homolog of NCBI NO: 15218708 NR Description: putative photosystem I reaction center subunit II
  misc_feature (1)..(115): Homolog of NCBI NO: 21595031 NR Description: putative photosystem I reaction center subunit II
  misc_feature (1)..(115): Homolog of NCBI NO: 15235503 NR Description: putative photosystem I reaction center subunit II
MATQAAGIFNSAITTAATSGVKKLHFFSTTHRPKSLSFTKTAIRSEKTDSSAAAAAAPATKEAPVGFTPPQLDPNTPSPIFAGSTGGLLRKAQVEEFYVITWNSPKEQIFEMPTGRSSDHERRSESSEASEERAVFSFGDKA

SEQ ID NO: 35875 - protein, 101 aa, Arabidopsis thaliana
  peptide (1)..(101): Ceres Seq. ID no. 12340051
ICSLENREKKNNGNSSRRDLQLRHNNRRNLRRQETPLFLNNPPSQIPLLHQNRNPLRENRFLRRRCCSPRHERSSRGIHATAARPKHTVSDLRWKHRWSST

SEQ ID NO: 35876 - protein, 89 aa, Arabidopsis thaliana
  peptide (1)..(89): Ceres Seq. ID no. 12340052
  misc_feature (1)..(88): Pfam Name: PsaD Pfam Description: PsaD
  misc_feature (1)..(89): Homolog of NCBI NO: 131166 NR Description: Photosystem I reaction center subunit II,
  misc_feature (1)..(89): Homolog of NCBI NO: 34787117 NR Description: putative photosystem I reaction centre PSI-D
  misc_feature (1)..(89): Homolog of NCBI NO: 417544 NR Description: Photosystem I reaction center subunit II,
  misc_feature (1)..(89): Homolog of NCBI NO: 19855891 NR Description: Photosystem I reaction center subunit II,
  misc_feature (1)..(89): Homolog of NCBI NO: 21293 NR Description: 20 kDa protein (AA 1-212) [Spinacia oleracea]
  misc_feature (1)..(89): Homolog of NCBI NO: 72680 NR Description: photosystem I chain II precursor - spinach
  misc_feature (1)..(89): Homolog of NCBI NO: 5732201 NR Description: photosystem I subunit II precursor [Arabidopsis
  misc_feature (1)..(89): Homolog of NCBI NO: 15218708 NR Description: putative photosystem I reaction center subunit II
  misc_feature (1)..(89): Homolog of NCBI NO: 21595031 NR Description: putative photosystem I reaction center subunit II
  misc_feature (1)..(89): Homolog of NCBI NO: 15235503 NR Description: putative photosystem I reaction center subunit II
MREGPNLLKLARKEQCLALGTRLRSKYKITYQFYRVFPNGEVQYLHPKDGVYPEKANPGREGVGLNMRSIGKNVSPIEVKFTGKQSYDL

SEQ ID NO: 35877 - DNA, 885 bp, Arabidopsis thaliana
  misc_feature (1)..(885): Ceres Seq. ID no. 13492248
  misc_feature: MA Experiment ID: 108433 Result: Down-regulated in Transcription
  misc_feature: MA Experiment 108433 PARAMETER Experiment Name: At_rhl_Mutant2_cDNA_P Parameter: Age (day) Value: 7
  misc_feature: MA Experiment 108433 PARAMETER Experiment Name: At_rhl_Mutant2_cDNA_P Parameter: Organism Value: A. thaliana
  misc_feature: MA Experiment 108433 PARAMETER Experiment Name: At_rhl_Mutant2_cDNA_P Parameter: Plant Line Value: rhl Mutant vs. wt landsburg
  misc_feature: MA Experiment 108433 PARAMETER Experiment Name: At_rhl_Mutant2_cDNA_P Parameter: Tissue Value: Roots
  misc_feature: MA Experiment ID: 108462 Result: Down-regulated in Transcription
  misc_feature: MA Experiment 108462 PARAMETER Experiment Name: At_Germinating_Seeds_cDNA_P Parameter: Age (day) Value: 2 vs. 0
  misc_feature: MA Experiment 108462 PARAMETER Experiment Name: At_Germinating_Seeds_cDNA_P Parameter: Tissue Value: Germinating Seeds
  misc_feature: MA Experiment ID: 108463 Result: Down-regulated in Transcription
  misc_feature: MA Experiment 108463 PARAMETER Experiment Name: At_Germinating_Seeds_cDNA_P Parameter: Age (day) Value: 3 vs. 0
  misc_feature: MA Experiment 108463 PARAMETER Experiment Name: At_Germinating_Seeds_cDNA_P Parameter: Tissue Value: Germinating Seeds
  misc_feature: MA Experiment ID: 108464 Result: Down-regulated in Transcription
  misc_feature: MA Experiment 108464 PARAMETER Experiment Name: At_Germinating_Seeds_cDNA_P Parameter: Age (day) Value: 4 vs. 0
  misc_feature: MA Experiment 108464 PARAMETER Experiment Name: At_Germinating_Seeds_cDNA_P Parameter: Tissue Value: Germinating Seeds
  misc_feature: MA Experiment ID: 108585 Result: Up-regulated in Transcription
  misc_feature: MA Experiment 108585 PARAMETER Experiment Name: At_5mM_NaNP_cDNA_P Parameter: Timepoint (hr) Value: 6
  misc_feature: MA Experiment 108585 PARAMETER Experiment Name: At_5mM_NaNP_cDNA_P Parameter: Tissue Value: Aerial
  misc_feature: MA Experiment 108585 PARAMETER Experiment Name: At_5mM_NaNP_cDNA_P Parameter: Treatment Value: null
  misc_feature: MA Experiment ID: 20000113 Result: Up-regulated in Transcription
  misc_feature: MA Experiment 20000113 PARAMETER Experiment Name: At_42deg_Heat_cDNA_P Parameter: Temperature (deg C) Value: 42 vs. 22
  misc_feature: MA Experiment 20000113 PARAMETER Experiment Name: At_42deg_Heat_cDNA_P Parameter: Timepoint (hr) Value: 8
  misc_feature: MA Experiment 20000113 PARAMETER Experiment Name: At_42deg_Heat_cDNA_P Parameter: Tissue Value: Aerial
  misc_feature: MA Experiment ID: 20000224 Result: Down-regulated in Transcription
  misc_feature: MA Experiment ID: 20001557 Result: Up-regulated in Transcription
  misc_feature: MA Experiment 20001557 PARAMETER Experiment Name: At_Drought_Soil_Dry_P Parameter: Age (day) Value: 27
  misc_feature: MA Experiment 20001557 PARAMETER Experiment Name: At_Drought_Soil_Dry_P Parameter: Organism Value: A. thaliana
  misc_feature: MA Experiment 20001557 PARAMETER Experiment Name: At_Drought_Soil_Dry_P Parameter: Plant Line Value: WS
  misc_feature: MA Experiment 20001557 PARAMETER Experiment Name: At_Drought_Soil_Dry_P Parameter: Post Timepoint (hr) Value: 3
  misc_feature: MA Experiment 20001557 PARAMETER Experiment Name: At_Drought_Soil_Dry_P Parameter: Post-Treatment Value: Re-Water vs. No Drought
  misc_feature: MA Experiment 20001557 PARAMETER Experiment Name: At_Drought_Soil_Dry_P Parameter: Timepoint (day) Value: 13
  misc_feature: MA Experiment 20001557 PARAMETER Experiment Name: At_Drought_Soil_Dry_P Parameter: Treatment Value: Drought vs. No Drought
aaaaaaaaaataatatcgagacgagacgggtttgtttcttctctctatctctatatctaccaaaatcctttgccccccgaatctagttctctcgatcgaccctgtgacgatggctaataaccaagcaagccttcttctgcagaaacagcttaaagatctgtgtaagaaacctgttgatggtttctctgctggcctcgttgatgagaagaacgttttccaatggagcgtctctattatgggtcctcctgatactttgtatgaaggtggcttttttaatgcaattatgtcgtttccggagaattatccagtttcaccaccaactgtgacgtttacctcggagatgtggcatcctaatgtttattctgatggaaaagtttgcatttctattcttcatcctcctggtgatgatcctcatggatacgagcttgcctctgaacgttggacccctgtccatacggtagaaagcattgtgttgagtatcatatcgatgctctcaggtcccaacgatgagtcaccagcgaatgtggaagctgcaaaggaatggagagacaacagagcagagtttaggaagaaagtgagtcgctgtgtgagaagatcgcaagagatgctatgaacatctctccagcgtttttttcgtgttgtagaaatatcgattctaatcttatgagaaagcctaagcagaaccaaccatcttcaagcagcagccagatgaatctgactttgcaaaagcttctctttctttttcctttttgggttttgttctctaaggtttggtttggaatattggtgtggaatcaaatccgctccatattttaggattatattattgcactcgttaatggattcgtttgatctggctttttaactttattctggttttgggtt

SEQ ID NO: 35878 - protein, 167 aa, Arabidopsis thaliana
  peptide (1)..(167): Ceres Seq. ID no. 13492249
  misc_feature (21)..(167): Homolog of NCBI NO: 136647 NR Description: Ubiquitin-conjugating enzyme E2 7
  misc_feature (34)..(166): Homolog of NCBI NO: 18424219 NR Description: ubiquitin-conjugating enzyme 7 (UBC7)
  misc_feature (5)..(166): Homolog of NCBI NO: 7437988 NR Description: ubiquitin-conjugating enzyme - maize
  misc_feature (4)..(167): Homolog of NCBI NO: 7437989 NR Description: ubiquitin-conjugating enzyme E2 - maize
  misc_feature (4)..(167): Homolog of NCBI NO: 34908132 NR Description: putative Ubiquitin carrier protein UBC7
  misc_feature (3)..(166): Homolog of NCBI NO: 18408206 NR Description: ubiquitin-conjugating enzyme 13 (UBC13)
  misc_feature (4)..(166): Homolog of NCBI NO: 31088843 NR Description: Ubiquitin-conjugating enzyme E2 7
  misc_feature (1)..(166): Homolog of NCBI NO: 28973769 NR Description: putative E2, ubiquitin-conjugating enzyme UBC7
  misc_feature (1)..(166): Homolog of NCBI NO: 19347846 NR Description: putative E2, ubiquitin-conjugating enzyme UBC7
  misc_feature (1)..(167): Homolog of NCBI NO: 18410268 NR Description: ubiquitin-conjugating enzyme 14 (UBC14)
  misc_feature (21)..(167): Homolog of NCBI NO: 136647 NR Description: Ubiquitin-conjugating enzyme E2 7
  misc_feature (34)..(166): Homolog of NCBI NO: 18424219 NR Description: ubiquitin-conjugating enzyme 7 (UBC7)
  misc_feature (5)..(166): Homolog of NCBI NO: 7437988 NR Description: ubiquitin-conjugating enzyme - maize
  misc_feature (4)..(167): Homolog of NCBI NO: 7437989 NR Description: ubiquitin-conjugating enzyme E2 - maize
  misc_feature (4)..(167): Homolog of NCBI NO: 34908132 NR Description: putative Ubiquitin carrier protein UBC7
  misc_feature (3)..(166): Homolog of NCBI NO: 18408206 NR Description: ubiquitin-conjugating enzyme 13 (UBC13)
  misc_feature (4)..(166): Homolog of NCBI NO: 31088843 NR Description: Ubiquitin-conjugating enzyme E2 7
  misc_feature (1)..(166): Homolog of NCBI NO: 28973769 NR Description: putative E2, ubiquitin-conjugating enzyme UBC7
  misc_feature (1)..(166): Homolog of NCBI NO: 19347846 NR Description: putative E2, ubiquitin-conjugating enzyme UBC7
  misc_feature (1)..(167): Homolog of NCBI NO: 18410268 NR Description: ubiquitin-conjugating enzyme 14 (UBC14)
MANNQASLLLQKQLKDLCKKPVDGFSAGLVDEKNVFQWSVSIMGPPDTLYEGGFFNAIMSFPENYPVSPPTVTFTSEMWHPNVYSDGKVCISILHPPGDDPHGYELASERWTPVHTVESIVLSIISMLSGPNDESPANVEAAKEWRDNRAEFRKKVSRCVRRSQEML

SEQ ID NO: 35879 - protein, 125 aa, Arabidopsis thaliana
  peptide (1)..(125): Ceres Seq. ID no. 13492250
  misc_feature (1)..(125): Homolog of NCBI NO: 136647 NR Description: Ubiquitin-conjugating enzyme E2 7
  misc_feature (1)..(124): Homolog of NCBI NO: 18424219 NR Description: ubiquitin-conjugating enzyme 7 (UBC7)
  misc_feature (1)..(124): Homolog of NCBI NO: 7437988 NR Description: ubiquitin-conjugating enzyme - maize
  misc_feature (1)..(125): Homolog of NCBI NO: 7437989 NR Description: ubiquitin-conjugating enzyme E2 - maize
  misc_feature (1)..(125): Homolog of NCBI NO: 34908132 NR Description: putative Ubiquitin carrier protein UBC7
  misc_feature (1)..(124): Homolog of NCBI NO: 18408206 NR Description: ubiquitin-conjugating enzyme 13 (UBC13)
  misc_feature (1)..(124): Homolog of NCBI NO: 31088843 NR Description: Ubiquitin-conjugating enzyme E2 7
  misc_feature (1)..(124): Homolog of NCBI NO: 28973769 NR Description: putative E2, ubiquitin-conjugating enzyme UBC7
  misc_feature (1)..(124): Homolog of NCBI NO: 19347846 NR Description: putative E2, ubiquitin-conjugating enzyme UBC7
  misc_feature (1)..(125): Homolog of NCBI NO: 18410268 NR Description: ubiquitin-conjugating enzyme 14 (UBC14)
  misc_feature (1)..(125): Homolog of NCBI NO: 136647 NR Description: Ubiquitin-conjugating enzyme E2 7
  misc_feature (1)..(124): Homolog of NCBI NO: 18424219 NR Description: ubiquitin-conjugating enzyme 7 (UBC7)
  misc_feature (1)..(124): Homolog of NCBI NO: 7437988 NR Description: ubiquitin-conjugating enzyme - maize
  misc_feature (1)..(125): Homolog of NCBI NO: 7437989 NR Description: ubiquitin-conjugating enzyme E2 - maize
  misc_feature (1)..(125): Homolog of NCBI NO: 34908132 NR Description: putative Ubiquitin carrier protein UBC7
  misc_feature (1)..(124): Homolog of NCBI NO: 18408206 NR Description: ubiquitin-conjugating enzyme 13 (UBC13)
  misc_feature (1)..(124): Homolog of NCBI NO: 31088843 NR Description: Ubiquitin-conjugating enzyme E2 7
  misc_feature (1)..(124): Homolog of NCBI NO: 28973769 NR Description: putative E2, ubiquitin-conjugating enzyme UBC7
  misc_feature (1)..(124): Homolog of NCBI NO: 19347846 NR Description: putative E2, ubiquitin-conjugating enzyme UBC7
  misc_feature (1)..(125): Homolog of NCBI NO: 18410268 NR Description: ubiquitin-conjugating enzyme 14 (UBC14)
MGPPDTLYEGGFFNAIMSFPENYPVSPPTVTFTSEMWHPNVYSDGKVCISILHPPGDDPHGYELASERWTPVHTVESIVLSIISMLSGPNDESPANVEAAKEWRDNRAEFRKKVSRCVRRSQEML

SEQ ID NO: 35880 - protein, 109 aa, Arabidopsis thaliana
  peptide (1)..(109): Ceres Seq. ID no. 13492251
  misc_feature (1)..(109): Homolog of NCBI NO: 136647 NR Description: Ubiquitin-conjugating enzyme E2 7
  misc_feature (1)..(108): Homolog of NCBI NO: 18424219 NR Description: ubiquitin-conjugating enzyme 7 (UBC7)
  misc_feature (1)..(108): Homolog of NCBI NO: 7437988 NR Description: ubiquitin-conjugating enzyme - maize
  misc_feature (1)..(109): Homolog of NCBI NO: 7437989 NR Description: ubiquitin-conjugating enzyme E2 - maize
  misc_feature (1)..(109): Homolog of NCBI NO: 34908132 NR Description: putative Ubiquitin carrier protein UBC7
  misc_feature (1)..(108): Homolog of NCBI NO: 18408206 NR Description: ubiquitin-conjugating enzyme 13 (UBC13)
  misc_feature (1)..(108): Homolog of NCBI NO: 31088843 NR Description: Ubiquitin-conjugating enzyme E2 7
  misc_feature (1)..(108): Homolog of NCBI NO: 28973769 NR Description: putative E2, ubiquitin-conjugating enzyme UBC7
  misc_feature (1)..(108): Homolog of NCBI NO: 19347846 NR Description: putative E2, ubiquitin-conjugating enzyme UBC7
  misc_feature (1)..(109): Homolog of NCBI NO: 18410268 NR Description: ubiquitin-conjugating enzyme 14 (UBC14)
  misc_feature (1)..(109): Homolog of NCBI NO: 136647 NR Description: Ubiquitin-conjugating enzyme E2 7
  misc_feature (1)..(108): Homolog of NCBI NO: 18424219 NR Description: ubiquitin-conjugating enzyme 7 (UBC7)
  misc_feature (1)..(108): Homolog of NCBI NO: 7437988 NR Description: ubiquitin-conjugating enzyme - maize
  misc_feature (1)..(109): Homolog of NCBI NO: 7437989 NR Description: ubiquitin-conjugating enzyme E2 - maize
  misc_feature (1)..(109): Homolog of NCBI NO: 34908132 NR Description: putative Ubiquitin carrier protein UBC7
  misc_feature (1)..(108): Homolog of NCBI NO: 18408206 NR Description: ubiquitin-conjugating enzyme 13 (UBC13)
  misc_feature (1)..(108): Homolog of NCBI NO: 31088843 NR Description: Ubiquitin-conjugating enzyme E2 7
  misc_feature (1)..(108): Homolog of NCBI NO: 28973769 NR Description: putative E2, ubiquitin-conjugating enzyme UBC7
  misc_feature (1)..(108): Homolog of NCBI NO: 19347846 NR Description: putative E2, ubiquitin-conjugating enzyme UBC7
  misc_feature (1)..(109): Homolog of NCBI NO: 18410268 NR Description: ubiquitin-conjugating enzyme 14 (UBC14)
MSFPENYPVSPPTVTFTSEMWHPNVYSDGKVCISILHPPGDDPHGYELASERWTPVHTVESIVLSIISMLSGPNDESPANVEAAKEWRDNRAEFRKKVSRCVRRSQEML

SEQ ID NO: 35881 - DNA, 1348 bp, Arabidopsis thaliana
  misc_feature (1)..(1348): Ceres Seq. ID no. 12579524
  misc_feature: MA Experiment ID: 20000166 Result: Up-regulated in Transcription
  misc_feature: MA Experiment 20000166 PARAMETER Experiment Name: At_100uM_ABA_P Parameter: Age (day) Value: 14
  misc_feature: MA Experiment 20000166 PARAMETER Experiment Name: At_100uM_ABA_P Parameter: Organism Value: A. thaliana
  misc_feature: MA Experiment 20000166 PARAMETER Experiment Name: At_100uM_ABA_P Parameter: Plant Line Value: WS
  misc_feature: MA Experiment 20000166 PARAMETER Experiment Name: At_100uM_ABA_P Parameter: Timepoint (hr) Value: 1
  misc_feature: MA Experiment 20000166 PARAMETER Experiment Name: At_100uM_ABA_P Parameter: Tissue Value: Aerial
  misc_feature: MA Experiment 20000166 PARAMETER Experiment Name: At_100uM_ABA_P Parameter: Treatment Value: 100uM ABA vs. No Treatment
  misc_feature: MA Experiment ID: 20000173 Result: Up-regulated in Transcription
  misc_feature: MA Experiment 20000173 PARAMETER Experiment Name: At_42deg_Heat_P Parameter: Age (day) Value: 14
  misc_feature: MA Experiment 20000173 PARAMETER Experiment Name: At_42deg_Heat_P Parameter: Organism Value: A. thaliana
  misc_feature: MA Experiment 20000173 PARAMETER Experiment Name: At_42deg_Heat_P Parameter: Plant Line Value: WS
  misc_feature: MA Experiment 20000173 PARAMETER Experiment Name: At_42deg_Heat_P Parameter: Temperature (deg C) Value: 42 vs. 22
  misc_feature: MA Experiment 20000173 PARAMETER Experiment Name: At_42deg_Heat_P Parameter: Timepoint (hr) Value: 6
  misc_feature: MA Experiment 20000173 PARAMETER Experiment Name: At_42deg_Heat_P Parameter: Tissue Value: Aerial
  misc_feature: MA Experiment ID: 20000182 Result: Up-regulated in Transcription
  misc_feature: MA Experiment 20000182 PARAMETER Experiment Name: At_2mM_SA_P Parameter: Age (day) Value: 14
  misc_feature: MA Experiment 20000182 PARAMETER Experiment Name: At_2mM_SA_P Parameter: Organism Value: A. thaliana
  misc_feature: MA Experiment 20000182 PARAMETER Experiment Name: At_2mM_SA_P Parameter: Plant Line Value: WS
  misc_feature: MA Experiment 20000182 PARAMETER Experiment Name: At_2mM_SA_P Parameter: Timepoint (hr) Value: 6
  misc_feature: MA Experiment 20000182 PARAMETER Experiment Name: At_2mM_SA_P Parameter: Tissue Value: Aerial
  misc_feature: MA Experiment 20000182 PARAMETER Experiment Name: At_2mM_SA_P Parameter: Treatment Value: 2mM SA vs. No Treatment
  misc_feature: MA Experiment ID: 20000436 Result: Up-regulated in Transcription
  misc_feature: MA Experiment 20000436 PARAMETER Experiment Name: At_Drought_P Parameter: Age (day) Value: 7
  misc_feature: MA Experiment 20000436 PARAMETER Experiment Name: At_Drought_P Parameter: Organism Value: A. thaliana
  misc_feature: MA Experiment 20000436 PARAMETER Experiment Name: At_Drought_P Parameter: Plant Line Value: WS
  misc_feature: MA Experiment 20000436 PARAMETER Experiment Name: At_Drought_P Parameter: Timepoint (hr) Value: 12
  misc_feature: MA Experiment 20000436 PARAMETER Experiment Name: At_Drought_P Parameter: Tissue Value: Whole Plant
  misc_feature: MA Experiment 20000436 PARAMETER Experiment Name: At_Drought_P Parameter: Treatment Value: Drought vs. No Drought
  misc_feature: MA Experiment ID: 20000437 Result: Up-regulated in Transcription
  misc_feature: MA Experiment 20000437 PARAMETER Experiment Name: At_Drought_P Parameter: Age (day) Value: 8
  misc_feature: MA Experiment 20000437 PARAMETER Experiment Name: At_Drought_P Parameter: Organism Value: A. thaliana
  misc_feature: MA Experiment 20000437 PARAMETER Experiment Name: At_Drought_P Parameter: Plant Line Value: WS
  misc_feature: MA Experiment 20000437 PARAMETER Experiment Name: At_Drought_P Parameter: Timepoint (hr) Value: 24
  misc_feature: MA Experiment 20000437 PARAMETER Experiment Name: At_Drought_P Parameter: Tissue Value: Whole Plant
  misc_feature: MA Experiment 20000437 PARAMETER Experiment Name: At_Drought_P Parameter: Treatment Value: Drought vs. No Drought
  misc_feature: MA Experiment ID: 20001905 Result: Up-regulated in Transcription
  misc_feature: MA Experiment 20001905 PARAMETER Experiment Name: At_Drought_Reproduction_P Parameter: Age (day) Value: 40
  misc_feature: MA Experiment 20001905 PARAMETER Experiment Name: At_Drought_Reproduction_P Parameter: Organism Value: A. thaliana
  misc_feature: MA Experiment 20001905 PARAMETER Experiment Name: At_Drought_Reproduction_P Parameter: Plant Line Value: WS
  misc_feature: MA Experiment 20001905 PARAMETER Experiment Name: At_Drought_Reproduction_P Parameter: Timepoint (day) Value: 10
  misc_feature: MA Experiment 20001905 PARAMETER Experiment Name: At_Drought_Reproduction_P Parameter: Tissue Value: Rosettes
  misc_feature: MA Experiment 20001905 PARAMETER Experiment Name: At_Drought_Reproduction_P Parameter: Treatment Value: Drought vs. No Drought
  misc_feature: MA Experiment ID: 20001911 Result: Up-regulated in Transcription
  misc_feature: MA Experiment 20001911 PARAMETER Experiment Name: At_Drought_Reproduction_P Parameter: Age (day) Value: 40
  misc_feature: MA Experiment 20001911 PARAMETER Experiment Name: At_Drought_Reproduction_P Parameter: Organism Value: A. thaliana
  misc_feature: MA Experiment 20001911 PARAMETER Experiment Name: At_Drought_Reproduction_P Parameter: Plant Line Value: WS
  misc_feature: MA Experiment 20001911 PARAMETER Experiment Name: At_Drought_Reproduction_P Parameter: Timepoint (day) Value: 10
  misc_feature: MA Experiment 20001911 PARAMETER Experiment Name: At_Drought_Reproduction_P Parameter: Tissue Value: Flowers
  misc_feature: MA Experiment 20001911 PARAMETER Experiment Name: At_Drought_Reproduction_P Parameter: Treatment Value: Drought vs. No Drought
acggagattgtaacaaggaaaccgccgtcgccggatctgatagtgcatatccatgaagtagaagacgaagaaacttactttctgatcttagaacggagtatatgtacagaagattcgcgtccctcaatttttgatctcaagggtcgggtttacctttttttccttcttatttttggtggctttgcgttttctcattcgacgatttctggatttggggatttcaaaaccatgaggaagaagctcgatactcggttcccagctgctcgtattaaaaagattatgcaagctgatgaggatgttggcaagatagctttggcagtgcctgtcttagtctcaaaatctttggagttgttcttgcaagacctttgtgatcgtacatatgaaattacccttgaaagaggtgccaagactgtgagctcattgcacctaaaacattgtgtggaaagatataacgtgtttgattttctgagggaagttgtgagtaaggtgcctgactatggccattcccaagggcaatttcatatgtacgatcacaaaggtcttggaagaacaagaagatgtctggtggtgtacttggtggtgctacagctgcttgggttgtgtttgaattgatggagtaccatcttctcactctgctttgccacgtgatgattgttgttctcgctgtgctgtttttgtggtctaatgccactatgttcattaacaagtccccaccaaagattcctgaagttcatatccctgaagaacctattcttcagcttgcgtctgggctcagaatcgagatcaaccgtggattctcttctctccgtgaaattgcatcaggaagggatctcaagaaattcctcattgctattgccgggttatgggttctctcaatcttgggcggttgcttcgacttcttgacattggcatacatagctcttgtgttgctcttcacggttcctcttgcctacgacaagtatgaagacaaagtcgacccattaggtgagaaagcaatgatcgagctcaagaagcagtatgcagtgttggatgagaaggtgttgagcaagatcccacttgggccgttgaagaacaagaagaaagattaggggtttacacaaggttgtccgtggctagcaaaacgggtgttgtgaaatggtatcgaagtaatgtgttttgggcgtttttttaggtggctctttcggttatgtgaatgaacttggaattttcctgactggtttgttctgttgtttatgtcattgttgatcagcgtcgagggataaaagtagtgatatttcttctctctctaagcctctatataactaagaatttcaagatatttgaattttgcaatctcgtggttaatgtt

SEQ ID NO: 35882 - protein, 203 aa, Arabidopsis thaliana
  peptide (1)..(203): Ceres Seq. ID no. 12579525
  misc_feature (83)..(147): Pfam Name: Histone-like transcription factor (CBF/NF-Y) and Pfam Description: Histone-like transcription factor (CBF/NF-Y)
  misc_feature (78)..(165): Homolog of NCBI NO: 24657218 NR Description: CG10318-PA [Drosophila melanogaster]
  misc_feature (78)..(165): Homolog of NCBI NO: 10242351 NR Description: NC2alpha [Drosophila melanogaster]
  misc_feature (78)..(165): Homolog of NCBI NO: 28279647 NR Description: Similar to Dr1 associated protein 1 (negative
  misc_feature (78)..(186): Homolog of NCBI NO: 27661225 NR Description: similar to RIKEN cDNA 2310074H19
  misc_feature (78)..(186): Homolog of NCBI NO: 21313424 NR Description: RIKEN cDNA 2310074H19 [Mus musculus]
  misc_feature (78)..(186): Homolog of NCBI NO: 18426973 NR Description: DR1-associated protein 1
  misc_feature (77)..(188): Homolog of NCBI NO: 18481624 NR Description: repressor protein [Oryza sativa]
  misc_feature (77)..(186): Homolog of NCBI NO: 18481626 NR Description: repressor protein [Zea mays]
  misc_feature (88)..(186): Homolog of NCBI NO: 12321975 NR Description: unknown protein; 69004-67516 [Arabidopsis
  misc_feature (77)..(186): Homolog of NCBI NO: 30682195 NR Description: transcription factor Hap5a, putative [Arabidopsis
TEIVTRKPPSPDLIVHIHEVEDEETYFLILERSICTEDSRPSIFDLKGRVYLFFLLIFGGFAFSHSTISGFGDFKTMRKKLDTRFPAARIKKIMQADEDVGKIALAVPVLVSKSLELFLQDLCDRTYEITLERGAKTVSSLHLKHCVERYNVFDFLREVVSKVPDYGHSQGQFHMYDHKGLGRTRRCLVVYLVVLQLLGLCLN

SEQ ID NO: 35883 - protein, 176 aa, Arabidopsis thaliana
  peptide (1)..(176): Ceres Seq. ID no. 12579526
  misc_feature (1)..(176): Homolog of NCBI NO: 18398810 NR Description: expressed protein
  misc_feature (1)..(176): Homolog of NCBI NO: 34897094 NR Description: unknown protein [Oryza sativa (japonica
  misc_feature (1)..(166): Homolog of NCBI NO: 15234108 NR Description: hypothetical protein; protein id: At4g01230.1
  misc_feature (1)..(175): Homolog of NCBI NO: 18406991 NR Description: expressed protein
  misc_feature (1)..(176): Homolog of NCBI NO: 15222616 NR Description: hypothetical protein
  misc_feature (1)..(174): Homolog of NCBI NO: 34904202 NR Description: P0492F05.25 [Oryza sativa (japonica
  misc_feature (1)..(174): Homolog of NCBI NO: 34909318 NR Description: OSJNBb0021A09.5 [Oryza sativa (japonica
  misc_feature (1)..(176): Homolog of NCBI NO: 15238125 NR Description: putative protein
  misc_feature (1)..(176): Homolog of NCBI NO: 15237093 NR Description: putative protein
  misc_feature (1)..(176): Homolog of NCBI NO: 15236556 NR Description: putative protein
MSGGVLGGATAAWVVFELMEYHLLTLLCHVMIVVLAVLFLWSNATMFINKSPPKIPEVHIPEEPILQLASGLRIEINRGFSSLREIASGRDLKKFLIAIAGLWVLSILGGCFDFLTLAYIALVLLFTVPLAYDKYEDKVDPLGEKAMIELKKQYAVLDEKVLSKIPLGPLKNKKKD

SEQ ID NO: 35884 - protein, 158 aa, Arabidopsis thaliana
  peptide (1)..(158): Ceres Seq. ID no. 12579527
  misc_feature (1)..(158): Homolog of NCBI NO: 18398810 NR Description: expressed protein
  misc_feature (1)..(158): Homolog of NCBI NO: 34897094 NR Description: unknown protein [Oryza sativa (japonica
  misc_feature (1)..(148): Homolog of NCBI NO: 15234108 NR Description: hypothetical protein; protein id: At4g01230.1
  misc_feature (1)..(157): Homolog of NCBI NO: 18406991 NR Description: expressed protein
  misc_feature (1)..(158): Homolog of NCBI NO: 15222616 NR Description: hypothetical protein
  misc_feature (1)..(156): Homolog of NCBI NO: 34904202 NR Description: P0492F05.25 [Oryza sativa (japonica
  misc_feature (1)..(156): Homolog of NCBI NO: 34909318 NR Description: OSJNBb0021A09.5 [Oryza sativa (japonica
  misc_feature (1)..(158): Homolog of NCBI NO: 15238125 NR Description: putative protein
  misc_feature (1)..(158): Homolog of NCBI NO: 15237093 NR Description: putative protein
  misc_feature (1)..(158): Homolog of NCBI NO: 15236556 NR Description: putative protein
MEYHLLTLLCHVMIVVLAVLFLWSNATMFINKSPPKIPEVHIPEEPILQLASGLRIEINRGFSSLREIASGRDLKKFLIAIAGLWVLSILGGCFDFLTLAYIALVLLFTVPLAYDKYEDKVDPLGEKAMIELKKQYAVLDEKVLSKIPLGPLKNKKKD

SEQ ID NO: 35885 - DNA, 939 bp, Arabidopsis thaliana
  misc_feature (1)..(939): Ceres Seq. ID no. 12393372
  misc_feature: MA Experiment ID: 108473 Result: Down-regulated in Transcription
  misc_feature: MA Experiment 108473 PARAMETER Experiment Name: At_Drought_Flowers_cDNA_P Parameter: Timepoint (hr) Value: 7 d
  misc_feature: MA Experiment 108473 PARAMETER Experiment Name: At_Drought_Flowers_cDNA_P Parameter: Tissue Value: Flower
  misc_feature: MA Experiment 108473 PARAMETER Experiment Name: At_Drought_Flowers_cDNA_P Parameter: Treatment Value: Drought vs. No Drought
  misc_feature: MA Experiment ID: 108474 Result: Down-regulated in Transcription
  misc_feature: MA Experiment 108474 PARAMETER Experiment Name: At_Drought_Flowers_cDNA_P Parameter: Timepoint (hr) Value: null
  misc_feature: MA Experiment 108474 PARAMETER Experiment Name: At_Drought_Flowers_cDNA_P Parameter: Treatment Value: Drought vs. No Drought
  misc_feature: MA Experiment ID: 108501 Result: Down-regulated in Transcription
  misc_feature: MA Experiment 108501 PARAMETER Experiment Name: At_ap2_floral_buds_cDNA_P Parameter: Plant Line Value: ap2 (Ler.)
  misc_feature: MA Experiment 108501 PARAMETER Experiment Name: At_ap2_floral_buds_cDNA_P Parameter: Tissue Value: Closed Flower
  misc_feature: MA Experiment ID: 20000087 Result: Up-regulated in Transcription
  misc_feature: MA Experiment 20000087 PARAMETER Experiment Name: At_100uM_ABA_Mutants_cDNA_P Parameter: Plant Line Value: WS
  misc_feature: MA Experiment 20000087 PARAMETER Experiment Name: At_100uM_ABA_Mutants_cDNA_P Parameter: Timepoint (hr) Value: 6
  misc_feature: MA Experiment 20000087 PARAMETER Experiment Name: At_100uM_ABA_Mutants_cDNA_P Parameter: Tissue Value: Aerial
  misc_feature: MA Experiment 20000087 PARAMETER Experiment Name: At_100uM_ABA_Mutants_cDNA_P Parameter: Treatment Value: 100uM ABA vs. No Treatment
  misc_feature: MA Experiment ID: 20000314 Result: Down-regulated in Transcription
  misc_feature: MA Experiment 20000314 PARAMETER Experiment Name: At_14day_Shoots-Roots_Sub_P Parameter: Age (day) Value: 14
  misc_feature: MA Experiment 20000314 PARAMETER Experiment Name: At_14day_Shoots-Roots_Sub_P Parameter: Organism Value: A. thaliana
  misc_feature: MA Experiment 20000314 PARAMETER Experiment Name: At_14day_Shoots-Roots_Sub_P Parameter: Plant Line Value: WS
  misc_feature: MA Experiment 20000314 PARAMETER Experiment Name: At_14day_Shoots-Roots_Sub_P Parameter: Tissue Value: Roots vs. Whole Plant
  misc_feature: MA Experiment ID: 20000315 Result: Down-regulated in Transcription
  misc_feature: MA Experiment 20000315 PARAMETER Experiment Name: At_14day_Shoots-Roots_Sub_P Parameter: Age (day) Value: 14
  misc_feature: MA Experiment 20000315 PARAMETER Experiment Name: At_14day_Shoots-Roots_Sub_P Parameter: Organism Value: A. thaliana
  misc_feature: MA Experiment 20000315 PARAMETER Experiment Name: At_14day_Shoots-Roots_Sub_P Parameter: Plant Line Value: WS
  misc_feature: MA Experiment 20000315 PARAMETER Experiment Name: At_14day_Shoots-Roots_Sub_P Parameter: Tissue Value: Shoots vs. Whole Plant
  misc_feature: MA Experiment ID: 20000355 Result: Down-regulated in Transcription
  misc_feature: MA Experiment 20000355 PARAMETER Experiment Name: At_Siliques_Sub_P Parameter: Age (day) Value: 21
  misc_feature: MA Experiment 20000355 PARAMETER Experiment Name: At_Siliques_Sub_P Parameter: Organism Value: A. thaliana
  misc_feature: MA Experiment 20000355 PARAMETER Experiment Name: At_Siliques_Sub_P Parameter: Plant Line Value: WS
  misc_feature: MA Experiment 20000355 PARAMETER Experiment Name: At_Siliques_Sub_P Parameter: Tissue Value: Less Than 5mm Siliques vs. Whole Plant
  misc_feature: MA Experiment ID: 20000440 Result: Up-regulated in Transcription
  misc_feature: MA Experiment 20000440 PARAMETER Experiment Name: At_Closed-Flower__Sub_P Parameter: Tissue Value: Closed Flower vs. Whole Plant
ataaaaaataagtaaccaagaaaataagtaacggcttcttcgatcatttatatgtttatcctaaacttataagaaagcttaataatttcagtgttctcactcatttccaatctgtgatatatttctcatgtctcatcagacagtagcgctagcctctaaggctaagtctcctaaacccaaaagaggaaagttagataaggataaaatgactgcattggagaaacatgtttccttcttcgacaggaacaaagacggcaccgtttatccatgggaaacctaccaaggatttagagcgctcgggacagggcgtcttttggcggcttttgttgctatattcatcaacatgggactcagcaagaaaactcgtccgggaaagggattctcgccgttgtttccaatagacgtgaagaatagtcacctttgcatgcacggtagtgacaccgacgtctatgacgatgacggaagatttgtggaatcaaaattcgaggagatattcaacaagcatgctcgcacacataaagatgctctcactgcagaggaaattcaaaaaatgcttaagactaacagggatcctttcgatatcacaggatggctttcagattatggagaatggaaaatattacatacgttagctcaagacaaaaatggtttgttatcggaaaagagcgtcagggccatctacgatggtagccttttccaccaactggagaaaaaaagatcatcttcttcctctcgtggcaagaaacaaaaactaccttaaatgtttacgtgaatcttcttatattgttatgtggagatcacataactttcgtggtttataattatataattttgtcaaataacttttgtaatgaataattacatagatcaaacactctttaaataattattgtgtatattgaaaaaaaaaaacttatcaaagtatacttcatttaagtc

SEQ ID NO: 35886 - protein, 210 aa, Arabidopsis thaliana
  peptide (1)..(210): Ceres Seq. ID no. 12393373
  misc_feature (27)..(195): Pfam Name: Caleosin related protein Pfam Description: Caleosin related protein
  misc_feature (27)..(197): Homolog of NCBI NO: 34538473 NR Description: caleosin 1 [Hordeum vulgare]
  misc_feature (20)..(203): Homolog of NCBI NO: 37652831 NR Description: calcium binding protein [Fagus sylvatica]
  misc_feature (7)..(200): Homolog of NCBI NO: 34902470 NR Description: Putative abscisic acid-induced protein - rice
  misc_feature (52)..(210): Homolog of NCBI NO: 15220688 NR Description: Ca2+-binding EF-hand common family protein,
  misc_feature (21)..(201): Homolog of NCBI NO: 21617961 NR Description: unknown [Arabidopsis thaliana]
  misc_feature (21)..(201): Homolog of NCBI NO: 18409651 NR Description: Ca2+-binding EF-hand common family protein,
  misc_feature (30)..(203): Homolog of NCBI NO: 21593851 NR Description: unknown [Arabidopsis thaliana]
  misc_feature (30)..(203): Homolog of NCBI NO: 18409649 NR Description: Ca2+-binding EF-hand common family protein,
  misc_feature (20)..(210): Homolog of NCBI NO: 9295714 NR Description: F26F24.9 [Arabidopsis thaliana]
  misc_feature (27)..(210): Homolog of NCBI NO: 15220687 NR Description: pollen coat EF-hand protein
MSHQTVALASKAKSPKPKRGKLDKDKMTALEKHVSFFDRNKDGTVYPWETYQGFRALGTGRLLAAFVAIFINMGLSKKTRPGKGFSPLFPIDVKNSHLCMHGSDTDVYDDDGRFVESKFEEIFNKHARTHKDALTAEEIQKMLKTNRDPFDITGWLSDYGEWKILHTLAQDKNGLLSEKSVRAIYDGSLFHQLEKKRSSSSSRGKKQKLP

SEQ ID NO: 35887 - protein, 184 aa, Arabidopsis thaliana; identical to SEQ ID NO: 30098
  peptide (1)..(184): Ceres Seq. ID no. 12393374
  misc_feature (1)..(169): Pfam Name: Caleosin related protein Pfam Description: Caleosin related protein
  misc_feature (1)..(171): Homolog of NCBI NO: 34538473 NR Description: caleosin 1 [Hordeum vulgare]
  misc_feature (1)..(177): Homolog of NCBI NO: 37652831 NR Description: calcium binding protein [Fagus sylvatica]
  misc_feature (1)..(174): Homolog of NCBI NO: 34902470 NR Description: Putative abscisic acid-induced protein - rice
  misc_feature (26)..(184): Homolog of NCBI NO: 15220688 NR Description: Ca2+-binding EF-hand common family protein,
  misc_feature (1)..(175): Homolog of NCBI NO: 21617961 NR Description: unknown [Arabidopsis thaliana]
  misc_feature (1)..(175): Homolog of NCBI NO: 18409651 NR Description: Ca2+-binding EF-hand common family protein,
  misc_feature (4)..(177): Homolog of NCBI NO: 21593851 NR Description: unknown [Arabidopsis thaliana]
  misc_feature (4)..(177): Homolog of NCBI NO: 18409649 NR Description: Ca2+-binding EF-hand common family protein,
  misc_feature (1)..(184): Homolog of NCBI NO: 9295714 NR Description: F26F24.9 [Arabidopsis thaliana]
  misc_feature (1)..(184): Homolog of NCBI NO: 15220687 NR Description: pollen coat EF-hand protein

SEQ ID NO: 35888 - protein, 138 aa, Arabidopsis thaliana; identical to SEQ ID NO: 30099
  peptide (1)..(138): Ceres Seq. ID no. 12393375
  misc_feature (1)..(123): Pfam Name: Caleosin related protein Pfam Description: Caleosin related protein
  misc_feature (1)..(125): Homolog of NCBI NO: 34538473 NR Description: caleosin 1 [Hordeum vulgare]
  misc_feature (1)..(131): Homolog of NCBI NO: 37652831 NR Description: calcium binding protein [Fagus sylvatica]
  misc_feature (1)..(128): Homolog of NCBI NO: 34902470 NR Description: Putative abscisic acid-induced protein - rice
  misc_feature (1)..(138): Homolog of NCBI NO: 15220688 NR Description: Ca2+-binding EF-hand common family protein,
  misc_feature (1)..(129): Homolog of NCBI NO: 21617961 NR Description: unknown [Arabidopsis thaliana]
  misc_feature (1)..(129): Homolog of NCBI NO: 18409651 NR Description: Ca2+-binding EF-hand common family protein,
  misc_feature (1)..(131): Homolog of NCBI NO: 21593851 NR Description: unknown [Arabidopsis thaliana]
  misc_feature (1)..(131): Homolog of NCBI NO: 18409649 NR Description: Ca2+-binding EF-hand common family protein,
  misc_feature (1)..(138): Homolog of NCBI NO: 9295714 NR Description: F26F24.9 [Arabidopsis thaliana]
  misc_feature (1)..(138): Homolog of NCBI NO: 15220687 NR Description: pollen coat EF-hand protein

SEQ ID NO: 35889 - DNA, 562 bp, Arabidopsis thaliana
  misc_feature (1)..(562): Ceres Seq. ID no. 12420983
  misc_feature: MA Experiment ID: 108434 Result: Up-regulated in Transcription
  misc_feature: MA Experiment 108434 PARAMETER Experiment Name: At_Root_Tips_cDNA_P Parameter: Tissue Value: Root Tips
  misc_feature: MA Experiment ID: 108435 Result: Up-regulated in Transcription
  misc_feature: MA Experiment 108435 PARAMETER Experiment Name: At_stm_Mutants_cDNA_P Parameter: Plant Line Value: wt Landsburg vs stm
  misc_feature: MA Experiment 108435 PARAMETER Experiment Name: At_stm_Mutants_cDNA_P Parameter: Tissue Value: Shoot Apical Meristem Region
  misc_feature: MA Experiment ID: 108462 Result: Down-regulated in Transcription
  misc_feature: MA Experiment 108462 PARAMETER Experiment Name: At_Germinating_Seeds_cDNA_P Parameter: Age (day) Value: 2 vs. 0
  misc_feature: MA Experiment 108462 PARAMETER Experiment Name: At_Germinating_Seeds_cDNA_P Parameter: Tissue Value: Germinating Seeds
  misc_feature: MA Experiment ID: 108463 Result: Down-regulated in Transcription
  misc_feature: MA Experiment 108463 PARAMETER Experiment Name: At_Germinating_Seeds_cDNA_P Parameter: Age (day) Value: 3 vs. 0
  misc_feature: MA Experiment 108463 PARAMETER Experiment Name: At_Germinating_Seeds_cDNA_P Parameter: Tissue Value: Germinating Seeds
  misc_feature: MA Experiment ID: 108464 Result: Down-regulated in Transcription
  misc_feature: MA Experiment 108464 PARAMETER Experiment Name: At_Germinating_Seeds_cDNA_P Parameter: Age (day) Value: 4 vs. 0
  misc_feature: MA Experiment 108464 PARAMETER Experiment Name: At_Germinating_Seeds_cDNA_P Parameter: Tissue Value: Germinating Seeds
  misc_feature: MA Experiment ID: 108488 Result: Up-regulated in Transcription
  misc_feature: MA Experiment ID: 108489 Result: Up-regulated in Transcription
  misc_feature: MA Experiment ID: 20000451 Result: Up-regulated in Transcription
  misc_feature: MA Experiment 20000451 PARAMETER Experiment Name: At_CS6879_Shoots-Roots_P Parameter: Age (day) Value: 14
  misc_feature: MA Experiment 20000451 PARAMETER Experiment Name: At_CS6879_Shoots-Roots_P Parameter: Organism Value: A. thaliana
  misc_feature: MA Experiment 20000451 PARAMETER Experiment Name: At_CS6879_Shoots-Roots_P Parameter: Plant Line Value: CS6879 vs. WS
  misc_feature: MA Experiment 20000451 PARAMETER Experiment Name: At_CS6879_Shoots-Roots_P Parameter: Tissue Value: Roots
  misc_feature: MA Experiment ID: 20001558 Result: Up-regulated in Transcription
  misc_feature: MA Experiment 20001558 PARAMETER Experiment Name: At_Drought_Soil_Dry_P Parameter: Age (day) Value: 27
  misc_feature: MA Experiment 20001558 PARAMETER Experiment Name: At_Drought_Soil_Dry_P Parameter: Organism Value: A. thaliana
  misc_feature: MA Experiment 20001558 PARAMETER Experiment Name: At_Drought_Soil_Dry_P Parameter: Plant Line Value: WS
  misc_feature: MA Experiment 20001558 PARAMETER Experiment Name: At_Drought_Soil_Dry_P Parameter: Post Timepoint (hr) Value: 6
  misc_feature: MA Experiment 20001558 PARAMETER Experiment Name: At_Drought_Soil_Dry_P Parameter: Post-Treatment Value: Re-Water vs. No Drought
  misc_feature: MA Experiment 20001558 PARAMETER Experiment Name: At_Drought_Soil_Dry_P Parameter: Timepoint (day) Value: 13
  misc_feature: MA Experiment 20001558 PARAMETER Experiment Name: At_Drought_Soil_Dry_P Parameter: Treatment Value: Drought vs. No Drought
  misc_feature: MA Experiment ID: 20001560 Result: Up-regulated in Transcription
  misc_feature: MA Experiment 20001560 PARAMETER Experiment Name: At_Drought_Soil_Dry_P Parameter: Age (day) Value: 28
  misc_feature: MA Experiment 20001560 PARAMETER Experiment Name: At_Drought_Soil_Dry_P Parameter: Organism Value: A. thaliana
  misc_feature: MA Experiment 20001560 PARAMETER Experiment Name: At_Drought_Soil_Dry_P Parameter: Plant Line Value: WS
  misc_feature: MA Experiment 20001560 PARAMETER Experiment Name: At_Drought_Soil_Dry_P Parameter: Post Timepoint (hr) Value: None
  misc_feature: MA Experiment 20001560 PARAMETER Experiment Name: At_Drought_Soil_Dry_P Parameter: Post-Treatment Value: None
  misc_feature: MA Experiment 20001560 PARAMETER Experiment Name: At_Drought_Soil_Dry_P Parameter: Timepoint (day) Value: 14
  misc_feature: MA Experiment 20001560 PARAMETER Experiment Name: At_Drought_Soil_Dry_P Parameter: Treatment Value: Drought vs. No Drought
  misc_feature: MA Experiment ID: 20001757 Result: Up-regulated in Transcription
  misc_feature: MA Experiment 20001757 PARAMETER Experiment Name: At_50mM_NH4NO3_L-to-H_P Parameter: Timepoint (hr) Value: 6
  misc_feature: MA Experiment 20001757 PARAMETER Experiment Name: At_50mM_NH4NO3_L-to-H_P Parameter: Tissue Value: Leaf
  misc_feature: MA Experiment 20001757 PARAMETER Experiment Name: At_50mM_NH4NO3_L-to-H_P Parameter: Treatment Value: 50mM NH4NO3 vs 100mM Mannitol
atttcattttcgttttcactttctccgaacatccaaaagcttgtagcttgctcctcaaatcttcttgaaaaatgaaggttgccgctgctttcctcctcgccgttttgggcggaaacgctaatccttcagccgagaatatcaaagatatcatcggagctgttggtgctgatgttgatggagagagcattgagcttctattgaaagaagtgagtggtaaggacattgctgagctgattgcttctggtagggagaaattagcgtctgtgccatctggtggtggtgtggctgtttcagctgctccatcaagcggtggtggtggtgctgctgctgctgcccctncggagaagaaagaagccaagaaggaagagaaagaagagtctgatgatgacatgggattcagtctcttcgagtaaggtttttgtccccacggaaaggagtcgagatttgattttttgttctcttagtggttctggtttttgctcctctttgtagttcggtgttattaaagattcttggattacgaattttactcgttagataatgaagcaagaagagttttttc

SEQ ID NO: 35890 - protein, 113 aa, Arabidopsis thaliana
  peptide (1)..(113): Ceres Seq. ID no. 12420984
  misc_feature (17)..(112): Pfam Name: 60s Acidic ribosomal protein Pfam Description: 60s Acidic ribosomal protein
  misc_feature (1)..(113): Homolog of NCBI NO: 899610 NR Description: acidic ribosomal protein P2
  misc_feature (1)..(113): Homolog of NCBI NO: 4204372 NR Description: acidic ribosomal protein P2a-2 [Zea mays]
  misc_feature (1)..(113): Homolog of NCBI NO: 1173073 NR Description: 60S ACIDIC RIBOSOMAL PROTEIN P2A (P2)
  misc_feature (1)..(113): Homolog of NCBI NO: 32400796 NR Description: acidic ribosomal protein [Triticum aestivum]
  misc_feature (1)..(113): Homolog of NCBI NO: 730583 NR Description: 60S acidic ribosomal protein P2
  misc_feature (1)..(113): Homolog of NCBI NO: 21593095 NR Description: 60S acidic ribosomal protein P2 [Arabidopsis
  misc_feature (1)..(113): Homolog of NCBI NO: 15226230 NR Description: 60S acidic ribosomal protein P2
  misc_feature (1)..(113): Homolog of NCBI NO: 24473796 NR Description: 60s acidic ribosomal protein [Prunus dulcis]
  misc_feature (1)..(113): Homolog of NCBI NO: 15226231 NR Description: 60S acidic ribosomal protein P2
  misc_feature (1)..(113): Homolog of NCBI NO: 15230454 NR Description: acidic ribosomal protein P2 -like; protein id:
  misc_feature (90)..(90): Xaa is any aa, unknown or other
MKVAAAFLLAVLGGNANPSAENIKDIIGAVGADVDGESIELLLKEVSGKDIAELIASGREKLASVPSGGGVAVSAAPSSGGGGAAAAAPXEKKEAKKEEKEESDDDMGFSLFE

SEQ ID NO: 35891 - DNA, 895 bp, Arabidopsis thaliana
  misc_feature (1)..(895): Ceres Seq. ID no. 12324013
  misc_feature: MA Experiment ID: 108434 Result: Up-regulated in Transcription
  misc_feature: MA Experiment 108434 PARAMETER Experiment Name: At_Root_Tips_cDNA_P Parameter: Tissue Value: Root Tips
  misc_feature: MA Experiment ID: 108461 Result: Down-regulated in Transcription
  misc_feature: MA Experiment 108461 PARAMETER Experiment Name: At_Germinating_Seeds_cDNA_P Parameter: Age (day) Value: 1 vs. 0
  misc_feature: MA Experiment 108461 PARAMETER Experiment Name: At_Germinating_Seeds_cDNA_P Parameter: Tissue Value: Germinating Seeds
  misc_feature: MA Experiment ID: 108462 Result: Down-regulated in Transcription
  misc_feature: MA Experiment 108462 PARAMETER Experiment Name: At_Germinating_Seeds_cDNA_P Parameter: Age (day) Value: 2 vs. 0
  misc_feature: MA Experiment 108462 PARAMETER Experiment Name: At_Germinating_Seeds_cDNA_P Parameter: Tissue Value: Germinating Seeds
  misc_feature: MA Experiment ID: 108463 Result: Down-regulated in Transcription
  misc_feature: MA Experiment 108463 PARAMETER Experiment Name: At_Germinating_Seeds_cDNA_P Parameter: Age (day) Value: 3 vs. 0
  misc_feature: MA Experiment 108463 PARAMETER Experiment Name: At_Germinating_Seeds_cDNA_P Parameter: Tissue Value: Germinating Seeds
  misc_feature: MA Experiment ID: 108464 Result: Down-regulated in Transcription
  misc_feature: MA Experiment 108464 PARAMETER Experiment Name: At_Germinating_Seeds_cDNA_P Parameter: Age (day) Value: 4 vs. 0
  misc_feature: MA Experiment 108464 PARAMETER Experiment Name: At_Germinating_Seeds_cDNA_P Parameter: Tissue Value: Germinating Seeds
  misc_feature: MA Experiment ID: 108579 Result: Up-regulated in Transcription
  misc_feature: MA Experiment 108579 PARAMETER Experiment Name: At_4deg_Cold_cDNA_P Parameter: Temperature (deg C) Value: 4 vs. 22
  misc_feature: MA Experiment 108579 PARAMETER Experiment Name: At_4deg_Cold_cDNA_P Parameter: Timepoint (hr) Value: 6
  misc_feature: MA Experiment 108579 PARAMETER Experiment Name: At_4deg_Cold_cDNA_P Parameter: Tissue Value: Aerial
  misc_feature: MA Experiment ID: 108595 Result: Down-regulated in Transcription
  misc_feature: MA Experiment 108595 PARAMETER Experiment Name: At_Ler-pi_Ovule_cDNA_P Parameter: Plant Line Value: null
  misc_feature: MA Experiment ID: 20000180 Result: Down-regulated in Transcription
  misc_feature: MA Experiment 20000180 PARAMETER Experiment Name: At_Germinating_Seeds_P Parameter: Age (hr) Value: 24 vs. 0
  misc_feature: MA Experiment 20000180 PARAMETER Experiment Name: At_Germinating_Seeds_P Parameter: Tissue Value: Germinating Seeds
  misc_feature: MA Experiment ID: 20000265 Result: Up-regulated in Transcription
  misc_feature: MA Experiment 20000265 PARAMETER Experiment Name: At_Open_Flower_P Parameter: Age (day) Value: 21
  misc_feature: MA Experiment 20000265 PARAMETER Experiment Name: At_Open_Flower_P Parameter: Plant Line Value: WS
  misc_feature: MA Experiment 20000265 PARAMETER Experiment Name: At_Open_Flower_P Parameter: Tissue Value: Closed Flower vs. Whole Plant
  misc_feature: MA Experiment ID: 20000495 Result: Down-regulated in Transcription
  misc_feature: MA Experiment 20000495 PARAMETER Experiment Name: At_Guard_Cells_P Parameter: Harvest Date Value: 8/2/2002
  misc_feature: MA Experiment 20000495 PARAMETER Experiment Name: At_Guard_Cells_P Parameter: Organism Value: A. thaliana
  misc_feature: MA Experiment 20000495 PARAMETER Experiment Name: At_Guard_Cells_P Parameter: Tissue Value: Guard Cells vs. Leaves
  misc_feature: MA Experiment ID: 20001451 Result: Down-regulated in Transcription
  misc_feature: MA Experiment 20001451 PARAMETER Experiment Name: At_Far-red-induction_P Parameter: Age (day) Value: 7
  misc_feature: MA Experiment 20001451 PARAMETER Experiment Name: At_Far-red-induction_P Parameter: Light Value: Far-red vs. White
  misc_feature: MA Experiment 20001451 PARAMETER Experiment Name: At_Far-red-induction_P Parameter: Organism Value: A. thaliana
  misc_feature: MA Experiment 20001451 PARAMETER Experiment Name: At_Far-red-induction_P Parameter: Plant Line Value: Columbia
  misc_feature: MA Experiment 20001451 PARAMETER Experiment Name: At_Far-red-induction_P Parameter: Timepoint (hr) Value: 24
  misc_feature: MA Experiment 20001451 PARAMETER Experiment Name: At_Far-red-induction_P Parameter: Tissue Value: Whole Plant
  misc_feature: MA Experiment ID: 20001557 Result: Up-regulated in Transcription
  misc_feature: MA Experiment 20001557 PARAMETER Experiment Name: At_Drought_Soil_Dry_P Parameter: Age (day) Value: 27
  misc_feature: MA Experiment 20001557 PARAMETER Experiment Name: At_Drought_Soil_Dry_P Parameter: Organism Value: A. thaliana
  misc_feature: MA Experiment 20001557 PARAMETER Experiment Name: At_Drought_Soil_Dry_P Parameter: Plant Line Value: WS
  misc_feature: MA Experiment 20001557 PARAMETER Experiment Name: At_Drought_Soil_Dry_P Parameter: Post Timepoint (hr) Value: 3
  misc_feature: MA Experiment 20001557 PARAMETER Experiment Name: At_Drought_Soil_Dry_P Parameter: Post-Treatment Value: Re-Water vs. No Drought
  misc_feature: MA Experiment 20001557 PARAMETER Experiment Name: At_Drought_Soil_Dry_P Parameter: Timepoint (day) Value: 13
  misc_feature: MA Experiment 20001557 PARAMETER Experiment Name: At_Drought_Soil_Dry_P Parameter: Treatment Value: Drought vs. No Drought
  misc_feature: MA Experiment ID: 20001558 Result: Up-regulated in Transcription
  misc_feature: MA Experiment 20001558 PARAMETER Experiment Name: At_Drought_Soil_Dry_P Parameter: Age (day) Value: 27
  misc_feature: MA Experiment 20001558 PARAMETER Experiment Name: At_Drought_Soil_Dry_P Parameter: Organism Value: A. thaliana
  misc_feature: MA Experiment 20001558 PARAMETER Experiment Name: At_Drought_Soil_Dry_P Parameter: Plant Line Value: WS
  misc_feature: MA Experiment 20001558 PARAMETER Experiment Name: At_Drought_Soil_Dry_P Parameter: Post Timepoint (hr) Value: 6
  misc_feature: MA Experiment 20001558 PARAMETER Experiment Name: At_Drought_Soil_Dry_P Parameter: Post-Treatment Value: Re-Water vs. No Drought
  misc_feature: MA Experiment 20001558 PARAMETER Experiment Name: At_Drought_Soil_Dry_P Parameter: Timepoint (day) Value: 13
  misc_feature: MA Experiment 20001558 PARAMETER Experiment Name: At_Drought_Soil_Dry_P Parameter: Treatment Value: Drought vs. No Drought
gagatagagagaaagagaagcagttcggagaaacaatggcggtagaagacactcccaaatctgttgtaacggaagaagctaagcctaattcaatagagaatccgattgatcgataccatgaggaaggtgatgatgccgaagaaggagagatcgccggaggagaaggagacggaaacgttgacgaatcgagcaaatccggtgttcctgaatcgcatcctctggaacattcatggactttctggttcgataatcctgctgtgaaatcgaaacaaacctcttggggaagttccttgcgacccgtgtttacgttttcaactgttgaggaattttggagtttgtacaacaacatgaagcatccgagcaagttagctcacggagctgacttctactgtttcaaacacatcattgaacctaagtgggaggatcctatttgtgctaatggaggaaaatggactatgactttccctaaggagaagtctgataagagctggctctacactttgcttgcattgattggagagcagtttgatcatggagatgaaatatgtggagcagttgtcaacattagaggaaagcaagaaaggatatctatttggactaaaaatgcttcaaacgaagctgctcaggtgagcattggaaaacaatggaaggagtttctcgattacaacaacagcataggtttcatcatccatgaggatgcgaagaagctcgacaggaatgcaaagaacgcttacaccgcttgaaacctctcaaatctttgcattgtttcaattacagttttgtatgtgagagatctctatttatctaaacatgacttgacagtctgtctttgctagtgttgattgttcacgaagctctaacatttcatttagtaatatattagtatggttcttca

SEQ ID NO: 35892 - protein, 246 aa, Arabidopsis thaliana
  peptide (1)..(246): Ceres Seq. ID no. 12324014
  misc_feature (17)..(246): Pfam Name: Eukaryotic initiation factor 4E Pfam Description: Eukaryotic initiation factor 4E
  misc_feature (12)..(245): Homolog of NCBI NO: 38565051 NR Description: eukaryotic translation initiation factor 4E
  misc_feature (40)..(245): Homolog of NCBI NO: 7862169 NR Description: eIF4E [Lycopersicon esculentum]
  misc_feature (12)..(245): Homolog of NCBI NO: 25176244 NR Description: eucaryotic initiation factor 4E [Capsicum annuum]
  misc_feature (12)..(245): Homolog of NCBI NO: 25176246 NR Description: eucaryotic initiation factor 4E [Capsicum annuum]
  misc_feature (12)..(245): Homolog of NCBI NO: 38565045 NR Description: eukaryotic translation initiation factor 4E
  misc_feature (12)..(245): Homolog of NCBI NO: 25176242 NR Description: eucaryotic initiation factor 4E [Capsicum annuum]
  misc_feature (25)..(245): Homolog of NCBI NO: 34905982 NR Description: eukaryotic translation initiation factor 4E
  misc_feature (40)..(245): Homolog of NCBI NO: 32698524 NR Description: eukaryotic translation initiation factor 4E
  misc_feature (19)..(244): Homolog of NCBI NO: 37813067 NR Description: eukaryotic translation initiation factor 4E
  misc_feature (12)..(246): Homolog of NCBI NO: 15236735 NR Description: translation initiation factor eIF4E
DREKEKQFGETMAVEDTPKSVVTEEAKPNSIENPIDRYHEEGDDAEEGEIAGGEGDGNVDESSKSGVPESHPLEHSWTFWFDNPAVKSKQTSWGSSLRPVFTFSTVEEFWSLYNNMKHPSKLAHGADFYCFKHIIEPKWEDPICANGGKWTMTFPKEKSDKSWLYTLLALIGEQFDHGDEICGAVVNIRGKQERISIWTKNASNEAAQVSIGKQWKEFLDYNNSIGFIIHEDAKKLDRNAKNAYTA

SEQ ID NO: 35893 - protein, 235 aa, Arabidopsis thaliana
  peptide (1)..(235): Ceres Seq. ID no. 12324015
  misc_feature (6)..(235): Pfam Name: Eukaryotic initiation factor 4E Pfam Description: Eukaryotic initiation factor 4E
  misc_feature (1)..(234): Homolog of NCBI NO: 38565051 NR Description: eukaryotic translation initiation factor 4E
  misc_feature (29)..(234): Homolog of NCBI NO: 7862169 NR Description: eIF4E [Lycopersicon esculentum]
  misc_feature (1)..(234): Homolog of NCBI NO: 25176244 NR Description: eucaryotic initiation factor 4E [Capsicum annuum]
  misc_feature (1)..(234): Homolog of NCBI NO: 25176246 NR Description: eucaryotic initiation factor 4E [Capsicum annuum]
  misc_feature (1)..(234): Homolog of NCBI NO: 38565045 NR Description: eukaryotic translation initiation factor 4E
  misc_feature (1)..(234): Homolog of NCBI NO: 25176242 NR Description: eucaryotic initiation factor 4E [Capsicum annuum]
  misc_feature (14)..(234): Homolog of NCBI NO: 34905982 NR Description: eukaryotic translation initiation factor 4E
  misc_feature (29)..(234): Homolog of NCBI NO: 32698524 NR Description: eukaryotic translation initiation factor 4E
  misc_feature (8)..(233): Homolog of NCBI NO: 37813067 NR Description: eukaryotic translation initiation factor 4E
  misc_feature (1)..(235): Homolog of NCBI NO: 15236735 NR Description: translation initiation factor eIF4E
MAVEDTPKSVVTEEAKPNSIENPIDRYHEEGDDAEEGEIAGGEGDGNVDESSKSGVPESHPLEHSWTFWFDNPAVKSKQTSWGSSLRPVFTFSTVEEFWSLYNNMKHPSKLAHGADFYCFKHIIEPKWEDPICANGGKWTMTFPKEKSDKSWLYTLLALIGEQFDHGDEICGAVVNIRGKQERISIWTKNASNEAAQVSIGKQWKEFLDYNNSIGFIIHEDAKKLDRNAKNAYTA

SEQ ID NO: 35894 - protein, 131 aa, Arabidopsis thaliana
  peptide (1)..(131): Ceres Seq. ID no. 12324016
  misc_feature (1)..(131): Pfam Name: Eukaryotic initiation factor 4E Pfam Description: Eukaryotic initiation factor 4E
  misc_feature (1)..(130): Homolog of NCBI NO: 38565051 NR Description: eukaryotic translation initiation factor 4E
  misc_feature (1)..(130): Homolog of NCBI NO: 7862169 NR Description: eIF4E [Lycopersicon esculentum]
  misc_feature (1)..(130): Homolog of NCBI NO: 25176244 NR Description: eucaryotic initiation factor 4E [Capsicum annuum]
  misc_feature (1)..(130): Homolog of NCBI NO: 25176246 NR Description: eucaryotic initiation factor 4E [Capsicum annuum]
  misc_feature (1)..(130): Homolog of NCBI NO: 38565045 NR Description: eukaryotic translation initiation factor 4E
  misc_feature (1)..(130): Homolog of NCBI NO: 25176242 NR Description: eucaryotic initiation factor 4E [Capsicum annuum]
  misc_feature (1)..(130): Homolog of NCBI NO: 34905982 NR Description: eukaryotic translation initiation factor 4E
  misc_feature (1)..(130): Homolog of NCBI NO: 32698524 NR Description: eukaryotic translation initiation factor 4E
  misc_feature (1)..(129): Homolog of NCBI NO: 37813067 NR Description: eukaryotic translation initiation factor 4E
  misc_feature (1)..(131): Homolog of NCBI NO: 15236735 NR Description: translation initiation factor eIF4E
MKHPSKLAHGADFYCFKHIIEPKWEDPICANGGKWTMTFPKEKSDKSWLYTLLALIGEQFDHGDEICGAVVNIRGKQERISIWTKNASNEAAQVSIGKQWKEFLDYNNSIGFIIHEDAKKLDRNAKNAYTA

SEQ ID NO: 35895 - DNA, 1325 bp, Arabidopsis thaliana
  misc_feature (1)..(1325): Ceres Seq. ID no. 12562714
  misc_feature: MA Experiment ID: 20000069 Result: Down-regulated in Transcription
  misc_feature: MA Experiment 20000069 PARAMETER Experiment Name: At_100uM_ABA_Mutants_cDNA_P Parameter: Plant Line Value: CS23
  misc_feature: MA Experiment 20000069 PARAMETER Experiment Name: At_100uM_ABA_Mutants_cDNA_P Parameter: Timepoint (hr) Value: 6
  misc_feature: MA Experiment 20000069 PARAMETER Experiment Name: At_100uM_ABA_Mutants_cDNA_P Parameter: Tissue Value: Aerial
  misc_feature: MA Experiment 20000069 PARAMETER Experiment Name: At_100uM_ABA_Mutants_cDNA_P Parameter: Treatment Value: 100uM ABA vs. No Treatment
  misc_feature: MA Experiment ID: 20000070 Result: Down-regulated in Transcription
  misc_feature: MA Experiment 20000070 PARAMETER Experiment Name: At_100uM_ABA_Mutants_cDNA_P Parameter: Plant Line Value: CS24
  misc_feature: MA Experiment 20000070 PARAMETER Experiment Name: At_100uM_ABA_Mutants_cDNA_P Parameter: Timepoint (hr) Value: 6
  misc_feature: MA Experiment 20000070 PARAMETER Experiment Name: At_100uM_ABA_Mutants_cDNA_P Parameter: Tissue Value: Aerial
  misc_feature: MA Experiment 20000070 PARAMETER Experiment Name: At_100uM_ABA_Mutants_cDNA_P Parameter: Treatment Value: 100uM ABA vs. No Treatment
  misc_feature: MA Experiment ID: 20000071 Result: Down-regulated in Transcription
  misc_feature: MA Experiment 20000071 PARAMETER Experiment Name: At_100uM_ABA_Mutants_cDNA_P Parameter: Plant Line Value: CS8104
  misc_feature: MA Experiment 20000071 PARAMETER Experiment Name: At_100uM_ABA_Mutants_cDNA_P Parameter: Timepoint (hr) Value: 6
  misc_feature: MA Experiment 20000071 PARAMETER Experiment Name: At_100uM_ABA_Mutants_cDNA_P Parameter: Tissue Value: Aerial
  misc_feature: MA Experiment 20000071 PARAMETER Experiment Name: At_100uM_ABA_Mutants_cDNA_P Parameter: Treatment Value: 100uM ABA vs. No Treatment
  misc_feature: MA Experiment ID: 20000166 Result: Down-regulated in Transcription
  misc_feature: MA Experiment 20000166 PARAMETER Experiment Name: At_100uM_ABA_P Parameter: Age (day) Value: 14
  misc_feature: MA Experiment 20000166 PARAMETER Experiment Name: At_100uM_ABA_P Parameter: Organism Value: A. thaliana
  misc_feature: MA Experiment 20000166 PARAMETER Experiment Name: At_100uM_ABA_P Parameter: Plant Line Value: WS
  misc_feature: MA Experiment 20000166 PARAMETER Experiment Name: At_100uM_ABA_P Parameter: Timepoint (hr) Value: 1
  misc_feature: MA Experiment 20000166 PARAMETER Experiment Name: At_100uM_ABA_P Parameter: Tissue Value: Aerial
  misc_feature: MA Experiment 20000166 PARAMETER Experiment Name: At_100uM_ABA_P Parameter: Treatment Value: 100uM ABA vs. No Treatment
  misc_feature: MA Experiment ID: 20000169 Result: Down-regulated in Transcription
  misc_feature: MA Experiment 20000169 PARAMETER Experiment Name: At_100uM_ABA_P Parameter: Age (day) Value: 14
  misc_feature: MA Experiment 20000169 PARAMETER Experiment Name: At_100uM_ABA_P Parameter: Organism Value: A. thaliana
  misc_feature: MA Experiment 20000169 PARAMETER Experiment Name: At_100uM_ABA_P Parameter: Plant Line Value: WS
  misc_feature: MA Experiment 20000169 PARAMETER Experiment Name: At_100uM_ABA_P Parameter: Timepoint (hr) Value: 6
  misc_feature: MA Experiment 20000169 PARAMETER Experiment Name: At_100uM_ABA_P Parameter: Tissue Value: Aerial
  misc_feature: MA Experiment 20000169 PARAMETER Experiment Name: At_100uM_ABA_P Parameter: Treatment Value: 100uM ABA vs. No Treatment
  misc_feature: MA Experiment ID: 20000179 Result: Up-regulated in Transcription
  misc_feature: MA Experiment 20000179 PARAMETER Experiment Name: At_Germinating_Seeds_P Parameter: Age (hr) Value: 6 vs. 0
  misc_feature: MA Experiment 20000179 PARAMETER Experiment Name: At_Germinating_Seeds_P Parameter: Tissue Value: Germinating Seeds
  misc_feature: MA Experiment ID: 20000180 Result: Up-regulated in Transcription
  misc_feature: MA Experiment 20000180 PARAMETER Experiment Name: At_Germinating_Seeds_P Parameter: Age (hr) Value: 24 vs. 0
  misc_feature: MA Experiment 20000180 PARAMETER Experiment Name: At_Germinating_Seeds_P Parameter: Tissue Value: Germinating Seeds
  misc_feature: MA Experiment ID: 20000185 Result: Down-regulated in Transcription
  misc_feature: MA Experiment 20000185 PARAMETER Experiment Name: At_Roots__P Parameter: Age (day) Value: 7 vs. 21
  misc_feature: MA Experiment 20000185 PARAMETER Experiment Name: At_Roots__P Parameter: Organism Value: A. thaliana
  misc_feature: MA Experiment 20000185 PARAMETER Experiment Name: At_Roots__P Parameter: Tissue Value: Roots vs. Whole Plant
  misc_feature: MA Experiment ID: 20000234 Result: Down-regulated in Transcription
  misc_feature: MA Experiment 20000234 PARAMETER Experiment Name: At_Siliques_P Parameter: Age (day) Value: 21
  misc_feature: MA Experiment 20000234 PARAMETER Experiment Name: At_Siliques_P Parameter: Organism Value: A. thaliana
  misc_feature: MA Experiment 20000234 PARAMETER Experiment Name: At_Siliques_P Parameter: Plant Line Value: WS
  misc_feature: MA Experiment 20000234 PARAMETER Experiment Name: At_Siliques_P Parameter: Tissue Value: Less Than 5mm Siliques vs. Whole Plant
  misc_feature: MA Experiment ID: 20000264 Result: Down-regulated in Transcription
  misc_feature: MA Experiment 20000264 PARAMETER Experiment Name: At_Open_Flower_P Parameter: Age (day) Value: 21
  misc_feature: MA Experiment 20000264 PARAMETER Experiment Name: At_Open_Flower_P Parameter: Plant Line Value: WS
  misc_feature: MA Experiment 20000264 PARAMETER Experiment Name: At_Open_Flower_P Parameter: Tissue Value: Open Flower vs. Whole Plant
  misc_feature: MA Experiment ID: 20000265 Result: Down-regulated in Transcription
  misc_feature: MA Experiment 20000265 PARAMETER Experiment Name: At_Open_Flower_P Parameter: Age (day) Value: 21
  misc_feature: MA Experiment 20000265 PARAMETER Experiment Name: At_Open_Flower_P Parameter: Plant Line Value: WS
  misc_feature: MA Experiment 20000265 PARAMETER Experiment Name: At_Open_Flower_P Parameter: Tissue Value: Closed Flower vs. Whole Plant
  misc_feature: MA Experiment ID: 20000286 Result: Down-regulated in Transcription
  misc_feature: MA Experiment 20000286 PARAMETER Experiment Name: At_Open_Flower_P Parameter: Age (day) Value: 21
  misc_feature: MA Experiment 20000286 PARAMETER Experiment Name: At_Open_Flower_P Parameter: Plant Line Value: WS
  misc_feature: MA Experiment 20000286 PARAMETER Experiment Name: At_Open_Flower_P Parameter: Tissue Value: Half Open vs. Whole Plant
  misc_feature: MA Experiment ID: 20000436 Result: Down-regulated in Transcription
  misc_feature: MA Experiment 20000436 PARAMETER Experiment Name: At_Drought_P Parameter: Age (day) Value: 7
  misc_feature: MA Experiment 20000436 PARAMETER Experiment Name: At_Drought_P Parameter: Organism Value: A. thaliana
  misc_feature: MA Experiment 20000436 PARAMETER Experiment Name: At_Drought_P Parameter: Plant Line Value: WS
  misc_feature: MA Experiment 20000436 PARAMETER Experiment Name: At_Drought_P Parameter: Timepoint (hr) Value: 12
  misc_feature: MA Experiment 20000436 PARAMETER Experiment Name: At_Drought_P Parameter: Tissue Value: Whole Plant
  misc_feature: MA Experiment 20000436 PARAMETER Experiment Name: At_Drought_P Parameter: Treatment Value: Drought vs. No Drought
  misc_feature: MA Experiment ID: 20000437 Result: Down-regulated in Transcription
  misc_feature: MA Experiment 20000437 PARAMETER Experiment Name: At_Drought_P Parameter: Age (day) Value: 8
  misc_feature: MA Experiment 20000437 PARAMETER Experiment Name: At_Drought_P Parameter: Organism Value: A. thaliana
  misc_feature: MA Experiment 20000437 PARAMETER Experiment Name: At_Drought_P Parameter: Plant Line Value: WS
  misc_feature: MA Experiment 20000437 PARAMETER Experiment Name: At_Drought_P Parameter: Timepoint (hr) Value: 24
  misc_feature: MA Experiment 20000437 PARAMETER Experiment Name: At_Drought_P Parameter: Tissue Value: Whole Plant
  misc_feature: MA Experiment 20000437 PARAMETER Experiment Name: At_Drought_P Parameter: Treatment Value: Drought vs. No Drought
  misc_feature: MA Experiment ID: 20000439 Result: Down-regulated in Transcription
  misc_feature: MA Experiment 20000439 PARAMETER Experiment Name: At_Roots__P Parameter: Age (day) Value: 14 vs. 21
  misc_feature: MA Experiment 20000439 PARAMETER Experiment Name: At_Roots__P Parameter: Organism Value: A. thaliana
  misc_feature: MA Experiment 20000439 PARAMETER Experiment Name: At_Roots__P Parameter: Tissue Value: Roots vs. Whole Plant
  misc_feature: MA Experiment ID: 20000441 Result: Up-regulated in Transcription
  misc_feature: MA Experiment 20000441 PARAMETER Experiment Name: At_1uM_BR-BRZ__P Parameter: Tissue Value: Shoot Apices
  misc_feature: MA Experiment 20000441 PARAMETER Experiment Name: At_1uM_BR-BRZ__P Parameter: Treatment Value: 1uM BR vs. No Treatment
  misc_feature: MA Experiment ID: 20000443 Result: Up-regulated in Transcription
  misc_feature: MA Experiment 20000443 PARAMETER Experiment Name: At_1uM_BR-BRZ__P Parameter: Tissue Value: Shoot Apices
  misc_feature: MA Experiment 20000443 PARAMETER Experiment Name: At_1uM_BR-BRZ__P Parameter: Treatment Value: 1uM BRZ vs. No Treatment
  misc_feature: MA Experiment ID: 20000453 Result: Down-regulated in Transcription
  misc_feature: MA Experiment 20000453 PARAMETER Experiment Name: At_100uM_ABA_P Parameter: Age (day) Value: 15
  misc_feature: MA Experiment 20000453 PARAMETER Experiment Name: At_100uM_ABA_P Parameter: Organism Value: A. thaliana
  misc_feature: MA Experiment 20000453 PARAMETER Experiment Name: At_100uM_ABA_P Parameter: Plant Line Value: WS
  misc_feature: MA Experiment 20000453 PARAMETER Experiment Name: At_100uM_ABA_P Parameter: Timepoint (hr) Value: 24
  misc_feature: MA Experiment 20000453 PARAMETER Experiment Name: At_100uM_ABA_P Parameter: Tissue Value: Aerial
  misc_feature: MA Experiment 20000453 PARAMETER Experiment Name: At_100uM_ABA_P Parameter: Treatment Value: 100uM ABA vs. No Treatment
  misc_feature: MA Experiment ID: 20000495 Result: Down-regulated in Transcription
  misc_feature: MA Experiment 20000495 PARAMETER Experiment Name: At_Guard_Cells_P Parameter: Harvest Date Value: 8/2/2002
  misc_feature: MA Experiment 20000495 PARAMETER Experiment Name: At_Guard_Cells_P Parameter: Organism Value: A. thaliana
  misc_feature: MA Experiment 20000495 PARAMETER Experiment Name: At_Guard_Cells_P Parameter: Tissue Value: Guard Cells vs. Leaves
  misc_feature: MA Experiment ID: 20000576 Result: Down-regulated in Transcription
  misc_feature: MA Experiment 20000576 PARAMETER Experiment Name: At_100uM_ABA_Mutants__P Parameter: Organism Value: A. thaliana
  misc_feature: MA Experiment 20000576 PARAMETER Experiment Name: At_100uM_ABA_Mutants__P Parameter: Plant Line Value: CS23
  misc_feature: MA Experiment 20000576 PARAMETER Experiment Name: At_100uM_ABA_Mutants__P Parameter: Timepoint (hr) Value: 6
  misc_feature: MA Experiment 20000576 PARAMETER Experiment Name: At_100uM_ABA_Mutants__P Parameter: Tissue Value: Whole Plant
  misc_feature: MA Experiment 20000576 PARAMETER Experiment Name: At_100uM_ABA_Mutants__P Parameter: Treatment Value: 1uM ABA vs. No Treatment
  misc_feature: MA Experiment ID: 20000794 Result: Down-regulated in Transcription
  misc_feature: MA Experiment 20000794 PARAMETER Experiment Name: At_Petals_P Parameter: Age (day) Value: 23-25 days
  misc_feature: MA Experiment 20000794 PARAMETER Experiment Name: At_Petals_P Parameter: Plant Line Value: WS
  misc_feature: MA Experiment 20000794 PARAMETER Experiment Name: At_Petals_P Parameter: Tissue Value: Petals vs. Whole plant
  misc_feature: MA Experiment ID: 20001248 Result: Down-regulated in Transcription
  misc_feature: MA Experiment 20001248 PARAMETER Experiment Name: At_Far-red-induction_P Parameter: Age (day) Value: 7
  misc_feature: MA Experiment 20001248 PARAMETER Experiment Name: At_Far-red-induction_P Parameter: Light Value: Far-red vs. White
  misc_feature: MA Experiment 20001248 PARAMETER Experiment Name: At_Far-red-induction_P Parameter: Organism Value: A. thaliana
  misc_feature: MA Experiment 20001248 PARAMETER Experiment Name: At_Far-red-induction_P Parameter: Plant Line Value: Columbia
  misc_feature: MA Experiment 20001248 PARAMETER Experiment Name: At_Far-red-induction_P Parameter: Timepoint (hr) Value: 4
  misc_feature: MA Experiment 20001248 PARAMETER Experiment Name: At_Far-red-induction_P Parameter: Tissue Value: Whole Plant
  misc_feature: MA Experiment ID: 20001450 Result: Down-regulated in Transcription
  misc_feature: MA Experiment 20001450 PARAMETER Experiment Name: At_Far-red-induction_P Parameter: Age (day) Value: 7
  misc_feature: MA Experiment 20001450 PARAMETER Experiment Name: At_Far-red-induction_P Parameter: Light Value: Far-red vs. White
  misc_feature: MA Experiment 20001450 PARAMETER Experiment Name: At_Far-red-induction_P Parameter: Organism Value: A. thaliana
  misc_feature: MA Experiment 20001450 PARAMETER Experiment Name: At_Far-red-induction_P Parameter: Plant Line Value: Columbia
  misc_feature: MA Experiment 20001450 PARAMETER Experiment Name: At_Far-red-induction_P Parameter: Timepoint (hr) Value: 8
  misc_feature: MA Experiment 20001450 PARAMETER Experiment Name: At_Far-red-induction_P Parameter: Tissue Value: Whole Plant
  misc_feature: MA Experiment ID: 20001451 Result: Down-regulated in Transcription
  misc_feature: MA Experiment 20001451 PARAMETER Experiment Name: At_Far-red-induction_P Parameter: Age (day) Value: 7
  misc_feature: MA Experiment 20001451 PARAMETER Experiment Name: At_Far-red-induction_P Parameter: Light Value: Far-red vs. White
  misc_feature: MA Experiment 20001451 PARAMETER Experiment Name: At_Far-red-induction_P Parameter: Organism Value: A. thaliana
  misc_feature: MA Experiment 20001451 PARAMETER Experiment Name: At_Far-red-induction_P Parameter: Plant Line Value: Columbia
  misc_feature: MA Experiment 20001451 PARAMETER Experiment Name: At_Far-red-induction_P Parameter: Timepoint (hr) Value: 24
  misc_feature: MA Experiment 20001451 PARAMETER Experiment Name: At_Far-red-induction_P Parameter: Tissue Value: Whole Plant
  misc_feature: MA Experiment ID: 20001555 Result: Down-regulated in Transcription
  misc_feature: MA Experiment 20001555 PARAMETER Experiment Name: At_Drought_Soil_Dry_P Parameter: Age (day) Value: 24
  misc_feature: MA Experiment 20001555 PARAMETER Experiment Name: At_Drought_Soil_Dry_P Parameter: Organism Value: A. thaliana
  misc_feature: MA Experiment 20001555 PARAMETER Experiment Name: At_Drought_Soil_Dry_P Parameter: Plant Line Value: WS
  misc_feature: MA Experiment 20001555 PARAMETER Experiment Name: At_Drought_Soil_Dry_P Parameter: Post Timepoint (hr) Value: None
  misc_feature: MA Experiment 20001555 PARAMETER Experiment Name: At_Drought_Soil_Dry_P Parameter: Post-Treatment Value: None
  misc_feature: MA Experiment 20001555 PARAMETER Experiment Name: At_Drought_Soil_Dry_P Parameter: Timepoint (day) Value: 10
  misc_feature: MA Experiment 20001555 PARAMETER Experiment Name: At_Drought_Soil_Dry_P Parameter: Treatment Value: Drought vs. No Drought
  misc_feature: MA Experiment ID: 20001556 Result: Down-regulated in Transcription
  misc_feature: MA Experiment 20001556 PARAMETER Experiment Name: At_Drought_Soil_Dry_P Parameter: Age (day) Value: 26
  misc_feature: MA Experiment 20001556 PARAMETER Experiment Name: At_Drought_Soil_Dry_P Parameter: Organism Value: A. thaliana
  misc_feature: MA Experiment 20001556 PARAMETER Experiment Name: At_Drought_Soil_Dry_P Parameter: Plant Line Value: WS
  misc_feature: MA Experiment 20001556 PARAMETER Experiment Name: At_Drought_Soil_Dry_P Parameter: Post Timepoint (hr) Value: None
  misc_feature: MA Experiment 20001556 PARAMETER Experiment Name: At_Drought_Soil_Dry_P Parameter: Post-Treatment Value: None
  misc_feature: MA Experiment 20001556 PARAMETER Experiment Name: At_Drought_Soil_Dry_P Parameter: Timepoint (day) Value: 12
  misc_feature: MA Experiment 20001556 PARAMETER Experiment Name: At_Drought_Soil_Dry_P Parameter: Treatment Value: Drought vs. No Drought
  misc_feature: MA Experiment ID: 20001559 Result: Down-regulated in Transcription
  misc_feature: MA Experiment 20001559 PARAMETER Experiment Name: At_Drought_Soil_Dry_P Parameter: Age (day) Value: 28
  misc_feature: MA Experiment 20001559 PARAMETER Experiment Name: At_Drought_Soil_Dry_P Parameter: Organism Value: A. thaliana
  misc_feature: MA Experiment 20001559 PARAMETER Experiment Name: At_Drought_Soil_Dry_P Parameter: Plant Line Value: WS
  misc_feature: MA Experiment 20001559 PARAMETER Experiment Name: At_Drought_Soil_Dry_P Parameter: Post Timepoint (hr) Value: 29
  misc_feature: MA Experiment 20001559 PARAMETER Experiment Name: At_Drought_Soil_Dry_P Parameter: Post-Treatment Value: Re-Water vs. No Drought
  misc_feature: MA Experiment 20001559 PARAMETER Experiment Name: At_Drought_Soil_Dry_P Parameter: Timepoint (day) Value: 14
  misc_feature: MA Experiment 20001559 PARAMETER Experiment Name: At_Drought_Soil_Dry_P Parameter: Treatment Value: Drought vs. No Drought
  misc_feature: MA Experiment ID: 20001560 Result: Down-regulated in Transcription
  misc_feature: MA Experiment 20001560 PARAMETER Experiment Name: At_Drought_Soil_Dry_P Parameter: Age (day) Value: 28
  misc_feature: MA Experiment 20001560 PARAMETER Experiment Name: At_Drought_Soil_Dry_P Parameter: Organism Value: A. thaliana
  misc_feature: MA Experiment 20001560 PARAMETER Experiment Name: At_Drought_Soil_Dry_P Parameter: Plant Line Value: WS
  misc_feature: MA Experiment 20001560 PARAMETER Experiment Name: At_Drought_Soil_Dry_P Parameter: Post Timepoint (hr) Value: None
  misc_feature: MA Experiment 20001560 PARAMETER Experiment Name: At_Drought_Soil_Dry_P Parameter: Post-Treatment Value: None
  misc_feature: MA Experiment 20001560 PARAMETER Experiment Name: At_Drought_Soil_Dry_P Parameter: Timepoint (day) Value: 14
  misc_feature: MA Experiment 20001560 PARAMETER Experiment Name: At_Drought_Soil_Dry_P Parameter: Treatment Value: Drought vs. No Drought
  misc_feature: MA Experiment ID: 20001757 Result: Up-regulated in Transcription
  misc_feature: MA Experiment 20001757 PARAMETER Experiment Name: At_50mM_NH4NO3_L-to-H_P Parameter: Timepoint (hr) Value: 6
  misc_feature: MA Experiment 20001757 PARAMETER Experiment Name: At_50mM_NH4NO3_L-to-H_P Parameter: Tissue Value: Leaf
  misc_feature: MA Experiment 20001757 PARAMETER Experiment Name: At_50mM_NH4NO3_L-to-H_P Parameter: Treatment Value: 50mM NH4NO3 vs 100mM Mannitol
  misc_feature: MA Experiment ID: 20001904 Result: Down-regulated in Transcription
  misc_feature: MA Experiment 20001904 PARAMETER Experiment Name: At_Drought_Reproduction_P Parameter: Age (day) Value: 37
  misc_feature: MA Experiment 20001904 PARAMETER Experiment Name: At_Drought_Reproduction_P Parameter: Organism Value: A. thaliana
  misc_feature: MA Experiment 20001904 PARAMETER Experiment Name: At_Drought_Reproduction_P Parameter: Plant Line Value: WS
  misc_feature: MA Experiment 20001904 PARAMETER Experiment Name: At_Drought_Reproduction_P Parameter: Timepoint (day) Value: 7
  misc_feature: MA Experiment 20001904 PARAMETER Experiment Name: At_Drought_Reproduction_P Parameter: Tissue Value: Rosettes
  misc_feature: MA Experiment 20001904 PARAMETER Experiment Name: At_Drought_Reproduction_P Parameter: Treatment Value: Drought vs. No Drought
  misc_feature: MA Experiment ID: 20001905 Result: Down-regulated in Transcription
  misc_feature: MA Experiment 20001905 PARAMETER Experiment Name: At_Drought_Reproduction_P Parameter: Age (day) Value: 40
  misc_feature: MA Experiment 20001905 PARAMETER Experiment Name: At_Drought_Reproduction_P Parameter: Organism Value: A. thaliana
  misc_feature: MA Experiment 20001905 PARAMETER Experiment Name: At_Drought_Reproduction_P Parameter: Plant Line Value: WS
  misc_feature: MA Experiment 20001905 PARAMETER Experiment Name: At_Drought_Reproduction_P Parameter: Timepoint (day) Value: 10
  misc_feature: MA Experiment 20001905 PARAMETER Experiment Name: At_Drought_Reproduction_P Parameter: Tissue Value: Rosettes
  misc_feature: MA Experiment 20001905 PARAMETER Experiment Name: At_Drought_Reproduction_P Parameter: Treatment Value: Drought vs. No Drought
  misc_feature: MA Experiment ID: 20001906 Result: Down-regulated in Transcription
  misc_feature: MA Experiment 20001906 PARAMETER Experiment Name: At_Drought_Reproduction_P Parameter: Age (day) Value: 35
  misc_feature: MA Experiment 20001906 PARAMETER Experiment Name: At_Drought_Reproduction_P Parameter: Organism Value: A. thaliana
  misc_feature: MA Experiment 20001906 PARAMETER Experiment Name: At_Drought_Reproduction_P Parameter: Plant Line Value: WS
  misc_feature: MA Experiment 20001906 PARAMETER Experiment Name: At_Drought_Reproduction_P Parameter: Timepoint (day) Value: 5
  misc_feature: MA Experiment 20001906 PARAMETER Experiment Name: At_Drought_Reproduction_P Parameter: Tissue Value: Siliques
  misc_feature: MA Experiment 20001906 PARAMETER Experiment Name: At_Drought_Reproduction_P Parameter: Treatment Value: Drought vs. No Drought
  misc_feature: MA Experiment ID: 20001907 Result: Down-regulated in Transcription
  misc_feature: MA Experiment 20001907 PARAMETER Experiment Name: At_Drought_Reproduction_P Parameter: Age (day) Value: 37
  misc_feature: MA Experiment 20001907 PARAMETER Experiment Name: At_Drought_Reproduction_P Parameter: Organism Value: A. thaliana
  misc_feature: MA Experiment 20001907 PARAMETER Experiment Name: At_Drought_Reproduction_P Parameter: Plant Line Value: WS
  misc_feature: MA Experiment 20001907 PARAMETER Experiment Name: At_Drought_Reproduction_P Parameter: Timepoint (day) Value: 7
  misc_feature: MA Experiment 20001907 PARAMETER Experiment Name: At_Drought_Reproduction_P Parameter: Tissue Value: Siliques
  misc_feature: MA Experiment 20001907 PARAMETER Experiment Name: At_Drought_Reproduction_P Parameter: Treatment Value: Drought vs. No Drought
  misc_feature: MA Experiment ID: 20001911 Result: Down-regulated in Transcription
  misc_feature: MA Experiment 20001911 PARAMETER Experiment Name: At_Drought_Reproduction_P Parameter: Age (day) Value: 40
  misc_feature: MA Experiment 20001911 PARAMETER Experiment Name: At_Drought_Reproduction_P Parameter: Organism Value: A. thaliana
  misc_feature: MA Experiment 20001911 PARAMETER Experiment Name: At_Drought_Reproduction_P Parameter: Plant Line Value: WS
  misc_feature: MA Experiment 20001911 PARAMETER Experiment Name: At_Drought_Reproduction_P Parameter: Timepoint (day) Value: 10
  misc_feature: MA Experiment 20001911 PARAMETER Experiment Name: At_Drought_Reproduction_P Parameter: Tissue Value: Flowers
  misc_feature: MA Experiment 20001911 PARAMETER Experiment Name: At_Drought_Reproduction_P Parameter: Treatment Value: Drought vs. No Drought
acgaaaggaaaatatgagtgaggagaagaggaagcaacacttcgtgctagtacatggtgcgtgccacggcgcatggtgctggtacaaggttaagcctcttctcgaggctttgggccatcgtgtaaccgccttagacctagctgcttccggtatagacacaaccaggtcaatcactgacatttctacatgtgaacaatattctgagccattgatgcagctaatgacttcattgccgaatgatgagaaggttgtactcgttggtcatagctttggaggtttgagtttagccttagccatggataagtttcccgataaaatctctgtctctgtcttcgtgactgcattcatgcccgacaccaaacactcaccatcgttcgtcgaggaaaaggtatatatctctttttaaagcagccaaattttgtgttctgttcttaaatccaccacctggaagtctagacggtcaaaacaacgtggtcgtccatttttagccaaaaccgttacaagattgtagccaaaattattacaaaaattgatcaacataacggttccttttggtctatatgtccgattgttcagtctagtcggacaaaatcgagatttccatttcgcagtcttttataacttgtggcttatatactataaccaattaaccatagatcatgtgttagacaatctaatgtccaagtagtgtcactttcgtggtgatgagttagtaatttgttttaacatgtttcattttcatggttgttacttcgttagaatttttaaaggtagttaattgtaataaacgtgaaaataaatatgattttttcgtaattactatgaaaaagtttgcaagcagcatgacaccagaaggatggatgggctctgagctcgagacatatggttcagataattccggcttgtctgtgttcttcagcaccgacttcatgaagcaccgtctctaccaactttctcctgtggaggatcttgagcttggattgcttctaaagaggcctagttcattgtttattaatgaattatcgaagatggagaacttttcttagaaagggtatggatctgttcctcgagcttacattgtgtgcaaagaggacaacattatctcggaagaccatcaacgatggatgatccataattatccggcgaatttagtgattgagatggaagagacggatcatatgccaatgttttgcaaacctcaagtactaagtgaccatctattggcaatcgctgacaatttctcttaaataatattttgatgaaaatgtatttggagtggatacaataaaaatgtgttctaaattaatggatctttatgaaggtcc

SEQ ID NO: 35896 - protein, 134 aa, Arabidopsis thaliana
  peptide (1)..(134): Ceres Seq. ID no. 12562715
  misc_feature (39)..(129): Pfam Name: alpha/beta hydrolase fold Pfam Description: alpha/beta hydrolase fold
  misc_feature (7)..(130): Homolog of NCBI NO: 15227859 NR Description: putative acetone-cyanohydrin lyase; protein id:
  misc_feature (12)..(129): Homolog of NCBI NO: 15235445 NR Description: hydroxynitrile lyase like protein; protein id:
  misc_feature (9)..(129): Homolog of NCBI NO: 40549303 NR Description: salicylic acid-binding protein 2 [Nicotiana
  misc_feature (11)..(129): Homolog of NCBI NO: 14279437 NR Description: ethylene-induced esterase [Citrus sinensis]
  misc_feature (5)..(130): Homolog of NCBI NO: 15227865 NR Description: putative acetone-cyanohydrin lyase; protein id:
  misc_feature (6)..(129): Homolog of NCBI NO: 15227861 NR Description: putative acetone-cyanohydrin lyase; protein id:
  misc_feature (5)..(129): Homolog of NCBI NO: 27754457 NR Description: putative acetone-cyanohydrin lyase [Arabidopsis
  misc_feature (5)..(129): Homolog of NCBI NO: 15227867 NR Description: putative acetone-cyanohydrin lyase; protein id:
  misc_feature (5)..(129): Homolog of NCBI NO: 15227863 NR Description: putative acetone-cyanohydrin lyase
  misc_feature (5)..(129): Homolog of NCBI NO: 21554666 NR Description: putative acetone-cyanohydrin lyase [Arabidopsis
RKENMSEEKRKQHFVLVHGACHGAWCWYKVKPLLEALGHRVTALDLAASGIDTTRSITDISTCEQYSEPLMQLMTSLPNDEKVVLVGHSFGGLSLALAMDKFPDKISVSVFVTAFMPDTKHSPSFVEEKVYISF

SEQ ID NO: 35897 - protein, 130 aa, Arabidopsis thaliana
  peptide (1)..(130): Ceres Seq. ID no. 12562716
  misc_feature (35)..(125): Pfam Name: alpha/beta hydrolase fold Pfam Description: alpha/beta hydrolase fold
  misc_feature (3)..(126): Homolog of NCBI NO: 15227859 NR Description: putative acetone-cyanohydrin lyase; protein id:
  misc_feature (8)..(125): Homolog of NCBI NO: 15235445 NR Description: hydroxynitrile lyase like protein; protein id:
  misc_feature (5)..(125): Homolog of NCBI NO: 40549303 NR Description: salicylic acid-binding protein 2 [Nicotiana
  misc_feature (7)..(125): Homolog of NCBI NO: 14279437 NR Description: ethylene-induced esterase [Citrus sinensis]
  misc_feature (1)..(126): Homolog of NCBI NO: 15227865 NR Description: putative acetone-cyanohydrin lyase; protein id:
  misc_feature (2)..(125): Homolog of NCBI NO: 15227861 NR Description: putative acetone-cyanohydrin lyase; protein id:
  misc_feature (1)..(125): Homolog of NCBI NO: 27754457 NR Description: putative acetone-cyanohydrin lyase [Arabidopsis
  misc_feature (1)..(125): Homolog of NCBI NO: 15227867 NR Description: putative acetone-cyanohydrin lyase; protein id:
  misc_feature (1)..(125): Homolog of NCBI NO: 15227863 NR Description: putative acetone-cyanohydrin lyase
  misc_feature (1)..(125): Homolog of NCBI NO: 21554666 NR Description: putative acetone-cyanohydrin lyase [Arabidopsis
MSEEKRKQHFVLVHGACHGAWCWYKVKPLLEALGHRVTALDLAASGIDTTRSITDISTCEQYSEPLMQLMTSLPNDEKVVLVGHSFGGLSLALAMDKFPDKISVSVFVTAFMPDTKHSPSFVEEKVYISF

SEQ ID NO: 35898 - protein, 101 aa, Arabidopsis thaliana
  peptide (1)..(101): Ceres Seq. ID no. 12562717
  misc_feature (29)..(101): Pfam Name: alpha/beta hydrolase fold Pfam Description: alpha/beta hydrolase fold
  misc_feature (29)..(101): Homolog of NCBI NO: 15227859 NR Description: putative acetone-cyanohydrin lyase; protein id:
  misc_feature (29)..(101): Homolog of NCBI NO: 15235445 NR Description: hydroxynitrile lyase like protein; protein id:
  misc_feature (36)..(101): Homolog of NCBI NO: 40549303 NR Description: salicylic acid-binding protein 2 [Nicotiana
  misc_feature (28)..(101): Homolog of NCBI NO: 14279437 NR Description: ethylene-induced esterase [Citrus sinensis]
  misc_feature (30)..(101): Homolog of NCBI NO: 15227865 NR Description: putative acetone-cyanohydrin lyase; protein id:
  misc_feature (28)..(101): Homolog of NCBI NO: 15227861 NR Description: putative acetone-cyanohydrin lyase; protein id:
  misc_feature (28)..(101): Homolog of NCBI NO: 27754457 NR Description: putative acetone-cyanohydrin lyase [Arabidopsis
  misc_feature (28)..(101): Homolog of NCBI NO: 15227867 NR Description: putative acetone-cyanohydrin lyase; protein id:
  misc_feature (29)..(101): Homolog of NCBI NO: 15227863 NR Description: putative acetone-cyanohydrin lyase
  misc_feature (29)..(101): Homolog of NCBI NO: 21554666 NR Description: putative acetone-cyanohydrin lyase [Arabidopsis
MVVTSLEFLKVVNCNKRENKYDFFVITMKKFASSMTPEGWMGSELETYGSDNSGLSVFFSTDFMKHRLYQLSPVEDLELGLLLKRPSSLFINELSKMENFS

SEQ ID NO: 35899 - DNA, 739 bp, Arabidopsis thaliana
  misc_feature (1)..(739): Ceres Seq. ID no. 12394077
  misc_feature: MA Experiment ID: 108434 Result: Down-regulated in Transcription
  misc_feature: MA Experiment 108434 PARAMETER Experiment Name: At_Root_Tips_cDNA_P Parameter: Tissue Value: Root Tips
  misc_feature: MA Experiment ID: 108463 Result: Up-regulated in Transcription
  misc_feature: MA Experiment 108463 PARAMETER Experiment Name: At_Germinating_Seeds_cDNA_P Parameter: Age (day) Value: 3 vs. 0
  misc_feature: MA Experiment 108463 PARAMETER Experiment Name: At_Germinating_Seeds_cDNA_P Parameter: Tissue Value: Germinating Seeds
  misc_feature: MA Experiment ID: 108464 Result: Up-regulated in Transcription
  misc_feature: MA Experiment 108464 PARAMETER Experiment Name: At_Germinating_Seeds_cDNA_P Parameter: Age (day) Value: 4 vs. 0
  misc_feature: MA Experiment 108464 PARAMETER Experiment Name: At_Germinating_Seeds_cDNA_P Parameter: Tissue Value: Germinating Seeds
  misc_feature: MA Experiment ID: 108488 Result: Down-regulated in Transcription
  misc_feature: MA Experiment ID: 108561 Result: Down-regulated in Transcription
  misc_feature: MA Experiment 108561 PARAMETER Experiment Name: At_100uM_ABA_cDNA_P Parameter: Timepoint (hr) Value: 6
  misc_feature: MA Experiment 108561 PARAMETER Experiment Name: At_100uM_ABA_cDNA_P Parameter: Tissue Value: Aerial
  misc_feature: MA Experiment 108561 PARAMETER Experiment Name: At_100uM_ABA_cDNA_P Parameter: Treatment Value: 100uM ABA vs. No Treatment
  misc_feature: MA Experiment ID: 108569 Result: Down-regulated in Transcription
  misc_feature: MA Experiment 108569 PARAMETER Experiment Name: At_0.001%_MeJA__cDNA_P Parameter: Timepoint (hr) Value: 6
  misc_feature: MA Experiment 108569 PARAMETER Experiment Name: At_0.001%_MeJA__cDNA_P Parameter: Tissue Value: Aerial
  misc_feature: MA Experiment 108569 PARAMETER Experiment Name: At_0.001%_MeJA__cDNA_P Parameter: Treatment Value: 0.001% MeJA vs. No Treatment
  misc_feature: MA Experiment ID: 108579 Result: Up-regulated in Transcription
  misc_feature: MA Experiment 108579 PARAMETER Experiment Name: At_4deg_Cold_cDNA_P Parameter: Temperature (deg C) Value: 4 vs. 22
  misc_feature: MA Experiment 108579 PARAMETER Experiment Name: At_4deg_Cold_cDNA_P Parameter: Timepoint (hr) Value: 6
  misc_feature: MA Experiment 108579 PARAMETER Experiment Name: At_4deg_Cold_cDNA_P Parameter: Tissue Value: Aerial
  misc_feature: MA Experiment ID: 108585 Result: Up-regulated in Transcription
  misc_feature: MA Experiment 108585 PARAMETER Experiment Name: At_5mM_NaNP_cDNA_P Parameter: Timepoint (hr) Value: 6
  misc_feature: MA Experiment 108585 PARAMETER Experiment Name: At_5mM_NaNP_cDNA_P Parameter: Tissue Value: Aerial
  misc_feature: MA Experiment 108585 PARAMETER Experiment Name: At_5mM_NaNP_cDNA_P Parameter: Treatment Value: null
  misc_feature: MA Experiment ID: 108595 Result: Up-regulated in Transcription
  misc_feature: MA Experiment 108595 PARAMETER Experiment Name: At_Ler-pi_Ovule_cDNA_P Parameter: Plant Line Value: null
  misc_feature: MA Experiment ID: 108607 Result: Down-regulated in Transcription
  misc_feature: MA Experiment 108607 PARAMETER Experiment Name: At_100uM_ABA_cDNA_P Parameter: Timepoint (hr) Value: 4
  misc_feature: MA Experiment 108607 PARAMETER Experiment Name: At_100uM_ABA_cDNA_P Parameter: Tissue Value: Aerial
  misc_feature: MA Experiment 108607 PARAMETER Experiment Name: At_100uM_ABA_cDNA_P Parameter: Treatment Value: 100uM ABA vs. No Treatment
  misc_feature: MA Experiment ID: 20000070 Result: Down-regulated in Transcription
  misc_feature: MA Experiment 20000070 PARAMETER Experiment Name: At_100uM_ABA_Mutants_cDNA_P Parameter: Plant Line Value: CS24
  misc_feature: MA Experiment 20000070 PARAMETER Experiment Name: At_100uM_ABA_Mutants_cDNA_P Parameter: Timepoint (hr) Value: 6
  misc_feature: MA Experiment 20000070 PARAMETER Experiment Name: At_100uM_ABA_Mutants_cDNA_P Parameter: Tissue Value: Aerial
  misc_feature: MA Experiment 20000070 PARAMETER Experiment Name: At_100uM_ABA_Mutants_cDNA_P Parameter: Treatment Value: 100uM ABA vs. No Treatment
  misc_feature: MA Experiment ID: 20000071 Result: Down-regulated in Transcription
  misc_feature: MA Experiment 20000071 PARAMETER Experiment Name: At_100uM_ABA_Mutants_cDNA_P Parameter: Plant Line Value: CS8104
  misc_feature: MA Experiment 20000071 PARAMETER Experiment Name: At_100uM_ABA_Mutants_cDNA_P Parameter: Timepoint (hr) Value: 6
  misc_feature: MA Experiment 20000071 PARAMETER Experiment Name: At_100uM_ABA_Mutants_cDNA_P Parameter: Tissue Value: Aerial
  misc_feature: MA Experiment 20000071 PARAMETER Experiment Name: At_100uM_ABA_Mutants_cDNA_P Parameter: Treatment Value: 100uM ABA vs. No Treatment
  misc_feature: MA Experiment ID: 20000087 Result: Down-regulated in Transcription
  misc_feature: MA Experiment 20000087 PARAMETER Experiment Name: At_100uM_ABA_Mutants_cDNA_P Parameter: Plant Line Value: WS
  misc_feature: MA Experiment 20000087 PARAMETER Experiment Name: At_100uM_ABA_Mutants_cDNA_P Parameter: Timepoint (hr) Value: 6
  misc_feature: MA Experiment 20000087 PARAMETER Experiment Name: At_100uM_ABA_Mutants_cDNA_P Parameter: Tissue Value: Aerial
  misc_feature: MA Experiment 20000087 PARAMETER Experiment Name: At_100uM_ABA_Mutants_cDNA_P Parameter: Treatment Value: 100uM ABA vs. No Treatment
  misc_feature: MA Experiment ID: 20000089 Result: Down-regulated in Transcription
  misc_feature: MA Experiment ID: 20000113 Result: Up-regulated in Transcription
  misc_feature: MA Experiment 20000113 PARAMETER Experiment Name: At_42deg_Heat_cDNA_P Parameter: Temperature (deg C) Value: 42 vs. 22
  misc_feature: MA Experiment 20000113 PARAMETER Experiment Name: At_42deg_Heat_cDNA_P Parameter: Timepoint (hr) Value: 8
  misc_feature: MA Experiment 20000113 PARAMETER Experiment Name: At_42deg_Heat_cDNA_P Parameter: Tissue Value: Aerial
  misc_feature: MA Experiment ID: 20000117 Result: Down-regulated in Transcription
  misc_feature: MA Experiment 20000117 PARAMETER Experiment Name: At_100uM_ABA_Mutants_cDNA_P Parameter: Plant Line Value: Columbia
  misc_feature: MA Experiment 20000117 PARAMETER Experiment Name: At_100uM_ABA_Mutants_cDNA_P Parameter: Timepoint (hr) Value: 6
  misc_feature: MA Experiment 20000117 PARAMETER Experiment Name: At_100uM_ABA_Mutants_cDNA_P Parameter: Tissue Value: Aerial
  misc_feature: MA Experiment 20000117 PARAMETER Experiment Name: At_100uM_ABA_Mutants_cDNA_P Parameter: Treatment Value: 100uM ABA vs. No Treatment
  misc_feature: MA Experiment ID: 20000185 Result: Down-regulated in Transcription
  misc_feature: MA Experiment 20000185 PARAMETER Experiment Name: At_Roots__P Parameter: Age (day) Value: 7 vs. 21
  misc_feature: MA Experiment 20000185 PARAMETER Experiment Name: At_Roots__P Parameter: Organism Value: A. thaliana
  misc_feature: MA Experiment 20000185 PARAMETER Experiment Name: At_Roots__P Parameter: Tissue Value: Roots vs. Whole Plant
  misc_feature: MA Experiment ID: 20000234 Result: Down-regulated in Transcription
  misc_feature: MA Experiment 20000234 PARAMETER Experiment Name: At_Siliques_P Parameter: Age (day) Value: 21
  misc_feature: MA Experiment 20000234 PARAMETER Experiment Name: At_Siliques_P Parameter: Organism Value: A. thaliana
  misc_feature: MA Experiment 20000234 PARAMETER Experiment Name: At_Siliques_P Parameter: Plant Line Value: WS
  misc_feature: MA Experiment 20000234 PARAMETER Experiment Name: At_Siliques_P Parameter: Tissue Value: Less Than 5mm Siliques vs. Whole Plant
  misc_feature: MA Experiment ID: 20000264 Result: Down-regulated in Transcription
  misc_feature: MA Experiment 20000264 PARAMETER Experiment Name: At_Open_Flower_P Parameter: Age (day) Value: 21
  misc_feature: MA Experiment 20000264 PARAMETER Experiment Name: At_Open_Flower_P Parameter: Plant Line Value: WS
  misc_feature: MA Experiment 20000264 PARAMETER Experiment Name: At_Open_Flower_P Parameter: Tissue Value: Open Flower vs. Whole Plant
  misc_feature: MA Experiment ID: 20000265 Result: Down-regulated in Transcription
  misc_feature: MA Experiment 20000265 PARAMETER Experiment Name: At_Open_Flower_P Parameter: Age (day) Value: 21
  misc_feature: MA Experiment 20000265 PARAMETER Experiment Name: At_Open_Flower_P Parameter: Plant Line Value: WS
  misc_feature: MA Experiment 20000265 PARAMETER Experiment Name: At_Open_Flower_P Parameter: Tissue Value: Closed Flower vs. Whole Plant
  misc_feature: MA Experiment ID: 20000268 Result: Down-regulated in Transcription
  misc_feature: MA Experiment 20000268 PARAMETER Experiment Name: At_100mM_NaCl__P Parameter: Age (day) Value: 14
  misc_feature: MA Experiment 20000268 PARAMETER Experiment Name: At_100mM_NaCl__P Parameter: Organism Value: A. thaliana
  misc_feature: MA Experiment 20000268 PARAMETER Experiment Name: At_100mM_NaCl__P Parameter: Plant Line Value: WS
  misc_feature: MA Experiment 20000268 PARAMETER Experiment Name: At_100mM_NaCl__P Parameter: Timepoint (hr) Value: 6
  misc_feature: MA Experiment 20000268 PARAMETER Experiment Name: At_100mM_NaCl__P Parameter: Tissue Value: Whole Plant
  misc_feature: MA Experiment 20000268 PARAMETER Experiment Name: At_100mM_NaCl__P Parameter: Treatment Value: 100mM NaCl vs. No Treatment
  misc_feature: MA Experiment ID: 20000286 Result: Down-regulated in Transcription
  misc_feature: MA Experiment 20000286 PARAMETER Experiment Name: At_Open_Flower_P Parameter: Age (day) Value: 21
  misc_feature: MA Experiment 20000286 PARAMETER Experiment Name: At_Open_Flower_P Parameter: Plant Line Value: WS
  misc_feature: MA Experiment 20000286 PARAMETER Experiment Name: At_Open_Flower_P Parameter: Tissue Value: Half Open vs. Whole Plant
  misc_feature: MA Experiment ID: 20000439 Result: Down-regulated in Transcription
  misc_feature: MA Experiment 20000439 PARAMETER Experiment Name: At_Roots__P Parameter: Age (day) Value: 14 vs. 21
  misc_feature: MA Experiment 20000439 PARAMETER Experiment Name: At_Roots__P Parameter: Organism Value: A. thaliana
  misc_feature: MA Experiment 20000439 PARAMETER Experiment Name: At_Roots__P Parameter: Tissue Value: Roots vs. Whole Plant
  misc_feature: MA Experiment ID: 20000460 Result: Up-regulated in Transcription
  misc_feature: MA Experiment 20000460 PARAMETER Experiment Name: At_10percent_PEG_P Parameter: Age (day) Value: 12
  misc_feature: MA Experiment 20000460 PARAMETER Experiment Name: At_10percent_PEG_P Parameter: Organism Value: A. thaliana
  misc_feature: MA Experiment 20000460 PARAMETER Experiment Name: At_10percent_PEG_P Parameter: Plant Line Value: WS
  misc_feature: MA Experiment 20000460 PARAMETER Experiment Name: At_10percent_PEG_P Parameter: Timepoint (day) Value: 12
  misc_feature: MA Experiment 20000460 PARAMETER Experiment Name: At_10percent_PEG_P Parameter: Tissue Value: Whole Plant
  misc_feature: MA Experiment 20000460 PARAMETER Experiment Name: At_10percent_PEG_P Parameter: Treatment Value: 10percent PEG vs. No Treatment
  misc_feature: MA Experiment ID: 20000527 Result: Up-regulated in Transcription
  misc_feature: MA Experiment 20000527 PARAMETER Experiment Name: At_10percent_PEG_P Parameter: Age (day) Value: 20
  misc_feature: MA Experiment 20000527 PARAMETER Experiment Name: At_10percent_PEG_P Parameter: Organism Value: A. thaliana
  misc_feature: MA Experiment 20000527 PARAMETER Experiment Name: At_10percent_PEG_P Parameter: Plant Line Value: WS
  misc_feature: MA Experiment 20000527 PARAMETER Experiment Name: At_10percent_PEG_P Parameter: Timepoint (day) Value: 20
  misc_feature: MA Experiment 20000527 PARAMETER Experiment Name: At_10percent_PEG_P Parameter: Tissue Value: Whole Plant
  misc_feature: MA Experiment 20000527 PARAMETER Experiment Name: At_10percent_PEG_P Parameter: Treatment Value: 10percent PEG vs. No Treatment
  misc_feature: MA Experiment ID: 20000573 Result: Down-regulated in Transcription
  misc_feature: MA Experiment 20000573 PARAMETER Experiment Name: At_100uM_ABA_Mutants__P Parameter: Organism Value: A. thaliana
  misc_feature: MA Experiment 20000573 PARAMETER Experiment Name: At_100uM_ABA_Mutants__P Parameter: Plant Line Value: CS22 vs. Ler wt
  misc_feature: MA Experiment 20000573 PARAMETER Experiment Name: At_100uM_ABA_Mutants__P Parameter: Timepoint (hr) Value: N/A
  misc_feature: MA Experiment 20000573 PARAMETER Experiment Name: At_100uM_ABA_Mutants__P Parameter: Tissue Value: Whole Plant
  misc_feature: MA Experiment 20000573 PARAMETER Experiment Name: At_100uM_ABA_Mutants__P Parameter: Treatment Value: None
  misc_feature: MA Experiment ID: 20000574 Result: Down-regulated in Transcription
  misc_feature: MA Experiment 20000574 PARAMETER Experiment Name: At_100uM_ABA_Mutants__P Parameter: Organism Value: A. thaliana
  misc_feature: MA Experiment 20000574 PARAMETER Experiment Name: At_100uM_ABA_Mutants__P Parameter: Plant Line Value: CS23 vs. Ler wt
  misc_feature: MA Experiment 20000574 PARAMETER Experiment Name: At_100uM_ABA_Mutants__P Parameter: Timepoint (hr) Value: N/A
  misc_feature: MA Experiment 20000574 PARAMETER Experiment Name: At_100uM_ABA_Mutants__P Parameter: Tissue Value: Whole Plant
  misc_feature: MA Experiment 20000574 PARAMETER Experiment Name: At_100uM_ABA_Mutants__P Parameter: Treatment Value: None
  misc_feature: MA Experiment ID: 20000794 Result: Down-regulated in Transcription
  misc_feature: MA Experiment 20000794 PARAMETER Experiment Name: At_Petals_P Parameter: Age (day) Value: 23-25 days
  misc_feature: MA Experiment 20000794 PARAMETER Experiment Name: At_Petals_P Parameter: Plant Line Value: WS
  misc_feature: MA Experiment 20000794 PARAMETER Experiment Name: At_Petals_P Parameter: Tissue Value: Petals vs. Whole plant
  misc_feature: MA Experiment ID: 20001247 Result: Up-regulated in Transcription
  misc_feature: MA Experiment 20001247 PARAMETER Experiment Name: At_Far-red-induction_P Parameter: Age (day) Value: 7
  misc_feature: MA Experiment 20001247 PARAMETER Experiment Name: At_Far-red-induction_P Parameter: Light Value: Far-red vs. White
  misc_feature: MA Experiment 20001247 PARAMETER Experiment Name: At_Far-red-induction_P Parameter: Organism Value: A. thaliana
  misc_feature: MA Experiment 20001247 PARAMETER Experiment Name: At_Far-red-induction_P Parameter: Plant Line Value: Columbia
  misc_feature: MA Experiment 20001247 PARAMETER Experiment Name: At_Far-red-induction_P Parameter: Timepoint (hr) Value: 1
  misc_feature: MA Experiment 20001247 PARAMETER Experiment Name: At_Far-red-induction_P Parameter: Tissue Value: Whole Plant
  misc_feature: MA Experiment ID: 20001248 Result: Down-regulated in Transcription
  misc_feature: MA Experiment 20001248 PARAMETER Experiment Name: At_Far-red-induction_P Parameter: Age (day) Value: 7
  misc_feature: MA Experiment 20001248 PARAMETER Experiment Name: At_Far-red-induction_P Parameter: Light Value: Far-red vs. White
  misc_feature: MA Experiment 20001248 PARAMETER Experiment Name: At_Far-red-induction_P Parameter: Organism Value: A. thaliana
  misc_feature: MA Experiment 20001248 PARAMETER Experiment Name: At_Far-red-induction_P Parameter: Plant Line Value: Columbia
  misc_feature: MA Experiment 20001248 PARAMETER Experiment Name: At_Far-red-induction_P Parameter: Timepoint (hr) Value: 4
  misc_feature: MA Experiment 20001248 PARAMETER Experiment Name: At_Far-red-induction_P Parameter: Tissue Value: Whole Plant
  misc_feature: MA Experiment ID: 20001557 Result: Up-regulated in Transcription
  misc_feature: MA Experiment 20001557 PARAMETER Experiment Name: At_Drought_Soil_Dry_P Parameter: Age (day) Value: 27
  misc_feature: MA Experiment 20001557 PARAMETER Experiment Name: At_Drought_Soil_Dry_P Parameter: Organism Value: A. thaliana
  misc_feature: MA Experiment 20001557 PARAMETER Experiment Name: At_Drought_Soil_Dry_P Parameter: Plant Line Value: WS
  misc_feature: MA Experiment 20001557 PARAMETER Experiment Name: At_Drought_Soil_Dry_P Parameter: Post Timepoint (hr) Value: 3
  misc_feature: MA Experiment 20001557 PARAMETER Experiment Name: At_Drought_Soil_Dry_P Parameter: Post-Treatment Value: Re-Water vs. No Drought
  misc_feature: MA Experiment 20001557 PARAMETER Experiment Name: At_Drought_Soil_Dry_P Parameter: Timepoint (day) Value: 13
  misc_feature: MA Experiment 20001557 PARAMETER Experiment Name: At_Drought_Soil_Dry_P Parameter: Treatment Value: Drought vs. No Drought
  misc_feature: MA Experiment ID: 20001558 Result: Up-regulated in Transcription
  misc_feature: MA Experiment 20001558 PARAMETER Experiment Name: At_Drought_Soil_Dry_P Parameter: Age (day) Value: 27
  misc_feature: MA Experiment 20001558 PARAMETER Experiment Name: At_Drought_Soil_Dry_P Parameter: Organism Value: A. thaliana
  misc_feature: MA Experiment 20001558 PARAMETER Experiment Name: At_Drought_Soil_Dry_P Parameter: Plant Line Value: WS
  misc_feature: MA Experiment 20001558 PARAMETER Experiment Name: At_Drought_Soil_Dry_P Parameter: Post Timepoint (hr) Value: 6
  misc_feature: MA Experiment 20001558 PARAMETER Experiment Name: At_Drought_Soil_Dry_P Parameter: Post-Treatment Value: Re-Water vs. No Drought
  misc_feature: MA Experiment 20001558 PARAMETER Experiment Name: At_Drought_Soil_Dry_P Parameter: Timepoint (day) Value: 13
  misc_feature: MA Experiment 20001558 PARAMETER Experiment Name: At_Drought_Soil_Dry_P Parameter: Treatment Value: Drought vs. No Drought
  misc_feature: MA Experiment ID: 20001560 Result: Up-regulated in Transcription
  misc_feature: MA Experiment 20001560 PARAMETER Experiment Name: At_Drought_Soil_Dry_P Parameter: Age (day) Value: 28
  misc_feature: MA Experiment 20001560 PARAMETER Experiment Name: At_Drought_Soil_Dry_P Parameter: Organism Value: A. thaliana
  misc_feature: MA Experiment 20001560 PARAMETER Experiment Name: At_Drought_Soil_Dry_P Parameter: Plant Line Value: WS
  misc_feature: MA Experiment 20001560 PARAMETER Experiment Name: At_Drought_Soil_Dry_P Parameter: Post Timepoint (hr) Value: None
  misc_feature: MA Experiment 20001560 PARAMETER Experiment Name: At_Drought_Soil_Dry_P Parameter: Post-Treatment Value: None
  misc_feature: MA Experiment 20001560 PARAMETER Experiment Name: At_Drought_Soil_Dry_P Parameter: Timepoint (day) Value: 14
  misc_feature: MA Experiment 20001560 PARAMETER Experiment Name: At_Drought_Soil_Dry_P Parameter: Treatment Value: Drought vs. No Drought
acactactctaaccgttttttttcttctctcaaatctcaaatctcaaaatctcaatttcttcaacaatgtcatcgaagaacggagttgttcgtagctgtttaggatcaatggacgacatcaaaaaagtcttccaacgattcgacaaaaacggcgacgggaaaatctccgtcgacgagctcaaagaagtgatccgcgctctctcaccaacagcatcaccagaagaaacagtaacgatgatgaaacaattcgatctagacggtaacggattcatagatctggacgaattcgtcgcgcttttccaaatcggaatcggaggaggaggtaataatcgaaacgacgtaagcgatttgaaagaagcgtttgagttatatgatttggatggtaatggaaggatctcggcgaaagagcttcattcagtgatgaagaatttgggtgagaagtgctctgttcaagattgtaagaagatgattagtaaagttgatattgatggtgatggttgcgttaattttgatgagtttaagaagatgatgagcaatggtggtggtgcatgaggatttggaagatttcgccggagattagattagtcgacggtgatgattcgtattagcagattaattttagtgacggcgattaaaaaccctagaagtatgtggtgattgatgaatattgattttaactatataaggttgtttctatatcttctgctctttttataattaatatgctttgttgagtgtt

SEQ ID NO: 35900 - protein, 161 aa, Arabidopsis thaliana
  peptide (1)..(161): Ceres Seq. ID no. 12394078
  misc_feature (130)..(158): Pfam Name: EF hand Pfam Description: EF hand
  misc_feature (1)..(158): Homolog of NCBI NO: 15221781 NR Description: putative calmodulin; protein id: At1g24620.1
  misc_feature (16)..(160): Homolog of NCBI NO: 14423648 NR Description: Calcium-binding allergen Ole e 8 (PCA18/PCA23)
  misc_feature (16)..(160): Homolog of NCBI NO: 6901654 NR Description: calcium-binding protein [Olea europaea]
  misc_feature (1)..(161): Homolog of NCBI NO: 34895640 NR Description: OSJNBa0083M16.33 [Oryza sativa (japonica
  misc_feature (18)..(156): Homolog of NCBI NO: 15237969 NR Description: calmodulin-like protein; protein id: At5g17470.1
  misc_feature (20)..(156): Homolog of NCBI NO: 13397927 NR Description: putative calmodulin-related protein [Medicago
  misc_feature (15)..(157): Homolog of NCBI NO: 14589311 NR Description: calcium binding protein [Sesbania rostrata]
  misc_feature (3)..(161): Homolog of NCBI NO: 18408502 NR Description: calmodulin-related protein
  misc_feature (3)..(161): Homolog of NCBI NO: 21618074 NR Description: calmodulin-related protein [Arabidopsis thaliana]
  misc_feature (1)..(161): Homolog of NCBI NO: 15240340 NR Description: CALMODULIN-RELATED PROTEIN 2, TOUCH-INDUCED (TCH2)
MSSKNGVVRSCLGSMDDIKKVFQRFDKNGDGKISVDELKEVIRALSPTASPEETVTMMKQFDLDGNGFIDLDEFVALFQIGIGGGGNNRNDVSDLKEAFELYDLDGNGRISAKELHSVMKNLGEKCSVQDCKKMISKVDIDGDGCVNFDEFKKMMSNGGGA

SEQ ID NO: 35901 - protein, 147 aa, Arabidopsis thaliana
  peptide (1)..(147): Ceres Seq. ID no. 12394079
  misc_feature (116)..(144): Pfam Name: EF hand Pfam Description: EF hand
  misc_feature (1)..(144): Homolog of NCBI NO: 15221781 NR Description: putative calmodulin; protein id: At1g24620.1
  misc_feature (2)..(146): Homolog of NCBI NO: 14423648 NR Description: Calcium-binding allergen Ole e 8 (PCA18/PCA23)
  misc_feature (2)..(146): Homolog of NCBI NO: 6901654 NR Description: calcium-binding protein [Olea europaea]
  misc_feature (1)..(147): Homolog of NCBI NO: 34895640 NR Description: OSJNBa0083M16.33 [Oryza sativa (japonica
  misc_feature (4)..(142): Homolog of NCBI NO: 15237969 NR Description: calmodulin-like protein; protein id: At5g17470.1
  misc_feature (6)..(142): Homolog of NCBI NO: 13397927 NR Description: putative calmodulin-related protein [Medicago
  misc_feature (1)..(143): Homolog of NCBI NO: 14589311 NR Description: calcium binding protein [Sesbania rostrata]
  misc_feature (1)..(147): Homolog of NCBI NO: 18408502 NR Description: calmodulin-related protein
  misc_feature (1)..(147): Homolog of NCBI NO: 21618074 NR Description: calmodulin-related protein [Arabidopsis thaliana]
  misc_feature (1)..(147): Homolog of NCBI NO: 15240340 NR Description: CALMODULIN-RELATED PROTEIN 2, TOUCH-INDUCED (TCH2)
MDDIKKVFQRFDKNGDGKISVDELKEVIRALSPTASPEETVTMMKQFDLDGNGFIDLDEFVALFQIGIGGGGNNRNDVSDLKEAFELYDLDGNGRISAKELHSVMKNLGEKCSVQDCKKMISKVDIDGDGCVNFDEFKKMMSNGGGA

SEQ ID NO: 35902 - protein, 105 aa, Arabidopsis thaliana
  peptide (1)..(105): Ceres Seq. ID no. 12394080
  misc_feature (74)..(102): Pfam Name: EF hand Pfam Description: EF hand
  misc_feature (1)..(102): Homolog of NCBI NO: 15221781 NR Description: putative calmodulin; protein id: At1g24620.1
  misc_feature (1)..(104): Homolog of NCBI NO: 14423648 NR Description: Calcium-binding allergen Ole e 8 (PCA18/PCA23)
  misc_feature (1)..(104): Homolog of NCBI NO: 6901654 NR Description: calcium-binding protein [Olea europaea]
  misc_feature (1)..(105): Homolog of NCBI NO: 34895640 NR Description: OSJNBa0083M16.33 [Oryza sativa (japonica
  misc_feature (1)..(100): Homolog of NCBI NO: 15237969 NR Description: calmodulin-like protein; protein id: At5g17470.1
  misc_feature (1)..(100): Homolog of NCBI NO: 13397927 NR Description: putative calmodulin-related protein [Medicago
  misc_feature (1)..(101): Homolog of NCBI NO: 14589311 NR Description: calcium binding protein [Sesbania rostrata]
  misc_feature (1)..(105): Homolog of NCBI NO: 18408502 NR Description: calmodulin-related protein
  misc_feature (1)..(105): Homolog of NCBI NO: 21618074 NR Description: calmodulin-related protein [Arabidopsis thaliana]
  misc_feature (1)..(105): Homolog of NCBI NO: 15240340 NR Description: CALMODULIN-RELATED PROTEIN 2, TOUCH-INDUCED (TCH2)
MMKQFDLDGNGFIDLDEFVALFQIGIGGGGNNRNDVSDLKEAFELYDLDGNGRISAKELHSVMKNLGEKCSVQDCKKMISKVDIDGDGCVNFDEFKKMMSNGGGA

SEQ ID NO: 35903 - DNA, 1434 bp, Arabidopsis thaliana
  misc_feature (1)..(1434): Ceres Seq. ID no. 12421633
  misc_feature: MA Experiment ID: 108434 Result: Down-regulated in Transcription
  misc_feature: MA Experiment 108434 PARAMETER Experiment Name: At_Root_Tips_cDNA_P Parameter: Tissue Value: Root Tips
  misc_feature: MA Experiment ID: 108464 Result: Up-regulated in Transcription
  misc_feature: MA Experiment 108464 PARAMETER Experiment Name: At_Germinating_Seeds_cDNA_P Parameter: Age (day) Value: 4 vs. 0
  misc_feature: MA Experiment 108464 PARAMETER Experiment Name: At_Germinating_Seeds_cDNA_P Parameter: Tissue Value: Germinating Seeds
  misc_feature: MA Experiment ID: 108488 Result: Up-regulated in Transcription
  misc_feature: MA Experiment ID: 108605 Result: Up-regulated in Transcription
  misc_feature: MA Experiment 108605 PARAMETER Experiment Name: At_100uM_ABA_cDNA_P Parameter: Timepoint (hr) Value: 6
  misc_feature: MA Experiment 108605 PARAMETER Experiment Name: At_100uM_ABA_cDNA_P Parameter: Tissue Value: Aerial
  misc_feature: MA Experiment 108605 PARAMETER Experiment Name: At_100uM_ABA_cDNA_P Parameter: Treatment Value: 100uM ABA vs. No Treatment
  misc_feature: MA Experiment ID: 108607 Result: Up-regulated in Transcription
  misc_feature: MA Experiment 108607 PARAMETER Experiment Name: At_100uM_ABA_cDNA_P Parameter: Timepoint (hr) Value: 4
  misc_feature: MA Experiment 108607 PARAMETER Experiment Name: At_100uM_ABA_cDNA_P Parameter: Tissue Value: Aerial
  misc_feature: MA Experiment 108607 PARAMETER Experiment Name: At_100uM_ABA_cDNA_P Parameter: Treatment Value: 100uM ABA vs. No Treatment
  misc_feature: MA Experiment ID: 108609 Result: Up-regulated in Transcription
  misc_feature: MA Experiment 108609 PARAMETER Experiment Name: At_100uM_ABA_cDNA_P Parameter: Timepoint (hr) Value: 24
  misc_feature: MA Experiment 108609 PARAMETER Experiment Name: At_100uM_ABA_cDNA_P Parameter: Tissue Value: Aerial
  misc_feature: MA Experiment 108609 PARAMETER Experiment Name: At_100uM_ABA_cDNA_P Parameter: Treatment Value: 100uM ABA vs. No Treatment
  misc_feature: MA Experiment ID: 20000090 Result: Down-regulated in Transcription
  misc_feature: MA Experiment ID: 20000184 Result: Down-regulated in Transcription
  misc_feature: MA Experiment 20000184 PARAMETER Experiment Name: At_Shoots__P Parameter: Age (day) Value: 7
  misc_feature: MA Experiment 20000184 PARAMETER Experiment Name: At_Shoots__P Parameter: Tissue Value: Shoots vs. Whole Plant
  misc_feature: MA Experiment ID: 20000224 Result: Up-regulated in Transcription
  misc_feature: MA Experiment ID: 20000227 Result: Up-regulated in Transcription
  misc_feature: MA Experiment 20000227 PARAMETER Experiment Name: At_Root-Tips-vs-Tops_P Parameter: Tissue Value: Root Tips vs. Root Tops
  misc_feature: MA Experiment ID: 20000264 Result: Down-regulated in Transcription
  misc_feature: MA Experiment 20000264 PARAMETER Experiment Name: At_Open_Flower_P Parameter: Age (day) Value: 21
  misc_feature: MA Experiment 20000264 PARAMETER Experiment Name: At_Open_Flower_P Parameter: Plant Line Value: WS
  misc_feature: MA Experiment 20000264 PARAMETER Experiment Name: At_Open_Flower_P Parameter: Tissue Value: Open Flower vs. Whole Plant
  misc_feature: MA Experiment ID: 20000265 Result: Down-regulated in Transcription
  misc_feature: MA Experiment 20000265 PARAMETER Experiment Name: At_Open_Flower_P Parameter: Age (day) Value: 21
  misc_feature: MA Experiment 20000265 PARAMETER Experiment Name: At_Open_Flower_P Parameter: Plant Line Value: WS
  misc_feature: MA Experiment 20000265 PARAMETER Experiment Name: At_Open_Flower_P Parameter: Tissue Value: Closed Flower vs. Whole Plant
  misc_feature: MA Experiment ID: 20000286 Result: Down-regulated in Transcription
  misc_feature: MA Experiment 20000286 PARAMETER Experiment Name: At_Open_Flower_P Parameter: Age (day) Value: 21
  misc_feature: MA Experiment 20000286 PARAMETER Experiment Name: At_Open_Flower_P Parameter: Plant Line Value: WS
  misc_feature: MA Experiment 20000286 PARAMETER Experiment Name: At_Open_Flower_P Parameter: Tissue Value: Half Open vs. Whole Plant
  misc_feature: MA Experiment ID: 20000453 Result: Up-regulated in Transcription
  misc_feature: MA Experiment 20000453 PARAMETER Experiment Name: At_100uM_ABA_P Parameter: Age (day) Value: 15
  misc_feature: MA Experiment 20000453 PARAMETER Experiment Name: At_100uM_ABA_P Parameter: Organism Value: A. thaliana
  misc_feature: MA Experiment 20000453 PARAMETER Experiment Name: At_100uM_ABA_P Parameter: Plant Line Value: WS
  misc_feature: MA Experiment 20000453 PARAMETER Experiment Name: At_100uM_ABA_P Parameter: Timepoint (hr) Value: 24
  misc_feature: MA Experiment 20000453 PARAMETER Experiment Name: At_100uM_ABA_P Parameter: Tissue Value: Aerial
  misc_feature: MA Experiment 20000453 PARAMETER Experiment Name: At_100uM_ABA_P Parameter: Treatment Value: 100uM ABA vs. No Treatment
  misc_feature: MA Experiment ID: 20000573 Result: Up-regulated in Transcription
  misc_feature: MA Experiment 20000573 PARAMETER Experiment Name: At_100uM_ABA_Mutants__P Parameter: Organism Value: A. thaliana
  misc_feature: MA Experiment 20000573 PARAMETER Experiment Name: At_100uM_ABA_Mutants__P Parameter: Plant Line Value: CS22 vs. Ler wt
  misc_feature: MA Experiment 20000573 PARAMETER Experiment Name: At_100uM_ABA_Mutants__P Parameter: Timepoint (hr) Value: N/A
  misc_feature: MA Experiment 20000573 PARAMETER Experiment Name: At_100uM_ABA_Mutants__P Parameter: Tissue Value: Whole Plant
  misc_feature: MA Experiment 20000573 PARAMETER Experiment Name: At_100uM_ABA_Mutants__P Parameter: Treatment Value: None
  misc_feature: MA Experiment ID: 20000574 Result: Up-regulated in Transcription
  misc_feature: MA Experiment 20000574 PARAMETER Experiment Name: At_100uM_ABA_Mutants__P Parameter: Organism Value: A. thaliana
  misc_feature: MA Experiment 20000574 PARAMETER Experiment Name: At_100uM_ABA_Mutants__P Parameter: Plant Line Value: CS23 vs. Ler wt
  misc_feature: MA Experiment 20000574 PARAMETER Experiment Name: At_100uM_ABA_Mutants__P Parameter: Timepoint (hr) Value: N/A
  misc_feature: MA Experiment 20000574 PARAMETER Experiment Name: At_100uM_ABA_Mutants__P Parameter: Tissue Value: Whole Plant
  misc_feature: MA Experiment 20000574 PARAMETER Experiment Name: At_100uM_ABA_Mutants__P Parameter: Treatment Value: None
  misc_feature: MA Experiment ID: 20001247 Result: Up-regulated in Transcription
  misc_feature: MA Experiment 20001247 PARAMETER Experiment Name: At_Far-red-induction_P Parameter: Age (day) Value: 7
  misc_feature: MA Experiment 20001247 PARAMETER Experiment Name: At_Far-red-induction_P Parameter: Light Value: Far-red vs. White
  misc_feature: MA Experiment 20001247 PARAMETER Experiment Name: At_Far-red-induction_P Parameter: Organism Value: A. thaliana
  misc_feature: MA Experiment 20001247 PARAMETER Experiment Name: At_Far-red-induction_P Parameter: Plant Line Value: Columbia
  misc_feature: MA Experiment 20001247 PARAMETER Experiment Name: At_Far-red-induction_P Parameter: Timepoint (hr) Value: 1
  misc_feature: MA Experiment 20001247 PARAMETER Experiment Name: At_Far-red-induction_P Parameter: Tissue Value: Whole Plant
  misc_feature: MA Experiment ID: 20001451 Result: Up-regulated in Transcription
  misc_feature: MA Experiment 20001451 PARAMETER Experiment Name: At_Far-red-induction_P Parameter: Age (day) Value: 7
  misc_feature: MA Experiment 20001451 PARAMETER Experiment Name: At_Far-red-induction_P Parameter: Light Value: Far-red vs. White
  misc_feature: MA Experiment 20001451 PARAMETER Experiment Name: At_Far-red-induction_P Parameter: Organism Value: A. thaliana
  misc_feature: MA Experiment 20001451 PARAMETER Experiment Name: At_Far-red-induction_P Parameter: Plant Line Value: Columbia
  misc_feature: MA Experiment 20001451 PARAMETER Experiment Name: At_Far-red-induction_P Parameter: Timepoint (hr) Value: 24
  misc_feature: MA Experiment 20001451 PARAMETER Experiment Name: At_Far-red-induction_P Parameter: Tissue Value: Whole Plant
  misc_feature: MA Experiment ID: 20001556 Result: Down-regulated in Transcription
  misc_feature: MA Experiment 20001556 PARAMETER Experiment Name: At_Drought_Soil_Dry_P Parameter: Age (day) Value: 26
  misc_feature: MA Experiment 20001556 PARAMETER Experiment Name: At_Drought_Soil_Dry_P Parameter: Organism Value: A. thaliana
  misc_feature: MA Experiment 20001556 PARAMETER Experiment Name: At_Drought_Soil_Dry_P Parameter: Plant Line Value: WS
  misc_feature: MA Experiment 20001556 PARAMETER Experiment Name: At_Drought_Soil_Dry_P Parameter: Post Timepoint (hr) Value: None
  misc_feature: MA Experiment 20001556 PARAMETER Experiment Name: At_Drought_Soil_Dry_P Parameter: Post-Treatment Value: None
  misc_feature: MA Experiment 20001556 PARAMETER Experiment Name: At_Drought_Soil_Dry_P Parameter: Timepoint (day) Value: 12
  misc_feature: MA Experiment 20001556 PARAMETER Experiment Name: At_Drought_Soil_Dry_P Parameter: Treatment Value: Drought vs. No Drought
  misc_feature: MA Experiment ID: 20001558 Result: Up-regulated in Transcription
  misc_feature: MA Experiment 20001558 PARAMETER Experiment Name: At_Drought_Soil_Dry_P Parameter: Age (day) Value: 27
  misc_feature: MA Experiment 20001558 PARAMETER Experiment Name: At_Drought_Soil_Dry_P Parameter: Organism Value: A. thaliana
  misc_feature: MA Experiment 20001558 PARAMETER Experiment Name: At_Drought_Soil_Dry_P Parameter: Plant Line Value: WS
  misc_feature: MA Experiment 20001558 PARAMETER Experiment Name: At_Drought_Soil_Dry_P Parameter: Post Timepoint (hr) Value: 6
  misc_feature: MA Experiment 20001558 PARAMETER Experiment Name: At_Drought_Soil_Dry_P Parameter: Post-Treatment Value: Re-Water vs. No Drought
  misc_feature: MA Experiment 20001558 PARAMETER Experiment Name: At_Drought_Soil_Dry_P Parameter: Timepoint (day) Value: 13
  misc_feature: MA Experiment 20001558 PARAMETER Experiment Name: At_Drought_Soil_Dry_P Parameter: Treatment Value: Drought vs. No Drought
  misc_feature: MA Experiment ID: 20001560 Result: Up-regulated in Transcription
  misc_feature: MA Experiment 20001560 PARAMETER Experiment Name: At_Drought_Soil_Dry_P Parameter: Age (day) Value: 28
  misc_feature: MA Experiment 20001560 PARAMETER Experiment Name: At_Drought_Soil_Dry_P Parameter: Organism Value: A. thaliana
  misc_feature: MA Experiment 20001560 PARAMETER Experiment Name: At_Drought_Soil_Dry_P Parameter: Plant Line Value: WS
  misc_feature: MA Experiment 20001560 PARAMETER Experiment Name: At_Drought_Soil_Dry_P Parameter: Post Timepoint (hr) Value: None
  misc_feature: MA Experiment 20001560 PARAMETER Experiment Name: At_Drought_Soil_Dry_P Parameter: Post-Treatment Value: None
  misc_feature: MA Experiment 20001560 PARAMETER Experiment Name: At_Drought_Soil_Dry_P Parameter: Timepoint (day) Value: 14
  misc_feature: MA Experiment 20001560 PARAMETER Experiment Name: At_Drought_Soil_Dry_P Parameter: Treatment Value: Drought vs. No Drought
  misc_feature: MA Experiment ID: 20001905 Result: Down-regulated in Transcription
  misc_feature: MA Experiment 20001905 PARAMETER Experiment Name: At_Drought_Reproduction_P Parameter: Age (day) Value: 40
  misc_feature: MA Experiment 20001905 PARAMETER Experiment Name: At_Drought_Reproduction_P Parameter: Organism Value: A. thaliana
  misc_feature: MA Experiment 20001905 PARAMETER Experiment Name: At_Drought_Reproduction_P Parameter: Plant Line Value: WS
  misc_feature: MA Experiment 20001905 PARAMETER Experiment Name: At_Drought_Reproduction_P Parameter: Timepoint (day) Value: 10
  misc_feature: MA Experiment 20001905 PARAMETER Experiment Name: At_Drought_Reproduction_P Parameter: Tissue Value: Rosettes
  misc_feature: MA Experiment 20001905 PARAMETER Experiment Name: At_Drought_Reproduction_P Parameter: Treatment Value: Drought vs. No Drought
  misc_feature: MA Experiment ID: 20001906 Result: Down-regulated in Transcription
  misc_feature: MA Experiment 20001906 PARAMETER Experiment Name: At_Drought_Reproduction_P Parameter: Age (day) Value: 35
  misc_feature: MA Experiment 20001906 PARAMETER Experiment Name: At_Drought_Reproduction_P Parameter: Organism Value: A. thaliana
  misc_feature: MA Experiment 20001906 PARAMETER Experiment Name: At_Drought_Reproduction_P Parameter: Plant Line Value: WS
  misc_feature: MA Experiment 20001906 PARAMETER Experiment Name: At_Drought_Reproduction_P Parameter: Timepoint (day) Value: 5
  misc_feature: MA Experiment 20001906 PARAMETER Experiment Name: At_Drought_Reproduction_P Parameter: Tissue Value: Siliques
  misc_feature: MA Experiment 20001906 PARAMETER Experiment Name: At_Drought_Reproduction_P Parameter: Treatment Value: Drought vs. No Drought
atataaactcgaatccatcacaaagcctattcaagttaagagaaaagaaaaaaaaaaaccgttcttggaagatgggtttcaaactcaactctcttttccttcttctttcgcttctcatactcacaatcttgtccggagccgaccaagccttggcttacgtcaagaaaccacatgtgagccaacgcaacaaaacggcgttagcagccgtcgccggaagaggaggaggaaaagagatgttgaaagggaggaagcagacgagtggttgtaacttgtttcaagggagatgggttttcgatgcttcttaccctttctacgattcatccacgtgccctttcatcgacggtgagttcgactgtctcaaattcggccgaccagacaaacagttccttaagtactcttggcagcctgattcatgcaccgtcccaaggtttgatggggaagcgtttttgaagaaatggagagggaaacgagtgatgttcgtgggtgactcactgagtctaaacatgtgggaatcgttggcatgtatgatacattcgtcggttccaaacactaagaccacttttctcaagcgaaccccactctcctctctcactttccaggaatatgacgtcacactattcctataccgaacaccatacctagtggacatctccaaagaaagtgtcgggcgtgtgcttaaccttggagccattgaagatggagctgatgcttggaaaaatatggacctcctcgtcttcaattcttggcactggtggactcacacaggagtacagtctcaagggtgggattttataagagatgggtcttcactgatgagagacatggaccgccttgatgctttcaacaaaggactcaccacttggggtcaatgggttgatcaaaatgttaatgtttcgcaaacccgagtcttcttccaaggcatttctcccactcactacatgggaagggaatggaacgagccgaggaaaacttgcaacgggcagatgcaaccgttgaccggatcaacatacccaggtggttcacttcctgcagcaagcattgtgtctcgagtattaagcacgatgagaacgcccgtttacttactcgacatcacaactctatctcaactgagaaaagatgctcatccatctacatatggaggcgatggcggaacggattgcagtcactggtgccttcctggcttgccggatacttggaaccagcttctctatgcagctctttcgatgtgaaagcttgactcaatacacacttgcatgtatattacattcttggcagtccaaaggggaaaaaaagaagaagaaacgactgacattttacttggagagaatttgaagattagaaagagtatatgacgataaagttgtaaagtgttttatattctttactcttgggtggttacaaatcataatctaatcgacttcgattgtgattacc

SEQ ID NO: 35904 - protein, 408 aa, Arabidopsis thaliana
  peptide (1)..(408): Ceres Seq. ID no. 12421634
  misc_feature (197)..(407): Homolog of NCBI NO: 34904010 NR Description: unnamed protein product [Oryza sativa (japonica
  misc_feature (88)..(407): Homolog of NCBI NO: 28393769 NR Description: unknown protein [Arabidopsis thaliana]
  misc_feature (88)..(407): Homolog of NCBI NO: 21593142 NR Description: unknown [Arabidopsis thaliana]
  misc_feature (82)..(406): Homolog of NCBI NO: 18406003 NR Description: expressed protein
  misc_feature (23)..(406): Homolog of NCBI NO: 34911864 NR Description: OSJNBb0032K15.9 [Oryza sativa (japonica
  misc_feature (32)..(408): Homolog of NCBI NO: 25366741 NR Description: F28N24.24 protein - Arabidopsis thaliana
  misc_feature (24)..(178): Homolog of NCBI NO: 25408325 NR Description: hypothetical protein At2g34070 [imported] -
  misc_feature (247)..(408): Homolog of NCBI NO: 25408325 NR Description: hypothetical protein At2g34070 [imported] -
  misc_feature (24)..(408): Homolog of NCBI NO: 18396930 NR Description: expressed protein
  misc_feature (24)..(408): Homolog of NCBI NO: 18403435 NR Description: expressed protein
INSNPSQSLFKLREKKKKNRSWKMGFKLNSLFLLLSLLILTILSGADQALAYVKKPHVSQRNKTALAAVAGRGGGKEMLKGRKQTSGCNLFQGRWVFDASYPFYDSSTCPFIDGEFDCLKFGRPDKQFLKYSWQPDSCTVPRFDGEAFLKKWRGKRVMFVGDSLSLNMWESLACMIHSSVPNTKTTFLKRTPLSSLTFQEYDVTLFLYRTPYLVDISKESVGRVLNLGAIEDGADAWKNMDLLVFNSWHWWTHTGVQSQGWDFIRDGSSLMRDMDRLDAFNKGLTTWGQWVDQNVNVSQTRVFFQGISPTHYMGREWNEPRKTCNGQMQPLTGSTYPGGSLPAASIVSRVLSTMRTPVYLLDITTLSQLRKDAHPSTYGGDGGTDCSHWCLPGLPDTWNQLLYAALSM

SEQ ID NO: 35905 - protein, 385 aa, Arabidopsis thaliana
  peptide (1)..(385): Ceres Seq. ID no. 12421635
  misc_feature (174)..(384): Homolog of NCBI NO: 34904010 NR Description: unnamed protein product [Oryza sativa (japonica
  misc_feature (65)..(384): Homolog of NCBI NO: 28393769 NR Description: unknown protein [Arabidopsis thaliana]
  misc_feature (65)..(384): Homolog of NCBI NO: 21593142 NR Description: unknown [Arabidopsis thaliana]
  misc_feature (59)..(383): Homolog of NCBI NO: 18406003 NR Description: expressed protein
  misc_feature (1)..(383): Homolog of NCBI NO: 34911864 NR Description: OSJNBb0032K15.9 [Oryza sativa (japonica
  misc_feature (9)..(385): Homolog of NCBI NO: 25366741 NR Description: F28N24.24 protein - Arabidopsis thaliana
  misc_feature (1)..(155): Homolog of NCBI NO: 25408325 NR Description: hypothetical protein At2g34070 [imported] -
  misc_feature (224)..(385): Homolog of NCBI NO: 25408325 NR Description: hypothetical protein At2g34070 [imported] -
  misc_feature (1)..(385): Homolog of NCBI NO: 18396930 NR Description: expressed protein
  misc_feature (1)..(385): Homolog of NCBI NO: 18403435 NR Description: expressed protein
MGFKLNSLFLLLSLLILTILSGADQALAYVKKPHVSQRNKTALAAVAGRGGGKEMLKGRKQTSGCNLFQGRWVFDASYPFYDSSTCPFIDGEFDCLKFGRPDKQFLKYSWQPDSCTVPRFDGEAFLKKWRGKRVMFVGDSLSLNMWESLACMIHSSVPNTKTTFLKRTPLSSLTFQEYDVTLFLYRTPYLVDISKESVGRVLNLGAIEDGADAWKNMDLLVFNSWHWWTHTGVQSQGWDFIRDGSSLMRDMDRLDAFNKGLTTWGQWVDQNVNVSQTRVFFQGISPTHYMGREWNEPRKTCNGQMQPLTGSTYPGGSLPAASIVSRVLSTMRTPVYLLDITTLSQLRKDAHPSTYGGDGGTDCSHWCLPGLPDTWNQLLYAALSM

SEQ ID NO: 35906 - protein, 331 aa, Arabidopsis thaliana
  peptide (1)..(331): Ceres Seq. ID no. 12421636
  misc_feature (120)..(330): Homolog of NCBI NO: 34904010 NR Description: unnamed protein product [Oryza sativa (japonica
  misc_feature (11)..(330): Homolog of NCBI NO: 28393769 NR Description: unknown protein [Arabidopsis thaliana]
  misc_feature (11)..(330): Homolog of NCBI NO: 21593142 NR Description: unknown [Arabidopsis thaliana]
  misc_feature (5)..(329): Homolog of NCBI NO: 18406003 NR Description: expressed protein
  misc_feature (1)..(329): Homolog of NCBI NO: 34911864 NR Description: OSJNBb0032K15.9 [Oryza sativa (japonica
  misc_feature (1)..(331): Homolog of NCBI NO: 25366741 NR Description: F28N24.24 protein - Arabidopsis thaliana
  misc_feature (1)..(101): Homolog of NCBI NO: 25408325 NR Description: hypothetical protein At2g34070 [imported] -
  misc_feature (170)..(331): Homolog of NCBI NO: 25408325 NR Description: hypothetical protein At2g34070 [imported] -
  misc_feature (1)..(331): Homolog of NCBI NO: 18396930 NR Description: expressed protein
  misc_feature (1)..(331): Homolog of NCBI NO: 18403435 NR Description: expressed protein
MLKGRKQTSGCNLFQGRWVFDASYPFYDSSTCPFIDGEFDCLKFGRPDKQFLKYSWQPDSCTVPRFDGEAFLKKWRGKRVMFVGDSLSLNMWESLACMIHSSVPNTKTTFLKRTPLSSLTFQEYDVTLFLYRTPYLVDISKESVGRVLNLGAIEDGADAWKNMDLLVFNSWHWWTHTGVQSQGWDFIRDGSSLMRDMDRLDAFNKGLTTWGQWVDQNVNVSQTRVFFQGISPTHYMGREWNEPRKTCNGQMQPLTGSTYPGGSLPAASIVSRVLSTMRTPVYLLDITTLSQLRKDAHPSTYGGDGGTDCSHWCLPGLPDTWNQLLYAALSM

SEQ ID NO: 35907 - DNA, 1460 bp, Arabidopsis thaliana
  misc_feature (1)..(1460): Ceres Seq. ID no. 12370574
  misc_feature: MA Experiment ID: 108461 Result: Down-regulated in Transcription
  misc_feature: MA Experiment 108461 PARAMETER Experiment Name: At_Germinating_Seeds_cDNA_P Parameter: Age (day) Value: 1 vs. 0
  misc_feature: MA Experiment 108461 PARAMETER Experiment Name: At_Germinating_Seeds_cDNA_P Parameter: Tissue Value: Germinating Seeds
  misc_feature: MA Experiment ID: 108462 Result: Down-regulated in Transcription
  misc_feature: MA Experiment 108462 PARAMETER Experiment Name: At_Germinating_Seeds_cDNA_P Parameter: Age (day) Value: 2 vs. 0
  misc_feature: MA Experiment 108462 PARAMETER Experiment Name: At_Germinating_Seeds_cDNA_P Parameter: Tissue Value: Germinating Seeds
  misc_feature: MA Experiment ID: 108463 Result: Down-regulated in Transcription
  misc_feature: MA Experiment 108463 PARAMETER Experiment Name: At_Germinating_Seeds_cDNA_P Parameter: Age (day) Value: 3 vs. 0
  misc_feature: MA Experiment 108463 PARAMETER Experiment Name: At_Germinating_Seeds_cDNA_P Parameter: Tissue Value: Germinating Seeds
  misc_feature: MA Experiment ID: 108464 Result: Down-regulated in Transcription
  misc_feature: MA Experiment 108464 PARAMETER Experiment Name: At_Germinating_Seeds_cDNA_P Parameter: Age (day) Value: 4 vs. 0
  misc_feature: MA Experiment 108464 PARAMETER Experiment Name: At_Germinating_Seeds_cDNA_P Parameter: Tissue Value: Germinating Seeds
  misc_feature: MA Experiment ID: 108474 Result: Down-regulated in Transcription
  misc_feature: MA Experiment 108474 PARAMETER Experiment Name: At_Drought_Flowers_cDNA_P Parameter: Timepoint (hr) Value: null
  misc_feature: MA Experiment 108474 PARAMETER Experiment Name: At_Drought_Flowers_cDNA_P Parameter: Treatment Value: Drought vs. No Drought
  misc_feature: MA Experiment ID: 108561 Result: Down-regulated in Transcription
  misc_feature: MA Experiment 108561 PARAMETER Experiment Name: At_100uM_ABA_cDNA_P Parameter: Timepoint (hr) Value: 6
  misc_feature: MA Experiment 108561 PARAMETER Experiment Name: At_100uM_ABA_cDNA_P Parameter: Tissue Value: Aerial
  misc_feature: MA Experiment 108561 PARAMETER Experiment Name: At_100uM_ABA_cDNA_P Parameter: Treatment Value: 100uM ABA vs. No Treatment
  misc_feature: MA Experiment ID: 108569 Result: Up-regulated in Transcription
  misc_feature: MA Experiment 108569 PARAMETER Experiment Name: At_0.001%_MeJA__cDNA_P Parameter: Timepoint (hr) Value: 6
  misc_feature: MA Experiment 108569 PARAMETER Experiment Name: At_0.001%_MeJA__cDNA_P Parameter: Tissue Value: Aerial
  misc_feature: MA Experiment 108569 PARAMETER Experiment Name: At_0.001%_MeJA__cDNA_P Parameter: Treatment Value: 0.001% MeJA vs. No Treatment
  misc_feature: MA Experiment ID: 108572 Result: Down-regulated in Transcription
  misc_feature: MA Experiment 108572 PARAMETER Experiment Name: At_Drought_cDNA_P Parameter: Timepoint (hr) Value: 1
  misc_feature: MA Experiment 108572 PARAMETER Experiment Name: At_Drought_cDNA_P Parameter: Tissue Value: Aerial
  misc_feature: MA Experiment 108572 PARAMETER Experiment Name: At_Drought_cDNA_P Parameter: Treatment Value: Drought vs. No Drought
  misc_feature: MA Experiment ID: 108576 Result: Down-regulated in Transcription
  misc_feature: MA Experiment 108576 PARAMETER Experiment Name: At_42deg_Heat_cDNA_P Parameter: Temperature (deg C) Value: 42 vs. 22
  misc_feature: MA Experiment 108576 PARAMETER Experiment Name: At_42deg_Heat_cDNA_P Parameter: Timepoint (hr) Value: 1
  misc_feature: MA Experiment 108576 PARAMETER Experiment Name: At_42deg_Heat_cDNA_P Parameter: Tissue Value: Aerial
  misc_feature: MA Experiment ID: 108577 Result: Down-regulated in Transcription
  misc_feature: MA Experiment 108577 PARAMETER Experiment Name: At_42deg_Heat_cDNA_P Parameter: Temperature (deg C) Value: 42 vs. 22
  misc_feature: MA Experiment 108577 PARAMETER Experiment Name: At_42deg_Heat_cDNA_P Parameter: Timepoint (hr) Value: 6
  misc_feature: MA Experiment 108577 PARAMETER Experiment Name: At_42deg_Heat_cDNA_P Parameter: Tissue Value: Aerial
  misc_feature: MA Experiment ID: 108585 Result: Down-regulated in Transcription
  misc_feature: MA Experiment 108585 PARAMETER Experiment Name: At_5mM_NaNP_cDNA_P Parameter: Timepoint (hr) Value: 6
  misc_feature: MA Experiment 108585 PARAMETER Experiment Name: At_5mM_NaNP_cDNA_P Parameter: Tissue Value: Aerial
  misc_feature: MA Experiment 108585 PARAMETER Experiment Name: At_5mM_NaNP_cDNA_P Parameter: Treatment Value: null
  misc_feature: MA Experiment ID: 108595 Result: Down-regulated in Transcription
  misc_feature: MA Experiment 108595 PARAMETER Experiment Name: At_Ler-pi_Ovule_cDNA_P Parameter: Plant Line Value: null
  misc_feature: MA Experiment ID: 108607 Result: Down-regulated in Transcription
  misc_feature: MA Experiment 108607 PARAMETER Experiment Name: At_100uM_ABA_cDNA_P Parameter: Timepoint (hr) Value: 4
  misc_feature: MA Experiment 108607 PARAMETER Experiment Name: At_100uM_ABA_cDNA_P Parameter: Tissue Value: Aerial
  misc_feature: MA Experiment 108607 PARAMETER Experiment Name: At_100uM_ABA_cDNA_P Parameter: Treatment Value: 100uM ABA vs. No Treatment
  misc_feature: MA Experiment ID: 20000069 Result: Down-regulated in Transcription
  misc_feature: MA Experiment 20000069 PARAMETER Experiment Name: At_100uM_ABA_Mutants_cDNA_P Parameter: Plant Line Value: CS23
  misc_feature: MA Experiment 20000069 PARAMETER Experiment Name: At_100uM_ABA_Mutants_cDNA_P Parameter: Timepoint (hr) Value: 6
  misc_feature: MA Experiment 20000069 PARAMETER Experiment Name: At_100uM_ABA_Mutants_cDNA_P Parameter: Tissue Value: Aerial
  misc_feature: MA Experiment 20000069 PARAMETER Experiment Name: At_100uM_ABA_Mutants_cDNA_P Parameter: Treatment Value: 100uM ABA vs. No Treatment
  misc_feature: MA Experiment ID: 20000070 Result: Down-regulated in Transcription
  misc_feature: MA Experiment 20000070 PARAMETER Experiment Name: At_100uM_ABA_Mutants_cDNA_P Parameter: Plant Line Value: CS24
  misc_feature: MA Experiment 20000070 PARAMETER Experiment Name: At_100uM_ABA_Mutants_cDNA_P Parameter: Timepoint (hr) Value: 6
  misc_feature: MA Experiment 20000070 PARAMETER Experiment Name: At_100uM_ABA_Mutants_cDNA_P Parameter: Tissue Value: Aerial
  misc_feature: MA Experiment 20000070 PARAMETER Experiment Name: At_100uM_ABA_Mutants_cDNA_P Parameter: Treatment Value: 100uM ABA vs. No Treatment
  misc_feature: MA Experiment ID: 20000071 Result: Down-regulated in Transcription
  misc_feature: MA Experiment 20000071 PARAMETER Experiment Name: At_100uM_ABA_Mutants_cDNA_P Parameter: Plant Line Value: CS8104
  misc_feature: MA Experiment 20000071 PARAMETER Experiment Name: At_100uM_ABA_Mutants_cDNA_P Parameter: Timepoint (hr) Value: 6
  misc_feature: MA Experiment 20000071 PARAMETER Experiment Name: At_100uM_ABA_Mutants_cDNA_P Parameter: Tissue Value: Aerial
  misc_feature: MA Experiment 20000071 PARAMETER Experiment Name: At_100uM_ABA_Mutants_cDNA_P Parameter: Treatment Value: 100uM ABA vs. No Treatment
  misc_feature: MA Experiment ID: 20000072 Result: Down-regulated in Transcription
  misc_feature: MA Experiment 20000072 PARAMETER Experiment Name: At_100uM_ABA_Mutants_cDNA_P Parameter: Plant Line Value: CS8105
  misc_feature: MA Experiment 20000072 PARAMETER Experiment Name: At_100uM_ABA_Mutants_cDNA_P Parameter: Timepoint (hr) Value: 6
  misc_feature: MA Experiment 20000072 PARAMETER Experiment Name: At_100uM_ABA_Mutants_cDNA_P Parameter: Tissue Value: Aerial
  misc_feature: MA Experiment 20000072 PARAMETER Experiment Name: At_100uM_ABA_Mutants_cDNA_P Parameter: Treatment Value: 100uM ABA vs. No Treatment
  misc_feature: MA Experiment ID: 20000086 Result: Down-regulated in Transcription
  misc_feature: MA Experiment 20000086 PARAMETER Experiment Name: At_100uM_ABA_Mutants_cDNA_P Parameter: Plant Line Value: CS22
  misc_feature: MA Experiment 20000086 PARAMETER Experiment Name: At_100uM_ABA_Mutants_cDNA_P Parameter: Timepoint (hr) Value: 6
  misc_feature: MA Experiment 20000086 PARAMETER Experiment Name: At_100uM_ABA_Mutants_cDNA_P Parameter: Tissue Value: Aerial
  misc_feature: MA Experiment 20000086 PARAMETER Experiment Name: At_100uM_ABA_Mutants_cDNA_P Parameter: Treatment Value: 100uM ABA vs. No Treatment
  misc_feature: MA Experiment ID: 20000087 Result: Down-regulated in Transcription
  misc_feature: MA Experiment 20000087 PARAMETER Experiment Name: At_100uM_ABA_Mutants_cDNA_P Parameter: Plant Line Value: WS
  misc_feature: MA Experiment 20000087 PARAMETER Experiment Name: At_100uM_ABA_Mutants_cDNA_P Parameter: Timepoint (hr) Value: 6
  misc_feature: MA Experiment 20000087 PARAMETER Experiment Name: At_100uM_ABA_Mutants_cDNA_P Parameter: Tissue Value: Aerial
  misc_feature: MA Experiment 20000087 PARAMETER Experiment Name: At_100uM_ABA_Mutants_cDNA_P Parameter: Treatment Value: 100uM ABA vs. No Treatment
  misc_feature: MA Experiment ID: 20000088 Result: Down-regulated in Transcription
  misc_feature: MA Experiment 20000088 PARAMETER Experiment Name: At_100uM_ABA_Mutants_cDNA_P Parameter: Plant Line Value: Landsberg
  misc_feature: MA Experiment 20000088 PARAMETER Experiment Name: At_100uM_ABA_Mutants_cDNA_P Parameter: Timepoint (hr) Value: 6
  misc_feature: MA Experiment 20000088 PARAMETER Experiment Name: At_100uM_ABA_Mutants_cDNA_P Parameter: Tissue Value: Aerial
  misc_feature: MA Experiment 20000088 PARAMETER Experiment Name: At_100uM_ABA_Mutants_cDNA_P Parameter: Treatment Value: 100uM ABA vs. No Treatment
  misc_feature: MA Experiment ID: 20000113 Result: Down-regulated in Transcription
  misc_feature: MA Experiment 20000113 PARAMETER Experiment Name: At_42deg_Heat_cDNA_P Parameter: Temperature (deg C) Value: 42 vs. 22
  misc_feature: MA Experiment 20000113 PARAMETER Experiment Name: At_42deg_Heat_cDNA_P Parameter: Timepoint (hr) Value: 8
  misc_feature: MA Experiment 20000113 PARAMETER Experiment Name: At_42deg_Heat_cDNA_P Parameter: Tissue Value: Aerial
  misc_feature: MA Experiment ID: 20000117 Result: Down-regulated in Transcription
  misc_feature: MA Experiment 20000117 PARAMETER Experiment Name: At_100uM_ABA_Mutants_cDNA_P Parameter: Plant Line Value: Columbia
  misc_feature: MA Experiment 20000117 PARAMETER Experiment Name: At_100uM_ABA_Mutants_cDNA_P Parameter: Timepoint (hr) Value: 6
  misc_feature: MA Experiment 20000117 PARAMETER Experiment Name: At_100uM_ABA_Mutants_cDNA_P Parameter: Tissue Value: Aerial
  misc_feature: MA Experiment 20000117 PARAMETER Experiment Name: At_100uM_ABA_Mutants_cDNA_P Parameter: Treatment Value: 100uM ABA vs. No Treatment
  misc_feature: MA Experiment ID: 20000180 Result: Down-regulated in Transcription
  misc_feature: MA Experiment 20000180 PARAMETER Experiment Name: At_Germinating_Seeds_P Parameter: Age (hr) Value: 24 vs. 0
  misc_feature: MA Experiment 20000180 PARAMETER Experiment Name: At_Germinating_Seeds_P Parameter: Tissue Value: Germinating Seeds
  misc_feature: MA Experiment ID: 20000184 Result: Up-regulated in Transcription
  misc_feature: MA Experiment 20000184 PARAMETER Experiment Name: At_Shoots__P Parameter: Age (day) Value: 7
  misc_feature: MA Experiment 20000184 PARAMETER Experiment Name: At_Shoots__P Parameter: Tissue Value: Shoots vs. Whole Plant
  misc_feature: MA Experiment ID: 20000185 Result: Down-regulated in Transcription
  misc_feature: MA Experiment 20000185 PARAMETER Experiment Name: At_Roots__P Parameter: Age (day) Value: 7 vs. 21
  misc_feature: MA Experiment 20000185 PARAMETER Experiment Name: At_Roots__P Parameter: Organism Value: A. thaliana
  misc_feature: MA Experiment 20000185 PARAMETER Experiment Name: At_Roots__P Parameter: Tissue Value: Roots vs. Whole Plant
  misc_feature: MA Experiment ID: 20000224 Result: Down-regulated in Transcription
  misc_feature: MA Experiment ID: 20000234 Result: Down-regulated in Transcription
  misc_feature: MA Experiment 20000234 PARAMETER Experiment Name: At_Siliques_P Parameter: Age (day) Value: 21
  misc_feature: MA Experiment 20000234 PARAMETER Experiment Name: At_Siliques_P Parameter: Organism Value: A. thaliana
  misc_feature: MA Experiment 20000234 PARAMETER Experiment Name: At_Siliques_P Parameter: Plant Line Value: WS
  misc_feature: MA Experiment 20000234 PARAMETER Experiment Name: At_Siliques_P Parameter: Tissue Value: Less Than 5mm Siliques vs. Whole Plant
  misc_feature: MA Experiment ID: 20000235 Result: Down-regulated in Transcription
  misc_feature: MA Experiment 20000235 PARAMETER Experiment Name: At_Siliques_P Parameter: Age (day) Value: 21
  misc_feature: MA Experiment 20000235 PARAMETER Experiment Name: At_Siliques_P Parameter: Organism Value: A. thaliana
  misc_feature: MA Experiment 20000235 PARAMETER Experiment Name: At_Siliques_P Parameter: Plant Line Value: WS
  misc_feature: MA Experiment 20000235 PARAMETER Experiment Name: At_Siliques_P Parameter: Tissue Value: 5-10mm Siliques vs. Whole Plant
  misc_feature: MA Experiment ID: 20000264 Result: Down-regulated in Transcription
  misc_feature: MA Experiment 20000264 PARAMETER Experiment Name: At_Open_Flower_P Parameter: Age (day) Value: 21
  misc_feature: MA Experiment 20000264 PARAMETER Experiment Name: At_Open_Flower_P Parameter: Plant Line Value: WS
  misc_feature: MA Experiment 20000264 PARAMETER Experiment Name: At_Open_Flower_P Parameter: Tissue Value: Open Flower vs. Whole Plant
  misc_feature: MA Experiment ID: 20000267 Result: Down-regulated in Transcription
  misc_feature: MA Experiment 20000267 PARAMETER Experiment Name: At_Drought_P Parameter: Age (day) Value: 7
  misc_feature: MA Experiment 20000267 PARAMETER Experiment Name: At_Drought_P Parameter: Organism Value: A. thaliana
  misc_feature: MA Experiment 20000267 PARAMETER Experiment Name: At_Drought_P Parameter: Plant Line Value: WS
  misc_feature: MA Experiment 20000267 PARAMETER Experiment Name: At_Drought_P Parameter: Timepoint (hr) Value: 6
  misc_feature: MA Experiment 20000267 PARAMETER Experiment Name: At_Drought_P Parameter: Tissue Value: Whole Plant
  misc_feature: MA Experiment 20000267 PARAMETER Experiment Name: At_Drought_P Parameter: Treatment Value: Drought vs. No Drought
  misc_feature: MA Experiment ID: 20000286 Result: Up-regulated in Transcription
  misc_feature: MA Experiment 20000286 PARAMETER Experiment Name: At_Open_Flower_P Parameter: Age (day) Value: 21
  misc_feature: MA Experiment 20000286 PARAMETER Experiment Name: At_Open_Flower_P Parameter: Plant Line Value: WS
  misc_feature: MA Experiment 20000286 PARAMETER Experiment Name: At_Open_Flower_P Parameter: Tissue Value: Half Open vs. Whole Plant
  misc_feature: MA Experiment ID: 20000437 Result: Down-regulated in Transcription
  misc_feature: MA Experiment 20000437 PARAMETER Experiment Name: At_Drought_P Parameter: Age (day) Value: 8
  misc_feature: MA Experiment 20000437 PARAMETER Experiment Name: At_Drought_P Parameter: Organism Value: A. thaliana
  misc_feature: MA Experiment 20000437 PARAMETER Experiment Name: At_Drought_P Parameter: Plant Line Value: WS
  misc_feature: MA Experiment 20000437 PARAMETER Experiment Name: At_Drought_P Parameter: Timepoint (hr) Value: 24
  misc_feature: MA Experiment 20000437 PARAMETER Experiment Name: At_Drought_P Parameter: Tissue Value: Whole Plant
  misc_feature: MA Experiment 20000437 PARAMETER Experiment Name: At_Drought_P Parameter: Treatment Value: Drought vs. No Drought
  misc_feature: MA Experiment ID: 20000438 Result: Up-regulated in Transcription
  misc_feature: MA Experiment 20000438 PARAMETER Experiment Name: At_Shoots__P Parameter: Age (day) Value: 14
  misc_feature: MA Experiment 20000438 PARAMETER Experiment Name: At_Shoots__P Parameter: Tissue Value: Shoots vs. Whole Plant
  misc_feature: MA Experiment ID: 20000439 Result: Down-regulated in Transcription
  misc_feature: MA Experiment 20000439 PARAMETER Experiment Name: At_Roots__P Parameter: Age (day) Value: 14 vs. 21
  misc_feature: MA Experiment 20000439 PARAMETER Experiment Name: At_Roots__P Parameter: Organism Value: A. thaliana
  misc_feature: MA Experiment 20000439 PARAMETER Experiment Name: At_Roots__P Parameter: Tissue Value: Roots vs. Whole Plant
  misc_feature: MA Experiment ID: 20000573 Result: Down-regulated in Transcription
  misc_feature: MA Experiment 20000573 PARAMETER Experiment Name: At_100uM_ABA_Mutants__P Parameter: Organism Value: A. thaliana
  misc_feature: MA Experiment 20000573 PARAMETER Experiment Name: At_100uM_ABA_Mutants__P Parameter: Plant Line Value: CS22 vs. Ler wt
  misc_feature: MA Experiment 20000573 PARAMETER Experiment Name: At_100uM_ABA_Mutants__P Parameter: Timepoint (hr) Value: N/A
  misc_feature: MA Experiment 20000573 PARAMETER Experiment Name: At_100uM_ABA_Mutants__P Parameter: Tissue Value: Whole Plant
  misc_feature: MA Experiment 20000573 PARAMETER Experiment Name: At_100uM_ABA_Mutants__P Parameter: Treatment Value: None
  misc_feature: MA Experiment ID: 20001554 Result: Down-regulated in Transcription
  misc_feature: MA Experiment 20001554 PARAMETER Experiment Name: At_Drought_Soil_Dry_P Parameter: Age (day) Value: 21
  misc_feature: MA Experiment 20001554 PARAMETER Experiment Name: At_Drought_Soil_Dry_P Parameter: Organism Value: A. thaliana
  misc_feature: MA Experiment 20001554 PARAMETER Experiment Name: At_Drought_Soil_Dry_P Parameter: Plant Line Value: WS
  misc_feature: MA Experiment 20001554 PARAMETER Experiment Name: At_Drought_Soil_Dry_P Parameter: Post Timepoint (hr) Value: None
  misc_feature: MA Experiment 20001554 PARAMETER Experiment Name: At_Drought_Soil_Dry_P Parameter: Post-Treatment Value: None
  misc_feature: MA Experiment 20001554 PARAMETER Experiment Name: At_Drought_Soil_Dry_P Parameter: Timepoint (day) Value: 7
  misc_feature: MA Experiment 20001554 PARAMETER Experiment Name: At_Drought_Soil_Dry_P Parameter: Treatment Value: Drought vs. No Drought
  misc_feature: MA Experiment ID: 20001555 Result: Down-regulated in Transcription
  misc_feature: MA Experiment 20001555 PARAMETER Experiment Name: At_Drought_Soil_Dry_P Parameter: Age (day) Value: 24
  misc_feature: MA Experiment 20001555 PARAMETER Experiment Name: At_Drought_Soil_Dry_P Parameter: Organism Value: A. thaliana
  misc_feature: MA Experiment 20001555 PARAMETER Experiment Name: At_Drought_Soil_Dry_P Parameter: Plant Line Value: WS
  misc_feature: MA Experiment 20001555 PARAMETER Experiment Name: At_Drought_Soil_Dry_P Parameter: Post Timepoint (hr) Value: None
  misc_feature: MA Experiment 20001555 PARAMETER Experiment Name: At_Drought_Soil_Dry_P Parameter: Post-Treatment Value: None
  misc_feature: MA Experiment 20001555 PARAMETER Experiment Name: At_Drought_Soil_Dry_P Parameter: Timepoint (day) Value: 10
  misc_feature: MA Experiment 20001555 PARAMETER Experiment Name: At_Drought_Soil_Dry_P Parameter: Treatment Value: Drought vs. No Drought
  misc_feature: MA Experiment ID: 20001558 Result: Up-regulated in Transcription
  misc_feature: MA Experiment 20001558 PARAMETER Experiment Name: At_Drought_Soil_Dry_P Parameter: Age (day) Value: 27
  misc_feature: MA Experiment 20001558 PARAMETER Experiment Name: At_Drought_Soil_Dry_P Parameter: Organism Value: A. thaliana
  misc_feature: MA Experiment 20001558 PARAMETER Experiment Name: At_Drought_Soil_Dry_P Parameter: Plant Line Value: WS
  misc_feature: MA Experiment 20001558 PARAMETER Experiment Name: At_Drought_Soil_Dry_P Parameter: Post Timepoint (hr) Value: 6
  misc_feature: MA Experiment 20001558 PARAMETER Experiment Name: At_Drought_Soil_Dry_P Parameter: Post-Treatment Value: Re-Water vs. No Drought
  misc_feature: MA Experiment 20001558 PARAMETER Experiment Name: At_Drought_Soil_Dry_P Parameter: Timepoint (day) Value: 13
  misc_feature: MA Experiment 20001558 PARAMETER Experiment Name: At_Drought_Soil_Dry_P Parameter: Treatment Value: Drought vs. No Drought
  misc_feature: MA Experiment ID: 20001761 Result: Up-regulated in Transcription
  misc_feature: MA Experiment 20001761 PARAMETER Experiment Name: At_50mM_NH4NO3_L-to-H_P Parameter: Timepoint (hr) Value: 4
  misc_feature: MA Experiment 20001761 PARAMETER Experiment Name: At_50mM_NH4NO3_L-to-H_P Parameter: Tissue Value: Siliques
  misc_feature: MA Experiment 20001761 PARAMETER Experiment Name: At_50mM_NH4NO3_L-to-H_P Parameter: Treatment Value: 50mM NH4NO3 vs 100mM Mannitol
  misc_feature: MA Experiment ID: 20001904 Result: Down-regulated in Transcription
  misc_feature: MA Experiment 20001904 PARAMETER Experiment Name: At_Drought_Reproduction_P Parameter: Age (day) Value: 37
  misc_feature: MA Experiment 20001904 PARAMETER Experiment Name: At_Drought_Reproduction_P Parameter: Organism Value: A. thaliana
  misc_feature: MA Experiment 20001904 PARAMETER Experiment Name: At_Drought_Reproduction_P Parameter: Plant Line Value: WS
  misc_feature: MA Experiment 20001904 PARAMETER Experiment Name: At_Drought_Reproduction_P Parameter: Timepoint (day) Value: 7
  misc_feature: MA Experiment 20001904 PARAMETER Experiment Name: At_Drought_Reproduction_P Parameter: Tissue Value: Rosettes
  misc_feature: MA Experiment 20001904 PARAMETER Experiment Name: At_Drought_Reproduction_P Parameter: Treatment Value: Drought vs. No Drought
  misc_feature: MA Experiment ID: 20001905 Result: Down-regulated in Transcription
  misc_feature: MA Experiment 20001905 PARAMETER Experiment Name: At_Drought_Reproduction_P Parameter: Age (day) Value: 40
  misc_feature: MA Experiment 20001905 PARAMETER Experiment Name: At_Drought_Reproduction_P Parameter: Organism Value: A. thaliana
  misc_feature: MA Experiment 20001905 PARAMETER Experiment Name: At_Drought_Reproduction_P Parameter: Plant Line Value: WS
  misc_feature: MA Experiment 20001905 PARAMETER Experiment Name: At_Drought_Reproduction_P Parameter: Timepoint (day) Value: 10
  misc_feature: MA Experiment 20001905 PARAMETER Experiment Name: At_Drought_Reproduction_P Parameter: Tissue Value: Rosettes
  misc_feature: MA Experiment 20001905 PARAMETER Experiment Name: At_Drought_Reproduction_P Parameter: Treatment Value: Drought vs. No Drought
  misc_feature: MA Experiment ID: 20001906 Result: Down-regulated in Transcription
  misc_feature: MA Experiment 20001906 PARAMETER Experiment Name: At_Drought_Reproduction_P Parameter: Age (day) Value: 35
  misc_feature: MA Experiment 20001906 PARAMETER Experiment Name: At_Drought_Reproduction_P Parameter: Organism Value: A. thaliana
  misc_feature: MA Experiment 20001906 PARAMETER Experiment Name: At_Drought_Reproduction_P Parameter: Plant Line Value: WS
  misc_feature: MA Experiment 20001906 PARAMETER Experiment Name: At_Drought_Reproduction_P Parameter: Timepoint (day) Value: 5
  misc_feature: MA Experiment 20001906 PARAMETER Experiment Name: At_Drought_Reproduction_P Parameter: Tissue Value: Siliques
  misc_feature: MA Experiment 20001906 PARAMETER Experiment Name: At_Drought_Reproduction_P Parameter: Treatment Value: Drought vs. No Drought
ataatttactaaatatcactttctagtctcttctctttactttggtcgtccacaatgaaaggaggcagcctctcgtttctcttcgttctcctaatcgccaccatcacttccgtcatttgcttcagtgacgggatgttaccaaacggcgactttgaactaggaccaaaaccatcggacatgaaaggaacgcaagtaataaacaagaaggcgattcctagctgggagctttcaggcttcgtcgaatacataaagtccggtcaaaaacaaggagacatgcttctcgtagtcccggccggaaagttcgcaatccggctaggcaacgaggcatcgatcaaacaaagacttaacgttacaaaaggaatgtattactcactgacgttcagtgccgcaaggacatgtgcccaagacgaacggctcaacatatcggtggcacctgactcaggcgttattcctatacagacggtgtacagtagcagtggatgggacctttacgcatgggcgttccaagccgagagtaacgtggcagagatcgtgattcataatcctggtgaggaggaagatcctgcttgtggaccactcattgatggtgtggcaatcaaagctctataccctcctcggcccaccaataagaatatattgaagaacggaggatttgaagaaggtccctacgtactcccaaacgcaacaaccggcgttctggttcctccctttatagaagatgaccactctcctttacccgcgtggatggtcgaatcactcaaagccatcaaatacgttgatgtcgagcatttctcggtcccacaaggccgtcgagccgtggagctagtggcaggcaaagaaagcgcaatcgctcaggtagctaggaccgttgtgggaaaaacttacgtgctttcgtttgcggttggagatgctaacaatgcttgccaaggatcgatggtggtcgaggcatttgcgggaaaagacactctaaaggtaccttatgagtctcgaggcaaaggagggttcaaacgcgcttctctacggtttgtggcggtttcgacccgcacaagagttatgttttacagcacattttactcgatgagaagcgatgatttctcatcactgtgtgggcccgtgatcgatgatgttaagctcctcagtgctcgtaagccgtaagatggccattgttttatttctaaggttcttcgtataagccagtgtggttttttatataaatatgattttcttaatctctaatgcttttgaaatgagatgagtaatactgaaagggtgtttgtggtgtagggttttatataaggcaaaaaggtcttgcttatatatattttcttgtatgagaaggctaaagaaatgttgtctgtttttactaaattgggttctttcaaggagatcgggtgattgtgagaataaaaatgtaatacagatatatatggtagagaggaatgaggataataatttaactg

SEQ ID NO: 35908 - protein, 366 aa, Arabidopsis thaliana
  peptide (1)..(366): Ceres Seq. ID no. 12370575
  misc_feature (42)..(364): Pfam Name: Protein of unknown function, DUF642 Pfam Description: Protein of unknown function, DUF642
  misc_feature (8)..(365): Homolog of NCBI NO: 7488741 NR Description: hypothetical protein precursor - alfalfa
  misc_feature (42)..(366): Homolog of NCBI NO: 7486632 NR Description: hypothetical protein F8B4.160 - Arabidopsis
  misc_feature (6)..(366): Homolog of NCBI NO: 18418018 NR Description: putative protein
  misc_feature (1)..(366): Homolog of NCBI NO: 7488898 NR Description: hypothetical protein - castor bean
  misc_feature (1)..(366): Homolog of NCBI NO: 15809822 NR Description: AT5g25460/F18G18_200 [Arabidopsis thaliana]
  misc_feature (1)..(366): Homolog of NCBI NO: 21537379 NR Description: unknown [Arabidopsis thaliana]
  misc_feature (1)..(366): Homolog of NCBI NO: 15239438 NR Description: putative protein
  misc_feature (1)..(366): Homolog of NCBI NO: 21554402 NR Description: unknown [Arabidopsis thaliana]
  misc_feature (1)..(366): Homolog of NCBI NO: 23397043 NR Description: unknown protein [Arabidopsis thaliana]
  misc_feature (1)..(366): Homolog of NCBI NO: 15239049 NR Description: putative protein
MKGGSLSFLFVLLIATITSVICFSDGMLPNGDFELGPKPSDMKGTQVINKKAIPSWELSGFVEYIKSGQKQGDMLLVVPAGKFAIRLGNEASIKQRLNVTKGMYYSLTFSAARTCAQDERLNISVAPDSGVIPIQTVYSSSGWDLYAWAFQAESNVAEIVIHNPGEEEDPACGPLIDGVAIKALYPPRPTNKNILKNGGFEEGPYVLPNATTGVLVPPFIEDDHSPLPAWMVESLKAIKYVDVEHFSVPQGRRAVELVAGKESAIAQVARTVVGKTYVLSFAVGDANNACQGSMVVEAFAGKDTLKVPYESRGKGGFKRASLRFVAVSTRTRVMFYSTFYSMRSDDFSSLCGPVIDDVKLLSARKP

SEQ ID NO: 35909 - protein, 340 aa, Arabidopsis thaliana
  peptide (1)..(340): Ceres Seq. ID no. 12370576
  misc_feature (16)..(338): Pfam Name: Protein of unknown function, DUF642 Pfam Description: Protein of unknown function, DUF642
  misc_feature (1)..(339): Homolog of NCBI NO: 7488741 NR Description: hypothetical protein precursor - alfalfa
  misc_feature (16)..(340): Homolog of NCBI NO: 7486632 NR Description: hypothetical protein F8B4.160 - Arabidopsis
  misc_feature (1)..(340): Homolog of NCBI NO: 18418018 NR Description: putative protein
  misc_feature (1)..(340): Homolog of NCBI NO: 7488898 NR Description: hypothetical protein - castor bean
  misc_feature (1)..(340): Homolog of NCBI NO: 15809822 NR Description: AT5g25460/F18G18_200 [Arabidopsis thaliana]
  misc_feature (1)..(340): Homolog of NCBI NO: 21537379 NR Description: unknown [Arabidopsis thaliana]
  misc_feature (1)..(340): Homolog of NCBI NO: 15239438 NR Description: putative protein
  misc_feature (1)..(340): Homolog of NCBI NO: 21554402 NR Description: unknown [Arabidopsis thaliana]
  misc_feature (1)..(340): Homolog of NCBI NO: 23397043 NR Description: unknown protein [Arabidopsis thaliana]
  misc_feature (1)..(340): Homolog of NCBI NO: 15239049 NR Description: putative protein
MLPNGDFELGPKPSDMKGTQVINKKAIPSWELSGFVEYIKSGQKQGDMLLVVPAGKFAIRLGNEASIKQRLNVTKGMYYSLTFSAARTCAQDERLNISVAPDSGVIPIQTVYSSSGWDLYAWAFQAESNVAEIVIHNPGEEEDPACGPLIDGVAIKALYPPRPTNKNILKNGGFEEGPYVLPNATTGVLVPPFIEDDHSPLPAWMVESLKAIKYVDVEHFSVPQGRRAVELVAGKESAIAQVARTVVGKTYVLSFAVGDANNACQGSMVVEAFAGKDTLKVPYESRGKGGFKRASLRFVAVSTRTRVMFYSTFYSMRSDDFSSLCGPVIDDVKLLSARKP

SEQ ID NO: 35910 - protein, 325 aa, Arabidopsis thaliana
  peptide (1)..(325): Ceres Seq. ID no. 12370577
  misc_feature (1)..(323): Pfam Name: Protein of unknown function, DUF642 Pfam Description: Protein of unknown function, DUF642
  misc_feature (1)..(324): Homolog of NCBI NO: 7488741 NR Description: hypothetical protein precursor - alfalfa
  misc_feature (1)..(325): Homolog of NCBI NO: 7486632 NR Description: hypothetical protein F8B4.160 - Arabidopsis
  misc_feature (1)..(325): Homolog of NCBI NO: 18418018 NR Description: putative protein
  misc_feature (1)..(325): Homolog of NCBI NO: 7488898 NR Description: hypothetical protein - castor bean
  misc_feature (1)..(325): Homolog of NCBI NO: 15809822 NR Description: AT5g25460/F18G18_200 [Arabidopsis thaliana]
  misc_feature (1)..(325): Homolog of NCBI NO: 21537379 NR Description: unknown [Arabidopsis thaliana]
  misc_feature (1)..(325): Homolog of NCBI NO: 15239438 NR Description: putative protein
  misc_feature (1)..(325): Homolog of NCBI NO: 21554402 NR Description: unknown [Arabidopsis thaliana]
  misc_feature (1)..(325): Homolog of NCBI NO: 23397043 NR Description: unknown protein [Arabidopsis thaliana]
  misc_feature (1)..(325): Homolog of NCBI NO: 15239049 NR Description: putative protein
MKGTQVINKKAIPSWELSGFVEYIKSGQKQGDMLLVVPAGKFAIRLGNEASIKQRLNVTKGMYYSLTFSAARTCAQDERLNISVAPDSGVIPIQTVYSSSGWDLYAWAFQAESNVAEIVIHNPGEEEDPACGPLIDGVAIKALYPPRPTNKNILKNGGFEEGPYVLPNATTGVLVPPFIEDDHSPLPAWMVESLKAIKYVDVEHFSVPQGRRAVELVAGKESAIAQVARTVVGKTYVLSFAVGDANNACQGSMVVEAFAGKDTLKVPYESRGKGGFKRASLRFVAVSTRTRVMFYSTFYSMRSDDFSSLCGPVIDDVKLLSARKP

SEQ ID NO: 35911 - DNA, 1254 bp, Arabidopsis thaliana
  misc_feature (1)..(1254): Ceres Seq. ID no. 12396165
  misc_feature: MA Experiment ID: 108462 Result: Up-regulated in Transcription
  misc_feature: MA Experiment 108462 PARAMETER Experiment Name: At_Germinating_Seeds_cDNA_P Parameter: Age (day) Value: 2 vs. 0
  misc_feature: MA Experiment 108462 PARAMETER Experiment Name: At_Germinating_Seeds_cDNA_P Parameter: Tissue Value: Germinating Seeds
  misc_feature: MA Experiment ID: 108463 Result: Up-regulated in Transcription
  misc_feature: MA Experiment 108463 PARAMETER Experiment Name: At_Germinating_Seeds_cDNA_P Parameter: Age (day) Value: 3 vs. 0
  misc_feature: MA Experiment 108463 PARAMETER Experiment Name: At_Germinating_Seeds_cDNA_P Parameter: Tissue Value: Germinating Seeds
  misc_feature: MA Experiment ID: 108464 Result: Up-regulated in Transcription
  misc_feature: MA Experiment 108464 PARAMETER Experiment Name: At_Germinating_Seeds_cDNA_P Parameter: Age (day) Value: 4 vs. 0
  misc_feature: MA Experiment 108464 PARAMETER Experiment Name: At_Germinating_Seeds_cDNA_P Parameter: Tissue Value: Germinating Seeds
  misc_feature: MA Experiment ID: 108488 Result: Down-regulated in Transcription
  misc_feature: MA Experiment ID: 108572 Result: Up-regulated in Transcription
  misc_feature: MA Experiment 108572 PARAMETER Experiment Name: At_Drought_cDNA_P Parameter: Timepoint (hr) Value: 1
  misc_feature: MA Experiment 108572 PARAMETER Experiment Name: At_Drought_cDNA_P Parameter: Tissue Value: Aerial
  misc_feature: MA Experiment 108572 PARAMETER Experiment Name: At_Drought_cDNA_P Parameter: Treatment Value: Drought vs. No Drought
  misc_feature: MA Experiment ID: 108574 Result: Up-regulated in Transcription
  misc_feature: MA Experiment 108574 PARAMETER Experiment Name: At_Wounding__cDNA_P Parameter: Timepoint (hr) Value: 1
  misc_feature: MA Experiment 108574 PARAMETER Experiment Name: At_Wounding__cDNA_P Parameter: Tissue Value: Aerial
  misc_feature: MA Experiment 108574 PARAMETER Experiment Name: At_Wounding__cDNA_P Parameter: Treatment Value: Wounding vs. No Wounding
  misc_feature: MA Experiment ID: 108594 Result: Up-regulated in Transcription
  misc_feature: MA Experiment 108594 PARAMETER Experiment Name: At_Ler-rhl_Root_cDNA_P Parameter: Plant Line Value: null
  misc_feature: MA Experiment ID: 108595 Result: Up-regulated in Transcription
  misc_feature: MA Experiment 108595 PARAMETER Experiment Name: At_Ler-pi_Ovule_cDNA_P Parameter: Plant Line Value: null
  misc_feature: MA Experiment ID: 108605 Result: Up-regulated in Transcription
  misc_feature: MA Experiment 108605 PARAMETER Experiment Name: At_100uM_ABA_cDNA_P Parameter: Timepoint (hr) Value: 6
  misc_feature: MA Experiment 108605 PARAMETER Experiment Name: At_100uM_ABA_cDNA_P Parameter: Tissue Value: Aerial
  misc_feature: MA Experiment 108605 PARAMETER Experiment Name: At_100uM_ABA_cDNA_P Parameter: Treatment Value: 100uM ABA vs. No Treatment
  misc_feature: MA Experiment ID: 108607 Result: Up-regulated in Transcription
  misc_feature: MA Experiment 108607 PARAMETER Experiment Name: At_100uM_ABA_cDNA_P Parameter: Timepoint (hr) Value: 4
  misc_feature: MA Experiment 108607 PARAMETER Experiment Name: At_100uM_ABA_cDNA_P Parameter: Tissue Value: Aerial
  misc_feature: MA Experiment 108607 PARAMETER Experiment Name: At_100uM_ABA_cDNA_P Parameter: Treatment Value: 100uM ABA vs. No Treatment
  misc_feature: MA Experiment ID: 108608 Result: Up-regulated in Transcription
  misc_feature: MA Experiment 108608 PARAMETER Experiment Name: At_100uM_ABA_cDNA_P Parameter: Timepoint (hr) Value: 1
  misc_feature: MA Experiment 108608 PARAMETER Experiment Name: At_100uM_ABA_cDNA_P Parameter: Tissue Value: Aerial
  misc_feature: MA Experiment 108608 PARAMETER Experiment Name: At_100uM_ABA_cDNA_P Parameter: Treatment Value: 100uM ABA vs. No Treatment
  misc_feature: MA Experiment ID: 108609 Result: Up-regulated in Transcription
  misc_feature: MA Experiment 108609 PARAMETER Experiment Name: At_100uM_ABA_cDNA_P Parameter: Timepoint (hr) Value: 24
  misc_feature: MA Experiment 108609 PARAMETER Experiment Name: At_100uM_ABA_cDNA_P Parameter: Tissue Value: Aerial
  misc_feature: MA Experiment 108609 PARAMETER Experiment Name: At_100uM_ABA_cDNA_P Parameter: Treatment Value: 100uM ABA vs. No Treatment
  misc_feature: MA Experiment ID: 108667 Result: Up-regulated in Transcription
  misc_feature: MA Experiment 108667 PARAMETER Experiment Name: At_2mM_SA_cDNA_P Parameter: Plant Line Value: WS
  misc_feature: MA Experiment 108667 PARAMETER Experiment Name: At_2mM_SA_cDNA_P Parameter: Timepoint (hr) Value: 1
  misc_feature: MA Experiment 108667 PARAMETER Experiment Name: At_2mM_SA_cDNA_P Parameter: Treatment Value: 2mM SA vs. No Treatment
  misc_feature: MA Experiment ID: 20000070 Result: Up-regulated in Transcription
  misc_feature: MA Experiment 20000070 PARAMETER Experiment Name: At_100uM_ABA_Mutants_cDNA_P Parameter: Plant Line Value: CS24
  misc_feature: MA Experiment 20000070 PARAMETER Experiment Name: At_100uM_ABA_Mutants_cDNA_P Parameter: Timepoint (hr) Value: 6
  misc_feature: MA Experiment 20000070 PARAMETER Experiment Name: At_100uM_ABA_Mutants_cDNA_P Parameter: Tissue Value: Aerial
  misc_feature: MA Experiment 20000070 PARAMETER Experiment Name: At_100uM_ABA_Mutants_cDNA_P Parameter: Treatment Value: 100uM ABA vs. No Treatment
  misc_feature: MA Experiment ID: 20000166 Result: Up-regulated in Transcription
  misc_feature: MA Experiment 20000166 PARAMETER Experiment Name: At_100uM_ABA_P Parameter: Age (day) Value: 14
  misc_feature: MA Experiment 20000166 PARAMETER Experiment Name: At_100uM_ABA_P Parameter: Organism Value: A. thaliana
  misc_feature: MA Experiment 20000166 PARAMETER Experiment Name: At_100uM_ABA_P Parameter: Plant Line Value: WS
  misc_feature: MA Experiment 20000166 PARAMETER Experiment Name: At_100uM_ABA_P Parameter: Timepoint (hr) Value: 1
  misc_feature: MA Experiment 20000166 PARAMETER Experiment Name: At_100uM_ABA_P Parameter: Tissue Value: Aerial
  misc_feature: MA Experiment 20000166 PARAMETER Experiment Name: At_100uM_ABA_P Parameter: Treatment Value: 100uM ABA vs. No Treatment
  misc_feature: MA Experiment ID: 20000227 Result: Down-regulated in Transcription
  misc_feature: MA Experiment 20000227 PARAMETER Experiment Name: At_Root-Tips-vs-Tops_P Parameter: Tissue Value: Root Tips vs. Root Tops
  misc_feature: MA Experiment ID: 20000460 Result: Up-regulated in Transcription
  misc_feature: MA Experiment 20000460 PARAMETER Experiment Name: At_10percent_PEG_P Parameter: Age (day) Value: 12
  misc_feature: MA Experiment 20000460 PARAMETER Experiment Name: At_10percent_PEG_P Parameter: Organism Value: A. thaliana
  misc_feature: MA Experiment 20000460 PARAMETER Experiment Name: At_10percent_PEG_P Parameter: Plant Line Value: WS
  misc_feature: MA Experiment 20000460 PARAMETER Experiment Name: At_10percent_PEG_P Parameter: Timepoint (day) Value: 12
  misc_feature: MA Experiment 20000460 PARAMETER Experiment Name: At_10percent_PEG_P Parameter: Tissue Value: Whole Plant
  misc_feature: MA Experiment 20000460 PARAMETER Experiment Name: At_10percent_PEG_P Parameter: Treatment Value: 10percent PEG vs. No Treatment
  misc_feature: MA Experiment ID: 20000527 Result: Up-regulated in Transcription
  misc_feature: MA Experiment 20000527 PARAMETER Experiment Name: At_10percent_PEG_P Parameter: Age (day) Value: 20
  misc_feature: MA Experiment 20000527 PARAMETER Experiment Name: At_10percent_PEG_P Parameter: Organism Value: A. thaliana
  misc_feature: MA Experiment 20000527 PARAMETER Experiment Name: At_10percent_PEG_P Parameter: Plant Line Value: WS
  misc_feature: MA Experiment 20000527 PARAMETER Experiment Name: At_10percent_PEG_P Parameter: Timepoint (day) Value: 20
  misc_feature: MA Experiment 20000527 PARAMETER Experiment Name: At_10percent_PEG_P Parameter: Tissue Value: Whole Plant
  misc_feature: MA Experiment 20000527 PARAMETER Experiment Name: At_10percent_PEG_P Parameter: Treatment Value: 10percent PEG vs. No Treatment
  misc_feature: MA Experiment ID: 20000573 Result: Down-regulated in Transcription
  misc_feature: MA Experiment 20000573 PARAMETER Experiment Name: At_100uM_ABA_Mutants__P Parameter: Organism Value: A. thaliana
  misc_feature: MA Experiment 20000573 PARAMETER Experiment Name: At_100uM_ABA_Mutants__P Parameter: Plant Line Value: CS22 vs. Ler wt
  misc_feature: MA Experiment 20000573 PARAMETER Experiment Name: At_100uM_ABA_Mutants__P Parameter: Timepoint (hr) Value: N/A
  misc_feature: MA Experiment 20000573 PARAMETER Experiment Name: At_100uM_ABA_Mutants__P Parameter: Tissue Value: Whole Plant
  misc_feature: MA Experiment 20000573 PARAMETER Experiment Name: At_100uM_ABA_Mutants__P Parameter: Treatment Value: None
  misc_feature: MA Experiment ID: 20000574 Result: Down-regulated in Transcription
  misc_feature: MA Experiment 20000574 PARAMETER Experiment Name: At_100uM_ABA_Mutants__P Parameter: Organism Value: A. thaliana
  misc_feature: MA Experiment 20000574 PARAMETER Experiment Name: At_100uM_ABA_Mutants__P Parameter: Plant Line Value: CS23 vs. Ler wt
  misc_feature: MA Experiment 20000574 PARAMETER Experiment Name: At_100uM_ABA_Mutants__P Parameter: Timepoint (hr) Value: N/A
  misc_feature: MA Experiment 20000574 PARAMETER Experiment Name: At_100uM_ABA_Mutants__P Parameter: Tissue Value: Whole Plant
  misc_feature: MA Experiment 20000574 PARAMETER Experiment Name: At_100uM_ABA_Mutants__P Parameter: Treatment Value: None
  misc_feature: MA Experiment ID: 20000794 Result: Down-regulated in Transcription
  misc_feature: MA Experiment 20000794 PARAMETER Experiment Name: At_Petals_P Parameter: Age (day) Value: 23-25 days
  misc_feature: MA Experiment 20000794 PARAMETER Experiment Name: At_Petals_P Parameter: Plant Line Value: WS
  misc_feature: MA Experiment 20000794 PARAMETER Experiment Name: At_Petals_P Parameter: Tissue Value: Petals vs. Whole plant
  misc_feature: MA Experiment ID: 20001247 Result: Up-regulated in Transcription
  misc_feature: MA Experiment 20001247 PARAMETER Experiment Name: At_Far-red-induction_P Parameter: Age (day) Value: 7
  misc_feature: MA Experiment 20001247 PARAMETER Experiment Name: At_Far-red-induction_P Parameter: Light Value: Far-red vs. White
  misc_feature: MA Experiment 20001247 PARAMETER Experiment Name: At_Far-red-induction_P Parameter: Organism Value: A. thaliana
  misc_feature: MA Experiment 20001247 PARAMETER Experiment Name: At_Far-red-induction_P Parameter: Plant Line Value: Columbia
  misc_feature: MA Experiment 20001247 PARAMETER Experiment Name: At_Far-red-induction_P Parameter: Timepoint (hr) Value: 1
  misc_feature: MA Experiment 20001247 PARAMETER Experiment Name: At_Far-red-induction_P Parameter: Tissue Value: Whole Plant
  misc_feature: MA Experiment ID: 20001248 Result: Up-regulated in Transcription
  misc_feature: MA Experiment 20001248 PARAMETER Experiment Name: At_Far-red-induction_P Parameter: Age (day) Value: 7
  misc_feature: MA Experiment 20001248 PARAMETER Experiment Name: At_Far-red-induction_P Parameter: Light Value: Far-red vs. White
  misc_feature: MA Experiment 20001248 PARAMETER Experiment Name: At_Far-red-induction_P Parameter: Organism Value: A. thaliana
  misc_feature: MA Experiment 20001248 PARAMETER Experiment Name: At_Far-red-induction_P Parameter: Plant Line Value: Columbia
  misc_feature: MA Experiment 20001248 PARAMETER Experiment Name: At_Far-red-induction_P Parameter: Timepoint (hr) Value: 4
  misc_feature: MA Experiment 20001248 PARAMETER Experiment Name: At_Far-red-induction_P Parameter: Tissue Value: Whole Plant
  misc_feature: MA Experiment ID: 20001450 Result: Up-regulated in Transcription
  misc_feature: MA Experiment 20001450 PARAMETER Experiment Name: At_Far-red-induction_P Parameter: Age (day) Value: 7
  misc_feature: MA Experiment 20001450 PARAMETER Experiment Name: At_Far-red-induction_P Parameter: Light Value: Far-red vs. White
  misc_feature: MA Experiment 20001450 PARAMETER Experiment Name: At_Far-red-induction_P Parameter: Organism Value: A. thaliana
  misc_feature: MA Experiment 20001450 PARAMETER Experiment Name: At_Far-red-induction_P Parameter: Plant Line Value: Columbia
  misc_feature: MA Experiment 20001450 PARAMETER Experiment Name: At_Far-red-induction_P Parameter: Timepoint (hr) Value: 8
  misc_feature: MA Experiment 20001450 PARAMETER Experiment Name: At_Far-red-induction_P Parameter: Tissue Value: Whole Plant
  misc_feature: MA Experiment ID: 20001757 Result: Down-regulated in Transcription
  misc_feature: MA Experiment 20001757 PARAMETER Experiment Name: At_50mM_NH4NO3_L-to-H_P Parameter: Timepoint (hr) Value: 6
  misc_feature: MA Experiment 20001757 PARAMETER Experiment Name: At_50mM_NH4NO3_L-to-H_P Parameter: Tissue Value: Leaf
  misc_feature: MA Experiment 20001757 PARAMETER Experiment Name: At_50mM_NH4NO3_L-to-H_P Parameter: Treatment Value: 50mM NH4NO3 vs 100mM Mannitol
  misc_feature: MA Experiment ID: 20001905 Result: Up-regulated in Transcription
  misc_feature: MA Experiment 20001905 PARAMETER Experiment Name: At_Drought_Reproduction_P Parameter: Age (day) Value: 40
  misc_feature: MA Experiment 20001905 PARAMETER Experiment Name: At_Drought_Reproduction_P Parameter: Organism Value: A. thaliana
  misc_feature: MA Experiment 20001905 PARAMETER Experiment Name: At_Drought_Reproduction_P Parameter: Plant Line Value: WS
  misc_feature: MA Experiment 20001905 PARAMETER Experiment Name: At_Drought_Reproduction_P Parameter: Timepoint (day) Value: 10
  misc_feature: MA Experiment 20001905 PARAMETER Experiment Name: At_Drought_Reproduction_P Parameter: Tissue Value: Rosettes
  misc_feature: MA Experiment 20001905 PARAMETER Experiment Name: At_Drought_Reproduction_P Parameter: Treatment Value: Drought vs. No Drought
tctcggaccaatattcaaagccgtgtgttcttctctgtctcattaaatcaaaaccaattttgttcttcttctttgattttttttttcttcttcattttttcttctttctatttgtaacgtatcttgagagatcgacgatgtcgtcgaagaaatccctagttcaaagtctcttcaacatttccaaaacctactccaggatttctggtcttacccgaatgcgtccgaccaaatccggcggcattcctcccgacgccggagattctggaatccgccgcagatttctccacaagagggcatttttctcgccggagatagttcctaaaggtggtaacttgatggagaaactcagggaattgactttgtccaataataatcgtattagactcgacgagatgttaccgccaccttcgccgaagaaatcatcaccggagtttttcccggcggtcacggtggaagacgtgaagaagctcatgagagcagcggaaatggagctggtgaaatcgaagctgagagagattggcaagaactgggttccttattcggagtttgttcgggtctgcggagaatacagttcggatcctgaacaaggtaaccgggtcgcgaatatgcttgacgaagctggaaacgtcatcgttttgggaaaactcgtctgccttaaacccgaagagctaacaagcgccatggctggtctgattccgacattcgaacccagtctcgacgacgcaacaagacaagagttcgaacaacttgagattataaaatcagatatcgacaaaagagccgatgatctggttcgaaaagaattatgggccggattaggcctaattatggcccaaacagttggattttttaggctgacgttttgggaactgtcgtgggacgtgatggaacccatatgcttctacgtaacttcgacatatttcatggctggttacgccttcttcctccgaacttcaaaggaaccttcctttgaaggtttttacaaaagccggttcgagacgaagcagaaacgtttgccttaaaatgcttgatttcgatatcgatcgatttaccaagctacagaagatgcatcgtccaaatttgactaaatctggtcgttgttgatcgtaattcttttcttcttctttttcctaaatcggatgctaaattaaatgtatagacgactgaaattttcgtagagaataattagttttagagggataaaaaaaagtcttgtcatgcgggggtaacactaaataactaaatcaattaatt

SEQ ID NO: 35912 - protein, 339 aa, Arabidopsis thaliana
  peptide (1)..(339): Ceres Seq. ID no. 12396166
  misc_feature (185)..(338): Pfam Name: Protein of unknown function, DUF607 Pfam Description: Protein of unknown function, DUF607
  misc_feature (136)..(338): Homolog of NCBI NO: 18391039 NR Description: Expressed protein
  misc_feature (148)..(338): Homolog of NCBI NO: 34909244 NR Description: B1148D12.10 [Oryza sativa (japonica
  misc_feature (126)..(338): Homolog of NCBI NO: 15239011 NR Description: unknown protein; protein id: At5g42610.1
  misc_feature (124)..(338): Homolog of NCBI NO: 20330769 NR Description: Hypothetical protein [Oryza sativa (japonica
  misc_feature (81)..(338): Homolog of NCBI NO: 37535778 NR Description: unknown protein [Oryza sativa (japonica
  misc_feature (41)..(338): Homolog of NCBI NO: 15234535 NR Description: putative protein; protein id: At4g36820.1
  misc_feature (54)..(338): Homolog of NCBI NO: 24496456 NR Description: hypothetical protein [Arabidopsis thaliana]
  misc_feature (54)..(338): Homolog of NCBI NO: 15224063 NR Description: hypothetical protein; protein id: At2g23790.1
  misc_feature (46)..(338): Homolog of NCBI NO: 14596231 NR Description: Unknown protein [Arabidopsis thaliana]
  misc_feature (46)..(338): Homolog of NCBI NO: 15240047 NR Description: putative protein
SDQYSKPCVLLCLIKSKPILFFFFDFFFLLHFFFFLFVTYLERSTMSSKKSLVQSLFNISKTYSRISGLTRMRPTKSGGIPPDAGDSGIRRRFLHKRAFFSPEIVPKGGNLMEKLRELTLSNNNRIRLDEMLPPPSPKKSSPEFFPAVTVEDVKKLMRAAEMELVKSKLREIGKNWVPYSEFVRVCGEYSSDPEQGNRVANMLDEAGNVIVLGKLVCLKPEELTSAMAGLIPTFEPSLDDATRQEFEQLEIIKSDIDKRADDLVRKELWAGLGLIMAQTVGFFRLTFWELSWDVMEPICFYVTSTYFMAGYAFFLRTSKEPSFEGFYKSRFETKQKRLP

SEQ ID NO: 35913 - protein, 294 aa, Arabidopsis thaliana
  peptide (1)..(294): Ceres Seq. ID no. 12396167
  misc_feature (140)..(293): Pfam Name: Protein of unknown function, DUF607 Pfam Description: Protein of unknown function, DUF607
  misc_feature (91)..(293): Homolog of NCBI NO: 18391039 NR Description: Expressed protein
  misc_feature (103)..(293): Homolog of NCBI NO: 34909244 NR Description: B1148D12.10 [Oryza sativa (japonica
  misc_feature (81)..(293): Homolog of NCBI NO: 15239011 NR Description: unknown protein; protein id: At5g42610.1
  misc_feature (79)..(293): Homolog of NCBI NO: 20330769 NR Description: Hypothetical protein [Oryza sativa (japonica
  misc_feature (36)..(293): Homolog of NCBI NO: 37535778 NR Description: unknown protein [Oryza sativa (japonica
  misc_feature (1)..(293): Homolog of NCBI NO: 15234535 NR Description: putative protein; protein id: At4g36820.1
  misc_feature (9)..(293): Homolog of NCBI NO: 24496456 NR Description: hypothetical protein [Arabidopsis thaliana]
  misc_feature (9)..(293): Homolog of NCBI NO: 15224063 NR Description: hypothetical protein; protein id: At2g23790.1
  misc_feature (1)..(293): Homolog of NCBI NO: 14596231 NR Description: Unknown protein [Arabidopsis thaliana]
  misc_feature (1)..(293): Homolog of NCBI NO: 15240047 NR Description: putative protein
MSSKKSLVQSLFNISKTYSRISGLTRMRPTKSGGIPPDAGDSGIRRRFLHKRAFFSPEIVPKGGNLMEKLRELTLSNNNRIRLDEMLPPPSPKKSSPEFFPAVTVEDVKKLMRAAEMELVKSKLREIGKNWVPYSEFVRVCGEYSSDPEQGNRVANMLDEAGNVIVLGKLVCLKPEELTSAMAGLIPTFEPSLDDATRQEFEQLEIIKSDIDKRADDLVRKELWAGLGLIMAQTVGFFRLTFWELSWDVMEPICFYVTSTYFMAGYAFFLRTSKEPSFEGFYKSRFETKQKRLP

SEQ ID NO: 35914 - protein, 268 aa, Arabidopsis thaliana
  peptide (1)..(268): Ceres Seq. ID no. 12396168
  misc_feature (114)..(267): Pfam Name: Protein of unknown function, DUF607 Pfam Description: Protein of unknown function, DUF607
  misc_feature (65)..(267): Homolog of NCBI NO: 18391039 NR Description: Expressed protein
  misc_feature (77)..(267): Homolog of NCBI NO: 34909244 NR Description: B1148D12.10 [Oryza sativa (japonica
  misc_feature (55)..(267): Homolog of NCBI NO: 15239011 NR Description: unknown protein; protein id: At5g42610.1
  misc_feature (53)..(267): Homolog of NCBI NO: 20330769 NR Description: Hypothetical protein [Oryza sativa (japonica
  misc_feature (10)..(267): Homolog of NCBI NO: 37535778 NR Description: unknown protein [Oryza sativa (japonica
  misc_feature (1)..(267): Homolog of NCBI NO: 15234535 NR Description: putative protein; protein id: At4g36820.1
  misc_feature (1)..(267): Homolog of NCBI NO: 24496456 NR Description: hypothetical protein [Arabidopsis thaliana]
  misc_feature (1)..(267): Homolog of NCBI NO: 15224063 NR Description: hypothetical protein; protein id: At2g23790.1
  misc_feature (1)..(267): Homolog of NCBI NO: 14596231 NR Description: Unknown protein [Arabidopsis thaliana]
  misc_feature (1)..(267): Homolog of NCBI NO: 15240047 NR Description: putative protein
MRPTKSGGIPPDAGDSGIRRRFLHKRAFFSPEIVPKGGNLMEKLRELTLSNNNRIRLDEMLPPPSPKKSSPEFFPAVTVEDVKKLMRAAEMELVKSKLREIGKNWVPYSEFVRVCGEYSSDPEQGNRVANMLDEAGNVIVLGKLVCLKPEELTSAMAGLIPTFEPSLDDATRQEFEQLEIIKSDIDKRADDLVRKELWAGLGLIMAQTVGFFRLTFWELSWDVMEPICFYVTSTYFMAGYAFFLRTSKEPSFEGFYKSRFETKQKRLP

SEQ ID NO: 35915 - DNA, 1315 bp, Arabidopsis thaliana
  misc_feature (1)..(1315): Ceres Seq. ID no. 12482719
  misc_feature: MA Experiment ID: 108464 Result: Up-regulated in Transcription
  misc_feature: MA Experiment 108464 PARAMETER Experiment Name: At_Germinating_Seeds_cDNA_P Parameter: Age (day) Value: 4 vs. 0
  misc_feature: MA Experiment 108464 PARAMETER Experiment Name: At_Germinating_Seeds_cDNA_P Parameter: Tissue Value: Germinating Seeds
  misc_feature: MA Experiment ID: 108473 Result: Up-regulated in Transcription
  misc_feature: MA Experiment 108473 PARAMETER Experiment Name: At_Drought_Flowers_cDNA_P Parameter: Timepoint (hr) Value: 7 d
  misc_feature: MA Experiment 108473 PARAMETER Experiment Name: At_Drought_Flowers_cDNA_P Parameter: Tissue Value: Flower
  misc_feature: MA Experiment 108473 PARAMETER Experiment Name: At_Drought_Flowers_cDNA_P Parameter: Treatment Value: Drought vs. No Drought
  misc_feature: MA Experiment ID: 108488 Result: Down-regulated in Transcription
  misc_feature: MA Experiment ID: 108501 Result: Up-regulated in Transcription
  misc_feature: MA Experiment 108501 PARAMETER Experiment Name: At_ap2_floral_buds_cDNA_P Parameter: Plant Line Value: ap2 (Ler.)
  misc_feature: MA Experiment 108501 PARAMETER Experiment Name: At_ap2_floral_buds_cDNA_P Parameter: Tissue Value: Closed Flower
  misc_feature: MA Experiment ID: 108576 Result: Up-regulated in Transcription
  misc_feature: MA Experiment 108576 PARAMETER Experiment Name: At_42deg_Heat_cDNA_P Parameter: Temperature (deg C) Value: 42 vs. 22
  misc_feature: MA Experiment 108576 PARAMETER Experiment Name: At_42deg_Heat_cDNA_P Parameter: Timepoint (hr) Value: 1
  misc_feature: MA Experiment 108576 PARAMETER Experiment Name: At_42deg_Heat_cDNA_P Parameter: Tissue Value: Aerial
  misc_feature: MA Experiment ID: 108577 Result: Up-regulated in Transcription
  misc_feature: MA Experiment 108577 PARAMETER Experiment Name: At_42deg_Heat_cDNA_P Parameter: Temperature (deg C) Value: 42 vs. 22
  misc_feature: MA Experiment 108577 PARAMETER Experiment Name: At_42deg_Heat_cDNA_P Parameter: Timepoint (hr) Value: 6
  misc_feature: MA Experiment 108577 PARAMETER Experiment Name: At_42deg_Heat_cDNA_P Parameter: Tissue Value: Aerial
  misc_feature: MA Experiment ID: 108585 Result: Up-regulated in Transcription
  misc_feature: MA Experiment 108585 PARAMETER Experiment Name: At_5mM_NaNP_cDNA_P Parameter: Timepoint (hr) Value: 6
  misc_feature: MA Experiment 108585 PARAMETER Experiment Name: At_5mM_NaNP_cDNA_P Parameter: Tissue Value: Aerial
  misc_feature: MA Experiment 108585 PARAMETER Experiment Name: At_5mM_NaNP_cDNA_P Parameter: Treatment Value: null
  misc_feature: MA Experiment ID: 108595 Result: Up-regulated in Transcription
  misc_feature: MA Experiment 108595 PARAMETER Experiment Name: At_Ler-pi_Ovule_cDNA_P Parameter: Plant Line Value: null
  misc_feature: MA Experiment ID: 108607 Result: Up-regulated in Transcription
  misc_feature: MA Experiment 108607 PARAMETER Experiment Name: At_100uM_ABA_cDNA_P Parameter: Timepoint (hr) Value: 4
  misc_feature: MA Experiment 108607 PARAMETER Experiment Name: At_100uM_ABA_cDNA_P Parameter: Tissue Value: Aerial
  misc_feature: MA Experiment 108607 PARAMETER Experiment Name: At_100uM_ABA_cDNA_P Parameter: Treatment Value: 100uM ABA vs. No Treatment
  misc_feature: MA Experiment ID: 108609 Result: Up-regulated in Transcription
  misc_feature: MA Experiment 108609 PARAMETER Experiment Name: At_100uM_ABA_cDNA_P Parameter: Timepoint (hr) Value: 24
  misc_feature: MA Experiment 108609 PARAMETER Experiment Name: At_100uM_ABA_cDNA_P Parameter: Tissue Value: Aerial
  misc_feature: MA Experiment 108609 PARAMETER Experiment Name: At_100uM_ABA_cDNA_P Parameter: Treatment Value: 100uM ABA vs. No Treatment
  misc_feature: MA Experiment ID: 20000070 Result: Up-regulated in Transcription
  misc_feature: MA Experiment 20000070 PARAMETER Experiment Name: At_100uM_ABA_Mutants_cDNA_P Parameter: Plant Line Value: CS24
  misc_feature: MA Experiment 20000070 PARAMETER Experiment Name: At_100uM_ABA_Mutants_cDNA_P Parameter: Timepoint (hr) Value: 6
  misc_feature: MA Experiment 20000070 PARAMETER Experiment Name: At_100uM_ABA_Mutants_cDNA_P Parameter: Tissue Value: Aerial
  misc_feature: MA Experiment 20000070 PARAMETER Experiment Name: At_100uM_ABA_Mutants_cDNA_P Parameter: Treatment Value: 100uM ABA vs. No Treatment
  misc_feature: MA Experiment ID: 20000089 Result: Up-regulated in Transcription
  misc_feature: MA Experiment ID: 20000093 Result: Up-regulated in Transcription
  misc_feature: MA Experiment 20000093 PARAMETER Experiment Name: At_42deg_Heat_cDNA_P Parameter: Temperature (deg C) Value: 42 vs. 22
  misc_feature: MA Experiment 20000093 PARAMETER Experiment Name: At_42deg_Heat_cDNA_P Parameter: Timepoint (hr) Value: 0.5
  misc_feature: MA Experiment 20000093 PARAMETER Experiment Name: At_42deg_Heat_cDNA_P Parameter: Tissue Value: Aerial
  misc_feature: MA Experiment ID: 20000112 Result: Up-regulated in Transcription
  misc_feature: MA Experiment 20000112 PARAMETER Experiment Name: At_42deg_Heat_cDNA_P Parameter: Temperature (deg C) Value: 42 vs. 22
  misc_feature: MA Experiment 20000112 PARAMETER Experiment Name: At_42deg_Heat_cDNA_P Parameter: Timepoint (hr) Value: 2
  misc_feature: MA Experiment 20000112 PARAMETER Experiment Name: At_42deg_Heat_cDNA_P Parameter: Tissue Value: Aerial
  misc_feature: MA Experiment ID: 20000113 Result: Up-regulated in Transcription
  misc_feature: MA Experiment 20000113 PARAMETER Experiment Name: At_42deg_Heat_cDNA_P Parameter: Temperature (deg C) Value: 42 vs. 22
  misc_feature: MA Experiment 20000113 PARAMETER Experiment Name: At_42deg_Heat_cDNA_P Parameter: Timepoint (hr) Value: 8
  misc_feature: MA Experiment 20000113 PARAMETER Experiment Name: At_42deg_Heat_cDNA_P Parameter: Tissue Value: Aerial
  misc_feature: MA Experiment ID: 20000117 Result: Up-regulated in Transcription
  misc_feature: MA Experiment 20000117 PARAMETER Experiment Name: At_100uM_ABA_Mutants_cDNA_P Parameter: Plant Line Value: Columbia
  misc_feature: MA Experiment 20000117 PARAMETER Experiment Name: At_100uM_ABA_Mutants_cDNA_P Parameter: Timepoint (hr) Value: 6
  misc_feature: MA Experiment 20000117 PARAMETER Experiment Name: At_100uM_ABA_Mutants_cDNA_P Parameter: Tissue Value: Aerial
  misc_feature: MA Experiment 20000117 PARAMETER Experiment Name: At_100uM_ABA_Mutants_cDNA_P Parameter: Treatment Value: 100uM ABA vs. No Treatment
  misc_feature: MA Experiment ID: 20000144 Result: Up-regulated in Transcription
  misc_feature: MA Experiment 20000144 PARAMETER Experiment Name: At_42deg_Heat_cDNA_P Parameter: Temperature (deg C) Value: 42 vs. 22
  misc_feature: MA Experiment 20000144 PARAMETER Experiment Name: At_42deg_Heat_cDNA_P Parameter: Timepoint (hr) Value: 1
  misc_feature: MA Experiment 20000144 PARAMETER Experiment Name: At_42deg_Heat_cDNA_P Parameter: Tissue Value: Aerial
  misc_feature: MA Experiment ID: 20000171 Result: Up-regulated in Transcription
  misc_feature: MA Experiment 20000171 PARAMETER Experiment Name: At_42deg_Heat_P Parameter: Age (day) Value: 14
  misc_feature: MA Experiment 20000171 PARAMETER Experiment Name: At_42deg_Heat_P Parameter: Organism Value: A. thaliana
  misc_feature: MA Experiment 20000171 PARAMETER Experiment Name: At_42deg_Heat_P Parameter: Plant Line Value: WS
  misc_feature: MA Experiment 20000171 PARAMETER Experiment Name: At_42deg_Heat_P Parameter: Temperature (deg C) Value: 42 vs. 22
  misc_feature: MA Experiment 20000171 PARAMETER Experiment Name: At_42deg_Heat_P Parameter: Timepoint (hr) Value: 1
  misc_feature: MA Experiment 20000171 PARAMETER Experiment Name: At_42deg_Heat_P Parameter: Tissue Value: Aerial
  misc_feature: MA Experiment ID: 20000173 Result: Up-regulated in Transcription
  misc_feature: MA Experiment 20000173 PARAMETER Experiment Name: At_42deg_Heat_P Parameter: Age (day) Value: 14
  misc_feature: MA Experiment 20000173 PARAMETER Experiment Name: At_42deg_Heat_P Parameter: Organism Value: A. thaliana
  misc_feature: MA Experiment 20000173 PARAMETER Experiment Name: At_42deg_Heat_P Parameter: Plant Line Value: WS
  misc_feature: MA Experiment 20000173 PARAMETER Experiment Name: At_42deg_Heat_P Parameter: Temperature (deg C) Value: 42 vs. 22
  misc_feature: MA Experiment 20000173 PARAMETER Experiment Name: At_42deg_Heat_P Parameter: Timepoint (hr) Value: 6
  misc_feature: MA Experiment 20000173 PARAMETER Experiment Name: At_42deg_Heat_P Parameter: Tissue Value: Aerial
  misc_feature: MA Experiment ID: 20000182 Result: Up-regulated in Transcription
  misc_feature: MA Experiment 20000182 PARAMETER Experiment Name: At_2mM_SA_P Parameter: Age (day) Value: 14
  misc_feature: MA Experiment 20000182 PARAMETER Experiment Name: At_2mM_SA_P Parameter: Organism Value: A. thaliana
  misc_feature: MA Experiment 20000182 PARAMETER Experiment Name: At_2mM_SA_P Parameter: Plant Line Value: WS
  misc_feature: MA Experiment 20000182 PARAMETER Experiment Name: At_2mM_SA_P Parameter: Timepoint (hr) Value: 6
  misc_feature: MA Experiment 20000182 PARAMETER Experiment Name: At_2mM_SA_P Parameter: Tissue Value: Aerial
  misc_feature: MA Experiment 20000182 PARAMETER Experiment Name: At_2mM_SA_P Parameter: Treatment Value: 2mM SA vs. No Treatment
  misc_feature: MA Experiment ID: 20000184 Result: Down-regulated in Transcription
  misc_feature: MA Experiment 20000184 PARAMETER Experiment Name: At_Shoots__P Parameter: Age (day) Value: 7
  misc_feature: MA Experiment 20000184 PARAMETER Experiment Name: At_Shoots__P Parameter: Tissue Value: Shoots vs. Whole Plant
  misc_feature: MA Experiment ID: 20000234 Result: Down-regulated in Transcription
  misc_feature: MA Experiment 20000234 PARAMETER Experiment Name: At_Siliques_P Parameter: Age (day) Value: 21
  misc_feature: MA Experiment 20000234 PARAMETER Experiment Name: At_Siliques_P Parameter: Organism Value: A. thaliana
  misc_feature: MA Experiment 20000234 PARAMETER Experiment Name: At_Siliques_P Parameter: Plant Line Value: WS
  misc_feature: MA Experiment 20000234 PARAMETER Experiment Name: At_Siliques_P Parameter: Tissue Value: Less Than 5mm Siliques vs. Whole Plant
  misc_feature: MA Experiment ID: 20000264 Result: Down-regulated in Transcription
  misc_feature: MA Experiment 20000264 PARAMETER Experiment Name: At_Open_Flower_P Parameter: Age (day) Value: 21
  misc_feature: MA Experiment 20000264 PARAMETER Experiment Name: At_Open_Flower_P Parameter: Plant Line Value: WS
  misc_feature: MA Experiment 20000264 PARAMETER Experiment Name: At_Open_Flower_P Parameter: Tissue Value: Open Flower vs. Whole Plant
  misc_feature: MA Experiment ID: 20000265 Result: Down-regulated in Transcription
  misc_feature: MA Experiment 20000265 PARAMETER Experiment Name: At_Open_Flower_P Parameter: Age (day) Value: 21
  misc_feature: MA Experiment 20000265 PARAMETER Experiment Name: At_Open_Flower_P Parameter: Plant Line Value: WS
  misc_feature: MA Experiment 20000265 PARAMETER Experiment Name: At_Open_Flower_P Parameter: Tissue Value: Closed Flower vs. Whole Plant
  misc_feature: MA Experiment ID: 20000267 Result: Up-regulated in Transcription
  misc_feature: MA Experiment 20000267 PARAMETER Experiment Name: At_Drought_P Parameter: Age (day) Value: 7
  misc_feature: MA Experiment 20000267 PARAMETER Experiment Name: At_Drought_P Parameter: Organism Value: A. thaliana
  misc_feature: MA Experiment 20000267 PARAMETER Experiment Name: At_Drought_P Parameter: Plant Line Value: WS
  misc_feature: MA Experiment 20000267 PARAMETER Experiment Name: At_Drought_P Parameter: Timepoint (hr) Value: 6
  misc_feature: MA Experiment 20000267 PARAMETER Experiment Name: At_Drought_P Parameter: Tissue Value: Whole Plant
  misc_feature: MA Experiment 20000267 PARAMETER Experiment Name: At_Drought_P Parameter: Treatment Value: Drought vs. No Drought
  misc_feature: MA Experiment ID: 20000436 Result: Up-regulated in Transcription
  misc_feature: MA Experiment 20000436 PARAMETER Experiment Name: At_Drought_P Parameter: Age (day) Value: 7
  misc_feature: MA Experiment 20000436 PARAMETER Experiment Name: At_Drought_P Parameter: Organism Value: A. thaliana
  misc_feature: MA Experiment 20000436 PARAMETER Experiment Name: At_Drought_P Parameter: Plant Line Value: WS
  misc_feature: MA Experiment 20000436 PARAMETER Experiment Name: At_Drought_P Parameter: Timepoint (hr) Value: 12
  misc_feature: MA Experiment 20000436 PARAMETER Experiment Name: At_Drought_P Parameter: Tissue Value: Whole Plant
  misc_feature: MA Experiment 20000436 PARAMETER Experiment Name: At_Drought_P Parameter: Treatment Value: Drought vs. No Drought
  misc_feature: MA Experiment ID: 20000437 Result: Up-regulated in Transcription
  misc_feature: MA Experiment 20000437 PARAMETER Experiment Name: At_Drought_P Parameter: Age (day) Value: 8
  misc_feature: MA Experiment 20000437 PARAMETER Experiment Name: At_Drought_P Parameter: Organism Value: A. thaliana
  misc_feature: MA Experiment 20000437 PARAMETER Experiment Name: At_Drought_P Parameter: Plant Line Value: WS
  misc_feature: MA Experiment 20000437 PARAMETER Experiment Name: At_Drought_P Parameter: Timepoint (hr) Value: 24
  misc_feature: MA Experiment 20000437 PARAMETER Experiment Name: At_Drought_P Parameter: Tissue Value: Whole Plant
  misc_feature: MA Experiment 20000437 PARAMETER Experiment Name: At_Drought_P Parameter: Treatment Value: Drought vs. No Drought
  misc_feature: MA Experiment ID: 20000438 Result: Down-regulated in Transcription
  misc_feature: MA Experiment 20000438 PARAMETER Experiment Name: At_Shoots__P Parameter: Age (day) Value: 14
  misc_feature: MA Experiment 20000438 PARAMETER Experiment Name: At_Shoots__P Parameter: Tissue Value: Shoots vs. Whole Plant
  misc_feature: MA Experiment ID: 20000443 Result: Up-regulated in Transcription
  misc_feature: MA Experiment 20000443 PARAMETER Experiment Name: At_1uM_BR-BRZ__P Parameter: Tissue Value: Shoot Apices
  misc_feature: MA Experiment 20000443 PARAMETER Experiment Name: At_1uM_BR-BRZ__P Parameter: Treatment Value: 1uM BRZ vs. No Treatment
  misc_feature: MA Experiment ID: 20000453 Result: Up-regulated in Transcription
  misc_feature: MA Experiment 20000453 PARAMETER Experiment Name: At_100uM_ABA_P Parameter: Age (day) Value: 15
  misc_feature: MA Experiment 20000453 PARAMETER Experiment Name: At_100uM_ABA_P Parameter: Organism Value: A. thaliana
  misc_feature: MA Experiment 20000453 PARAMETER Experiment Name: At_100uM_ABA_P Parameter: Plant Line Value: WS
  misc_feature: MA Experiment 20000453 PARAMETER Experiment Name: At_100uM_ABA_P Parameter: Timepoint (hr) Value: 24
  misc_feature: MA Experiment 20000453 PARAMETER Experiment Name: At_100uM_ABA_P Parameter: Tissue Value: Aerial
  misc_feature: MA Experiment 20000453 PARAMETER Experiment Name: At_100uM_ABA_P Parameter: Treatment Value: 100uM ABA vs. No Treatment
  misc_feature: MA Experiment ID: 20000709 Result: Up-regulated in Transcription
  misc_feature: MA Experiment 20000709 PARAMETER Experiment Name: At_15mM_NH4NO3_L-to-H_P Parameter: Age (hr) Value: 14
  misc_feature: MA Experiment 20000709 PARAMETER Experiment Name: At_15mM_NH4NO3_L-to-H_P Parameter: Organism Value: A. thaliana
  misc_feature: MA Experiment 20000709 PARAMETER Experiment Name: At_15mM_NH4NO3_L-to-H_P Parameter: Plant Line Value: WS
  misc_feature: MA Experiment 20000709 PARAMETER Experiment Name: At_15mM_NH4NO3_L-to-H_P Parameter: Timepoint (hr) Value: 4
  misc_feature: MA Experiment 20000709 PARAMETER Experiment Name: At_15mM_NH4NO3_L-to-H_P Parameter: Tissue Value: Aerial
  misc_feature: MA Experiment 20000709 PARAMETER Experiment Name: At_15mM_NH4NO3_L-to-H_P Parameter: Treatment Value: 15mM NH4NO3 vs. 30mM Mannitol
  misc_feature: MA Experiment ID: 20001248 Result: Down-regulated in Transcription
  misc_feature: MA Experiment 20001248 PARAMETER Experiment Name: At_Far-red-induction_P Parameter: Age (day) Value: 7
  misc_feature: MA Experiment 20001248 PARAMETER Experiment Name: At_Far-red-induction_P Parameter: Light Value: Far-red vs. White
  misc_feature: MA Experiment 20001248 PARAMETER Experiment Name: At_Far-red-induction_P Parameter: Organism Value: A. thaliana
  misc_feature: MA Experiment 20001248 PARAMETER Experiment Name: At_Far-red-induction_P Parameter: Plant Line Value: Columbia
  misc_feature: MA Experiment 20001248 PARAMETER Experiment Name: At_Far-red-induction_P Parameter: Timepoint (hr) Value: 4
  misc_feature: MA Experiment 20001248 PARAMETER Experiment Name: At_Far-red-induction_P Parameter: Tissue Value: Whole Plant
  misc_feature: MA Experiment ID: 20001450 Result: Down-regulated in Transcription
  misc_feature: MA Experiment 20001450 PARAMETER Experiment Name: At_Far-red-induction_P Parameter: Age (day) Value: 7
  misc_feature: MA Experiment 20001450 PARAMETER Experiment Name: At_Far-red-induction_P Parameter: Light Value: Far-red vs. White
  misc_feature: MA Experiment 20001450 PARAMETER Experiment Name: At_Far-red-induction_P Parameter: Organism Value: A. thaliana
  misc_feature: MA Experiment 20001450 PARAMETER Experiment Name: At_Far-red-induction_P Parameter: Plant Line Value: Columbia
  misc_feature: MA Experiment 20001450 PARAMETER Experiment Name: At_Far-red-induction_P Parameter: Timepoint (hr) Value: 8
  misc_feature: MA Experiment 20001450 PARAMETER Experiment Name: At_Far-red-induction_P Parameter: Tissue Value: Whole Plant
  misc_feature: MA Experiment ID: 20001554 Result: Up-regulated in Transcription
  misc_feature: MA Experiment 20001554 PARAMETER Experiment Name: At_Drought_Soil_Dry_P Parameter: Age (day) Value: 21
  misc_feature: MA Experiment 20001554 PARAMETER Experiment Name: At_Drought_Soil_Dry_P Parameter: Organism Value: A. thaliana
  misc_feature: MA Experiment 20001554 PARAMETER Experiment Name: At_Drought_Soil_Dry_P Parameter: Plant Line Value: WS
  misc_feature: MA Experiment 20001554 PARAMETER Experiment Name: At_Drought_Soil_Dry_P Parameter: Post Timepoint (hr) Value: None
  misc_feature: MA Experiment 20001554 PARAMETER Experiment Name: At_Drought_Soil_Dry_P Parameter: Post-Treatment Value: None
  misc_feature: MA Experiment 20001554 PARAMETER Experiment Name: At_Drought_Soil_Dry_P Parameter: Timepoint (day) Value: 7
  misc_feature: MA Experiment 20001554 PARAMETER Experiment Name: At_Drought_Soil_Dry_P Parameter: Treatment Value: Drought vs. No Drought
  misc_feature: MA Experiment ID: 20001555 Result: Up-regulated in Transcription
  misc_feature: MA Experiment 20001555 PARAMETER Experiment Name: At_Drought_Soil_Dry_P Parameter: Age (day) Value: 24
  misc_feature: MA Experiment 20001555 PARAMETER Experiment Name: At_Drought_Soil_Dry_P Parameter: Organism Value: A. thaliana
  misc_feature: MA Experiment 20001555 PARAMETER Experiment Name: At_Drought_Soil_Dry_P Parameter: Plant Line Value: WS
  misc_feature: MA Experiment 20001555 PARAMETER Experiment Name: At_Drought_Soil_Dry_P Parameter: Post Timepoint (hr) Value: None
  misc_feature: MA Experiment 20001555 PARAMETER Experiment Name: At_Drought_Soil_Dry_P Parameter: Post-Treatment Value: None
  misc_feature: MA Experiment 20001555 PARAMETER Experiment Name: At_Drought_Soil_Dry_P Parameter: Timepoint (day) Value: 10
  misc_feature: MA Experiment 20001555 PARAMETER Experiment Name: At_Drought_Soil_Dry_P Parameter: Treatment Value: Drought vs. No Drought
  misc_feature: MA Experiment ID: 20001768 Result: Up-regulated in Transcription
  misc_feature: MA Experiment 20001768 PARAMETER Experiment Name: At_Far-red-enriched-adult_P Parameter: Age (day) Value: 28
  misc_feature: MA Experiment 20001768 PARAMETER Experiment Name: At_Far-red-enriched-adult_P Parameter: Light Value: Far-red enriched vs. White
  misc_feature: MA Experiment 20001768 PARAMETER Experiment Name: At_Far-red-enriched-adult_P Parameter: Organism Value: A. thaliana
  misc_feature: MA Experiment 20001768 PARAMETER Experiment Name: At_Far-red-enriched-adult_P Parameter: Plant Line Value: Columbia
  misc_feature: MA Experiment 20001768 PARAMETER Experiment Name: At_Far-red-enriched-adult_P Parameter: Timepoint (hr) Value: 1
  misc_feature: MA Experiment 20001768 PARAMETER Experiment Name: At_Far-red-enriched-adult_P Parameter: Tissue Value: Aerial
  misc_feature: MA Experiment ID: 20001772 Result: Down-regulated in Transcription
  misc_feature: MA Experiment 20001772 PARAMETER Experiment Name: At_Far-red-enriched-adult_P Parameter: Age (day) Value: 29
  misc_feature: MA Experiment 20001772 PARAMETER Experiment Name: At_Far-red-enriched-adult_P Parameter: Light Value: Far-red enriched vs. White
  misc_feature: MA Experiment 20001772 PARAMETER Experiment Name: At_Far-red-enriched-adult_P Parameter: Organism Value: A. thaliana
  misc_feature: MA Experiment 20001772 PARAMETER Experiment Name: At_Far-red-enriched-adult_P Parameter: Plant Line Value: Columbia
  misc_feature: MA Experiment 20001772 PARAMETER Experiment Name: At_Far-red-enriched-adult_P Parameter: Timepoint (hr) Value: 24
  misc_feature: MA Experiment 20001772 PARAMETER Experiment Name: At_Far-red-enriched-adult_P Parameter: Tissue Value: Aerial
  misc_feature: MA Experiment ID: 20001906 Result: Up-regulated in Transcription
  misc_feature: MA Experiment 20001906 PARAMETER Experiment Name: At_Drought_Reproduction_P Parameter: Age (day) Value: 35
  misc_feature: MA Experiment 20001906 PARAMETER Experiment Name: At_Drought_Reproduction_P Parameter: Organism Value: A. thaliana
  misc_feature: MA Experiment 20001906 PARAMETER Experiment Name: At_Drought_Reproduction_P Parameter: Plant Line Value: WS
  misc_feature: MA Experiment 20001906 PARAMETER Experiment Name: At_Drought_Reproduction_P Parameter: Timepoint (day) Value: 5
  misc_feature: MA Experiment 20001906 PARAMETER Experiment Name: At_Drought_Reproduction_P Parameter: Tissue Value: Siliques
  misc_feature: MA Experiment 20001906 PARAMETER Experiment Name: At_Drought_Reproduction_P Parameter: Treatment Value: Drought vs. No Drought
  misc_feature: MA Experiment ID: 20001908 Result: Up-regulated in Transcription
  misc_feature: MA Experiment 20001908 PARAMETER Experiment Name: At_Drought_Reproduction_P Parameter: Age (day) Value: 40
  misc_feature: MA Experiment 20001908 PARAMETER Experiment Name: At_Drought_Reproduction_P Parameter: Organism Value: A. thaliana
  misc_feature: MA Experiment 20001908 PARAMETER Experiment Name: At_Drought_Reproduction_P Parameter: Plant Line Value: WS
  misc_feature: MA Experiment 20001908 PARAMETER Experiment Name: At_Drought_Reproduction_P Parameter: Timepoint (day) Value: 10
  misc_feature: MA Experiment 20001908 PARAMETER Experiment Name: At_Drought_Reproduction_P Parameter: Tissue Value: Siliques
  misc_feature: MA Experiment 20001908 PARAMETER Experiment Name: At_Drought_Reproduction_P Parameter: Treatment Value: Drought vs. No Drought
  misc_feature: MA Experiment ID: 20001910 Result: Up-regulated in Transcription
  misc_feature: MA Experiment 20001910 PARAMETER Experiment Name: At_Drought_Reproduction_P Parameter: Age (day) Value: 37
  misc_feature: MA Experiment 20001910 PARAMETER Experiment Name: At_Drought_Reproduction_P Parameter: Organism Value: A. thaliana
  misc_feature: MA Experiment 20001910 PARAMETER Experiment Name: At_Drought_Reproduction_P Parameter: Plant Line Value: WS
  misc_feature: MA Experiment 20001910 PARAMETER Experiment Name: At_Drought_Reproduction_P Parameter: Timepoint (day) Value: 7
  misc_feature: MA Experiment 20001910 PARAMETER Experiment Name: At_Drought_Reproduction_P Parameter: Tissue Value: Flowers
  misc_feature: MA Experiment 20001910 PARAMETER Experiment Name: At_Drought_Reproduction_P Parameter: Treatment Value: Drought vs. No Drought
  misc_feature: MA Experiment ID: 20001911 Result: Up-regulated in Transcription
  misc_feature: MA Experiment 20001911 PARAMETER Experiment Name: At_Drought_Reproduction_P Parameter: Age (day) Value: 40
  misc_feature: MA Experiment 20001911 PARAMETER Experiment Name: At_Drought_Reproduction_P Parameter: Organism Value: A. thaliana
  misc_feature: MA Experiment 20001911 PARAMETER Experiment Name: At_Drought_Reproduction_P Parameter: Plant Line Value: WS
  misc_feature: MA Experiment 20001911 PARAMETER Experiment Name: At_Drought_Reproduction_P Parameter: Timepoint (day) Value: 10
  misc_feature: MA Experiment 20001911 PARAMETER Experiment Name: At_Drought_Reproduction_P Parameter: Tissue Value: Flowers
  misc_feature: MA Experiment 20001911 PARAMETER Experiment Name: At_Drought_Reproduction_P Parameter: Treatment Value: Drought vs. No Drought
aaaagactatcaaaagaagaaacagagcaaatttcattctctcagaacaaatatatacatattaatcagaatcaggaaaagtgaagaagcgaaagagagaagaagatcggatgggagtggattactacaaagtcctccaagtcgatcgcagcgcaagcgacgatgatctcaagaaagcttatcgtaaacttgccatgaaatggcatcccgacaaaaatcccaacaacaaaaaggatgccgaagctatgttcaaacaaatatccgaagcttacgaggtactaagtgatcctcagaagaaagctgtgtatgatcaatatggtgaggaaggtttgaaagggaacgtgccacctccggatgcaggtggagctacttacttctctaccggggatggtccaacgtccttcaggttcaacccgagaaatgcggatgatatatttgctgagttctttggcttctctagcccatttggcggcggaagaggtggtacaagattctctagcagcatgtttggtgataatatgtttgcttctttcggcgaaggaggaggcggtggtggtggctcgatgcatcacggtggagctaggaaggctgctcctatcgaaaacaagttgccttgtagccttgaagatctttacaaaggaaccaccaaaaagatgaggatttctagggagattgctgatgtcagtggcaagacgatgcaggtggaagagattttgaccattgatgtgaaaccaggatggaagaaaggcacaaagatcacgttcccagagaaaggcaatgagcaacccggtgtgattccagcggatttagtcttcataatcgacgagaagcctcacccggttttcactcgagagggtaacgacctcatagtcacacagaagatctcacttgttgaggccttgactggttacacagtgaacctgactactcttgatggtcggagactgacaattccagtcaccaacgtggtccatcccgagtacgaggaagtggtaccgaaggaagggatgccattgcaaaaagaccagactaagagaggtaacttgaggatcaaatttaacatcaagttccctacaaggttaacctcagagcagaagacaggagtgaagaaacttctcggatgaaatgagttatagtcagcacatttcagacaaaacaatgttgaacagaagaggaacaagaaaatcatgttgcagaccacagggattgtgattaaatactgttgtgacctttttgatcgatttgtaacatatgtacgattggatacctcctaataaatttgttactttctctataatcaaaacgcttctaaacc

SEQ ID NO: 35916 - protein, 337 aa, Arabidopsis thaliana
  peptide (1)..(337): Ceres Seq. ID no. 12482720
  misc_feature (214)..(336): Pfam Name: DnaJ C terminal region Pfam Description: DnaJ C terminal region
  misc_feature (1)..(337): Homolog of NCBI NO: 15218515 NR Description: putative heat-shock protein
  misc_feature (1)..(336): Homolog of NCBI NO: 15239455 NR Description: heat-shock protein - like; protein id:
  misc_feature (1)..(337): Homolog of NCBI NO: 34904486 NR Description: putative heat shock protein 40
  misc_feature (1)..(335): Homolog of NCBI NO: 21618097 NR Description: putative heat shock protein [Arabidopsis thaliana]
  misc_feature (1)..(335): Homolog of NCBI NO: 15231987 NR Description: putative heat shock protein
  misc_feature (1)..(336): Homolog of NCBI NO: 15240968 NR Description: heat shock protein 40-like
  misc_feature (1)..(337): Homolog of NCBI NO: 11863723 NR Description: DnaJ like protein [Lycopersicon esculentum]
  misc_feature (1)..(337): Homolog of NCBI NO: 6179940 NR Description: DnaJ-like protein [Nicotiana tabacum]
  misc_feature (1)..(337): Homolog of NCBI NO: 15235310 NR Description: heat-shock protein
  misc_feature (1)..(337): Homolog of NCBI NO: 15225377 NR Description: putative heat shock protein
MGVDYYKVLQVDRSASDDDLKKAYRKLAMKWHPDKNPNNKKDAEAMFKQISEAYEVLSDPQKKAVYDQYGEEGLKGNVPPPDAGGATYFSTGDGPTSFRFNPRNADDIFAEFFGFSSPFGGGRGGTRFSSSMFGDNMFASFGEGGGGGGGSMHHGGARKAAPIENKLPCSLEDLYKGTTKKMRISREIADVSGKTMQVEEILTIDVKPGWKKGTKITFPEKGNEQPGVIPADLVFIIDEKPHPVFTREGNDLIVTQKISLVEALTGYTVNLTTLDGRRLTIPVTNVVHPEYEEVVPKEGMPLQKDQTKRGNLRIKFNIKFPTRLTSEQKTGVKKLLG

SEQ ID NO: 35917 - protein, 309 aa, Arabidopsis thaliana
  peptide (1)..(309): Ceres Seq. ID no. 12482721
  misc_feature (186)..(308): Pfam Name: DnaJ C terminal region Pfam Description: DnaJ C terminal region
  misc_feature (1)..(309): Homolog of NCBI NO: 15218515 NR Description: putative heat-shock protein
  misc_feature (1)..(308): Homolog of NCBI NO: 15239455 NR Description: heat-shock protein - like; protein id:
  misc_feature (1)..(309): Homolog of NCBI NO: 34904486 NR Description: putative heat shock protein 40
  misc_feature (1)..(307): Homolog of NCBI NO: 21618097 NR Description: putative heat shock protein [Arabidopsis thaliana]
  misc_feature (1)..(307): Homolog of NCBI NO: 15231987 NR Description: putative heat shock protein
  misc_feature (1)..(308): Homolog of NCBI NO: 15240968 NR Description: heat shock protein 40-like
  misc_feature (1)..(309): Homolog of NCBI NO: 11863723 NR Description: DnaJ like protein [Lycopersicon esculentum]
  misc_feature (1)..(309): Homolog of NCBI NO: 6179940 NR Description: DnaJ-like protein [Nicotiana tabacum]
  misc_feature (1)..(309): Homolog of NCBI NO: 15235310 NR Description: heat-shock protein
  misc_feature (1)..(309): Homolog of NCBI NO: 15225377 NR Description: putative heat shock protein
MKWHPDKNPNNKKDAEAMFKQISEAYEVLSDPQKKAVYDQYGEEGLKGNVPPPDAGGATYFSTGDGPTSFRFNPRNADDIFAEFFGFSSPFGGGRGGTRFSSSMFGDNMFASFGEGGGGGGGSMHHGGARKAAPIENKLPCSLEDLYKGTTKKMRISREIADVSGKTMQVEEILTIDVKPGWKKGTKITFPEKGNEQPGVIPADLVFIIDEKPHPVFTREGNDLIVTQKISLVEALTGYTVNLTTLDGRRLTIPVTNVVHPEYEEVVPKEGMPLQKDQTKRGNLRIKFNIKFPTRLTSEQKTGVKKLLG

SEQ ID NO: 35918 - protein, 292 aa, Arabidopsis thaliana
  peptide (1)..(292): Ceres Seq. ID no. 12482722
  misc_feature (169)..(291): Pfam Name: DnaJ C terminal region Pfam Description: DnaJ C terminal region
  misc_feature (1)..(292): Homolog of NCBI NO: 15218515 NR Description: putative heat-shock protein
  misc_feature (1)..(291): Homolog of NCBI NO: 15239455 NR Description: heat-shock protein - like; protein id:
  misc_feature (1)..(292): Homolog of NCBI NO: 34904486 NR Description: putative heat shock protein 40
  misc_feature (1)..(290): Homolog of NCBI NO: 21618097 NR Description: putative heat shock protein [Arabidopsis thaliana]
  misc_feature (1)..(290): Homolog of NCBI NO: 15231987 NR Description: putative heat shock protein
  misc_feature (1)..(291): Homolog of NCBI NO: 15240968 NR Description: heat shock protein 40-like
  misc_feature (1)..(292): Homolog of NCBI NO: 11863723 NR Description: DnaJ like protein [Lycopersicon esculentum]
  misc_feature (1)..(292): Homolog of NCBI NO: 6179940 NR Description: DnaJ-like protein [Nicotiana tabacum]
  misc_feature (1)..(292): Homolog of NCBI NO: 15235310 NR Description: heat-shock protein
  misc_feature (1)..(292): Homolog of NCBI NO: 15225377 NR Description: putative heat shock protein
MFKQISEAYEVLSDPQKKAVYDQYGEEGLKGNVPPPDAGGATYFSTGDGPTSFRFNPRNADDIFAEFFGFSSPFGGGRGGTRFSSSMFGDNMFASFGEGGGGGGGSMHHGGARKAAPIENKLPCSLEDLYKGTTKKMRISREIADVSGKTMQVEEILTIDVKPGWKKGTKITFPEKGNEQPGVIPADLVFIIDEKPHPVFTREGNDLIVTQKISLVEALTGYTVNLTTLDGRRLTIPVTNVVHPEYEEVVPKEGMPLQKDQTKRGNLRIKFNIKFPTRLTSEQKTGVKKLLG

SEQ ID NO: 35919 - DNA, 1021 bp, Arabidopsis thaliana
  misc_feature (1)..(1021): Ceres Seq. ID no. 13488432
  misc_feature: MA Experiment ID: 108434 Result: Up-regulated in Transcription
  misc_feature: MA Experiment 108434 PARAMETER Experiment Name: At_Root_Tips_cDNA_P Parameter: Tissue Value: Root Tips
  misc_feature: MA Experiment ID: 108488 Result: Up-regulated in Transcription
  misc_feature: MA Experiment ID: 108595 Result: Down-regulated in Transcription
  misc_feature: MA Experiment 108595 PARAMETER Experiment Name: At_Ler-pi_Ovule_cDNA_P Parameter: Plant Line Value: null
  misc_feature: MA Experiment ID: 20000087 Result: Down-regulated in Transcription
  misc_feature: MA Experiment 20000087 PARAMETER Experiment Name: At_100uM_ABA_Mutants_cDNA_P Parameter: Plant Line Value: WS
  misc_feature: MA Experiment 20000087 PARAMETER Experiment Name: At_100uM_ABA_Mutants_cDNA_P Parameter: Timepoint (hr) Value: 6
  misc_feature: MA Experiment 20000087 PARAMETER Experiment Name: At_100uM_ABA_Mutants_cDNA_P Parameter: Tissue Value: Aerial
  misc_feature: MA Experiment 20000087 PARAMETER Experiment Name: At_100uM_ABA_Mutants_cDNA_P Parameter: Treatment Value: 100uM ABA vs. No Treatment
  misc_feature: MA Experiment ID: 20000184 Result: Up-regulated in Transcription
  misc_feature: MA Experiment 20000184 PARAMETER Experiment Name: At_Shoots__P Parameter: Age (day) Value: 7
  misc_feature: MA Experiment 20000184 PARAMETER Experiment Name: At_Shoots__P Parameter: Tissue Value: Shoots vs. Whole Plant
  misc_feature: MA Experiment ID: 20000185 Result: Down-regulated in Transcription
  misc_feature: MA Experiment 20000185 PARAMETER Experiment Name: At_Roots__P Parameter: Age (day) Value: 7 vs. 21
  misc_feature: MA Experiment 20000185 PARAMETER Experiment Name: At_Roots__P Parameter: Organism Value: A. thaliana
  misc_feature: MA Experiment 20000185 PARAMETER Experiment Name: At_Roots__P Parameter: Tissue Value: Roots vs. Whole Plant
  misc_feature: MA Experiment ID: 20000439 Result: Down-regulated in Transcription
  misc_feature: MA Experiment 20000439 PARAMETER Experiment Name: At_Roots__P Parameter: Age (day) Value: 14 vs. 21
  misc_feature: MA Experiment 20000439 PARAMETER Experiment Name: At_Roots__P Parameter: Organism Value: A. thaliana
  misc_feature: MA Experiment 20000439 PARAMETER Experiment Name: At_Roots__P Parameter: Tissue Value: Roots vs. Whole Plant
  misc_feature: MA Experiment ID: 20000794 Result: Down-regulated in Transcription
  misc_feature: MA Experiment 20000794 PARAMETER Experiment Name: At_Petals_P Parameter: Age (day) Value: 23-25 days
  misc_feature: MA Experiment 20000794 PARAMETER Experiment Name: At_Petals_P Parameter: Plant Line Value: WS
  misc_feature: MA Experiment 20000794 PARAMETER Experiment Name: At_Petals_P Parameter: Tissue Value: Petals vs. Whole plant
  misc_feature: MA Experiment ID: 20001451 Result: Down-regulated in Transcription
  misc_feature: MA Experiment 20001451 PARAMETER Experiment Name: At_Far-red-induction_P Parameter: Age (day) Value: 7
  misc_feature: MA Experiment 20001451 PARAMETER Experiment Name: At_Far-red-induction_P Parameter: Light Value: Far-red vs. White
  misc_feature: MA Experiment 20001451 PARAMETER Experiment Name: At_Far-red-induction_P Parameter: Organism Value: A. thaliana
  misc_feature: MA Experiment 20001451 PARAMETER Experiment Name: At_Far-red-induction_P Parameter: Plant Line Value: Columbia
  misc_feature: MA Experiment 20001451 PARAMETER Experiment Name: At_Far-red-induction_P Parameter: Timepoint (hr) Value: 24
  misc_feature: MA Experiment 20001451 PARAMETER Experiment Name: At_Far-red-induction_P Parameter: Tissue Value: Whole Plant
  misc_feature: MA Experiment ID: 20001905 Result: Down-regulated in Transcription
  misc_feature: MA Experiment 20001905 PARAMETER Experiment Name: At_Drought_Reproduction_P Parameter: Age (day) Value: 40
  misc_feature: MA Experiment 20001905 PARAMETER Experiment Name: At_Drought_Reproduction_P Parameter: Organism Value: A. thaliana
  misc_feature: MA Experiment 20001905 PARAMETER Experiment Name: At_Drought_Reproduction_P Parameter: Plant Line Value: WS
  misc_feature: MA Experiment 20001905 PARAMETER Experiment Name: At_Drought_Reproduction_P Parameter: Timepoint (day) Value: 10
  misc_feature: MA Experiment 20001905 PARAMETER Experiment Name: At_Drought_Reproduction_P Parameter: Tissue Value: Rosettes
  misc_feature: MA Experiment 20001905 PARAMETER Experiment Name: At_Drought_Reproduction_P Parameter: Treatment Value: Drought vs. No Drought
ttgacccaaaagaacccataatgtttagagtgaccggaactctctcggcggcatcatctccagcggtggcggcggcgtctttctccgccgctctaagactttccataactcccactctcgctatcgcctctcctccccatctccgttggttctcgaagttttctcgtcaatttctcggcggacgcatctcttcactccgaccacgcattccttctccgtgcccgattcgactctctggtttcccggctctcaaaatgagagcttcgtttagcagtgggagtagtgggagtagtgcaagtagagagattctggtgcagcatttgcttgttaagaataatgatgttgagctctttgccgaactccaaaagaaattcttggatggagaggagatgagtgatcttgcggctgagtattcgatttgtccttccaaaaaggacggtggtatacttggatgggtaaaactgggtcaaatggtaccagagtttgaggaagctgcgtttaaagcagagctgaatcaggtggtgaggtgtagaacccaatttggcttgcacttattgcaagttctatctgagagagaaccggtgaaagatatccaggtagaggagctgcattccaaaatgcaagatccagttttcatggatgaggctcagttaattgatgtcagagaacccaatgagatagagatagcatccttgccaggattcaaagtgttcccactccgccaatttggaacatgggcaccagacatcacttcaaagctgaaccctgagaaggatacatttgtcttgtgcaaggttggtggcaggtcaatgcaggttgccaactggttacagtctcagggcttcaagagtgtgtacaacattactggtgggatacaagcttattctctcaaggttgacccatcaattcctacttactgaaattgagcatcttagtctctttttcttgtatcctcctaattccaaattagatttgcaaattcgtattcaataaactatataatataaggttcatttttgag

SEQ ID NO: 35920 - protein, 305 aa, Arabidopsis thaliana
  peptide (1)..(305): Ceres Seq. ID no. 13488433
  misc_feature (202)..(297): Pfam Name: Rhodanese-like domain Pfam Description: Rhodanese-like domain
  misc_feature (101)..(195): Homolog of NCBI NO: 15893571 NR Description: Peptidil-prolyl cis-trans isomerase [Clostridium
  misc_feature (193)..(305): Homolog of NCBI NO: 37523718 NR Description: hypothetical protein gll4149 [Gloeobacter
  misc_feature (197)..(305): Homolog of NCBI NO: 22297588 NR Description: ORF_ID:tll0044~hypothetical protein
  misc_feature (194)..(305): Homolog of NCBI NO: 23127749 NR Description: hypothetical protein [Nostoc punctiforme]
  misc_feature (192)..(305): Homolog of NCBI NO: 17231535 NR Description: hypothetical protein [Nostoc sp. PCC 7120]
  misc_feature (193)..(305): Homolog of NCBI NO: 16331613 NR Description: hypothetical protein [Synechocystis sp. PCC 6803]
  misc_feature (189)..(305): Homolog of NCBI NO: 23039944 NR Description: hypothetical protein [Trichodesmium erythraeum
  misc_feature (85)..(305): Homolog of NCBI NO: 25456107 NR Description: probable peptidylprolyl isomerase (EC 5.2.1.8)
  misc_feature (7)..(305): Homolog of NCBI NO: 21554407 NR Description: peptidyl-prolyl cis-trans isomerase-like protein
  misc_feature (7)..(305): Homolog of NCBI NO: 18419898 NR Description: peptidyl-prolyl cis-trans isomerase - like
DPKEPIMFRVTGTLSAASSPAVAAASFSAALRLSITPTLAIASPPHLRWFSKFSRQFLGGRISSLRPRIPSPCPIRLSGFPALKMRASFSSGSSGSSASREILVQHLLVKNNDVELFAELQKKFLDGEEMSDLAAEYSICPSKKDGGILGWVKLGQMVPEFEEAAFKAELNQVVRCRTQFGLHLLQVLSEREPVKDIQVEELHSKMQDPVFMDEAQLIDVREPNEIEIASLPGFKVFPLRQFGTWAPDITSKLNPEKDTFVLCKVGGRSMQVANWLQSQGFKSVYNITGGIQAYSLKVDPSIPTY

SEQ ID NO: 35921 - protein, 299 aa, Arabidopsis thaliana
  peptide (1)..(299): Ceres Seq. ID no. 13488434
  misc_feature (196)..(291): Pfam Name: Rhodanese-like domain Pfam Description: Rhodanese-like domain
  misc_feature (95)..(189): Homolog of NCBI NO: 15893571 NR Description: Peptidil-prolyl cis-trans isomerase [Clostridium
  misc_feature (187)..(299): Homolog of NCBI NO: 37523718 NR Description: hypothetical protein gll4149 [Gloeobacter
  misc_feature (191)..(299): Homolog of NCBI NO: 22297588 NR Description: ORF_ID:tll0044~hypothetical protein
  misc_feature (188)..(299): Homolog of NCBI NO: 23127749 NR Description: hypothetical protein [Nostoc punctiforme]
  misc_feature (186)..(299): Homolog of NCBI NO: 17231535 NR Description: hypothetical protein [Nostoc sp. PCC 7120]
  misc_feature (187)..(299): Homolog of NCBI NO: 16331613 NR Description: hypothetical protein [Synechocystis sp. PCC 6803]
  misc_feature (183)..(299): Homolog of NCBI NO: 23039944 NR Description: hypothetical protein [Trichodesmium erythraeum
  misc_feature (79)..(299): Homolog of NCBI NO: 25456107 NR Description: probable peptidylprolyl isomerase (EC 5.2.1.8)
  misc_feature (1)..(299): Homolog of NCBI NO: 21554407 NR Description: peptidyl-prolyl cis-trans isomerase-like protein
  misc_feature (1)..(299): Homolog of NCBI NO: 18419898 NR Description: peptidyl-prolyl cis-trans isomerase - like
MFRVTGTLSAASSPAVAAASFSAALRLSITPTLAIASPPHLRWFSKFSRQFLGGRISSLRPRIPSPCPIRLSGFPALKMRASFSSGSSGSSASREILVQHLLVKNNDVELFAELQKKFLDGEEMSDLAAEYSICPSKKDGGILGWVKLGQMVPEFEEAAFKAELNQVVRCRTQFGLHLLQVLSEREPVKDIQVEELHSKMQDPVFMDEAQLIDVREPNEIEIASLPGFKVFPLRQFGTWAPDITSKLNPEKDTFVLCKVGGRSMQVANWLQSQGFKSVYNITGGIQAYSLKVDPSIPTY

SEQ ID NO: 35922 - protein, 221 aa, Arabidopsis thaliana
  peptide (1)..(221): Ceres Seq. ID no. 13488435
  misc_feature (118)..(213): Pfam Name: Rhodanese-like domain Pfam Description: Rhodanese-like domain
  misc_feature (17)..(111): Homolog of NCBI NO: 15893571 NR Description: Peptidil-prolyl cis-trans isomerase [Clostridium
  misc_feature (109)..(221): Homolog of NCBI NO: 37523718 NR Description: hypothetical protein gll4149 [Gloeobacter
  misc_feature (113)..(221): Homolog of NCBI NO: 22297588 NR Description: ORF_ID:tll0044~hypothetical protein
  misc_feature (110)..(221): Homolog of NCBI NO: 23127749 NR Description: hypothetical protein [Nostoc punctiforme]
  misc_feature (108)..(221): Homolog of NCBI NO: 17231535 NR Description: hypothetical protein [Nostoc sp. PCC 7120]
  misc_feature (109)..(221): Homolog of NCBI NO: 16331613 NR Description: hypothetical protein [Synechocystis sp. PCC 6803]
  misc_feature (105)..(221): Homolog of NCBI NO: 23039944 NR Description: hypothetical protein [Trichodesmium erythraeum
  misc_feature (1)..(221): Homolog of NCBI NO: 25456107 NR Description: probable peptidylprolyl isomerase (EC 5.2.1.8)
  misc_feature (1)..(221): Homolog of NCBI NO: 21554407 NR Description: peptidyl-prolyl cis-trans isomerase-like protein
  misc_feature (1)..(221): Homolog of NCBI NO: 18419898 NR Description: peptidyl-prolyl cis-trans isomerase - like
MRASFSSGSSGSSASREILVQHLLVKNNDVELFAELQKKFLDGEEMSDLAAEYSICPSKKDGGILGWVKLGQMVPEFEEAAFKAELNQVVRCRTQFGLHLLQVLSEREPVKDIQVEELHSKMQDPVFMDEAQLIDVREPNEIEIASLPGFKVFPLRQFGTWAPDITSKLNPEKDTFVLCKVGGRSMQVANWLQSQGFKSVYNITGGIQAYSLKVDPSIPTY

SEQ ID NO: 35923 - DNA, 874 bp, Arabidopsis thaliana
  misc_feature (1)..(874): Ceres Seq. ID no. 12333657
  misc_feature: MA Experiment ID: 108434 Result: Up-regulated in Transcription
  misc_feature: MA Experiment 108434 PARAMETER Experiment Name: At_Root_Tips_cDNA_P Parameter: Tissue Value: Root Tips
  misc_feature: MA Experiment ID: 108463 Result: Down-regulated in Transcription
  misc_feature: MA Experiment 108463 PARAMETER Experiment Name: At_Germinating_Seeds_cDNA_P Parameter: Age (day) Value: 3 vs. 0
  misc_feature: MA Experiment 108463 PARAMETER Experiment Name: At_Germinating_Seeds_cDNA_P Parameter: Tissue Value: Germinating Seeds
  misc_feature: MA Experiment ID: 20000439 Result: Up-regulated in Transcription
  misc_feature: MA Experiment 20000439 PARAMETER Experiment Name: At_Roots__P Parameter: Age (day) Value: 14 vs. 21
  misc_feature: MA Experiment 20000439 PARAMETER Experiment Name: At_Roots__P Parameter: Organism Value: A. thaliana
  misc_feature: MA Experiment 20000439 PARAMETER Experiment Name: At_Roots__P Parameter: Tissue Value: Roots vs. Whole Plant
  misc_feature: MA Experiment ID: 20001451 Result: Down-regulated in Transcription
  misc_feature: MA Experiment 20001451 PARAMETER Experiment Name: At_Far-red-induction_P Parameter: Age (day) Value: 7
  misc_feature: MA Experiment 20001451 PARAMETER Experiment Name: At_Far-red-induction_P Parameter: Light Value: Far-red vs. White
  misc_feature: MA Experiment 20001451 PARAMETER Experiment Name: At_Far-red-induction_P Parameter: Organism Value: A. thaliana
  misc_feature: MA Experiment 20001451 PARAMETER Experiment Name: At_Far-red-induction_P Parameter: Plant Line Value: Columbia
  misc_feature: MA Experiment 20001451 PARAMETER Experiment Name: At_Far-red-induction_P Parameter: Timepoint (hr) Value: 24
  misc_feature: MA Experiment 20001451 PARAMETER Experiment Name: At_Far-red-induction_P Parameter: Tissue Value: Whole Plant
gttagtcatgtcatcgatgacggagaaggagaaggagagagatccaccaccaccacatcaagagattgaagagactactccgttgctcgaaaattctcaaccggaaagtgaattgagatcgacgaccgcggcggcgaaggttcctgaggtggagattcatctgtataagtgtggaaaaggtccgatcgatgtgttcaagtcaaatctcggcggttatgagcaggatcagctcgaggttcgatctattcttgagaaatatggcttgaaagcaatcttcgctttcaacgttgagaaaggtcgtgctgttccgatcagatttcaccctaggaatggtcggtctgtgttgccttatagggatggtgccgtcatttacatcgacggtgaacctcaggattccctgctcaaacccatcaccagaatcattctcggagttgtgattgttacgctcttaataacatttctattgaaagaccctccagcttggatcaagaacaacatctccattgggacctttcctccatgggtgctcgcatgcatagttatagttttcactcgagctagaaagagaaccagggacttcttcaagaagtatggctggtagtttcgcagaccctaacactcgtctcgcttaaaatgtggtcgaaatttgtagtctttcatcgaccatatatatagaggttctcttgccttaacccaacaagttcccttccttggcaagactcttcgtctttgatacgccttgaggcgccaaattgcttgctttcagaactaagagagagcaatcattttcttcatttgcattttgttgaagtttatagttttatgcatttccatgtgtaatgcgatttggtttttgccattttgatggaaactg

SEQ ID NO: 35924 - protein, 199 aa, Arabidopsis thaliana
  peptide (1)..(199): Ceres Seq. ID no. 12333658
  misc_feature (48)..(130): Homolog of NCBI NO: 34906292 NR Description: unnamed protein product [Oryza sativa (japonica
  misc_feature (22)..(199): Homolog of NCBI NO: 34910596 NR Description: B1131B07.26 [Oryza sativa (japonica
  misc_feature (6)..(199): Homolog of NCBI NO: 25373323 NR Description: hypothetical protein F14O23.16 [imported] -
  misc_feature (3)..(199): Homolog of NCBI NO: 18409911 NR Description: expressed protein
LVMSSMTEKEKERDPPPPHQEIEETTPLLENSQPESELRSTTAAAKVPEVEIHLYKCGKGPIDVFKSNLGGYEQDQLEVRSILEKYGLKAIFAFNVEKGRAVPIRFHPRNGRSVLPYRDGAVIYIDGEPQDSLLKPITRIILGVVIVTLLITFLLKDPPAWIKNNISIGTFPPWVLACIVIVFTRARKRTRDFFKKYGW

SEQ ID NO: 35925 - protein, 197 aa, Arabidopsis thaliana
  peptide (1)..(197): Ceres Seq. ID no. 12333659
  misc_feature (46)..(128): Homolog of NCBI NO: 34906292 NR Description: unnamed protein product [Oryza sativa (japonica
  misc_feature (20)..(197): Homolog of NCBI NO: 34910596 NR Description: B1131B07.26 [Oryza sativa (japonica
  misc_feature (4)..(197): Homolog of NCBI NO: 25373323 NR Description: hypothetical protein F14O23.16 [imported] -
  misc_feature (1)..(197): Homolog of NCBI NO: 18409911 NR Description: expressed protein
MSSMTEKEKERDPPPPHQEIEETTPLLENSQPESELRSTTAAAKVPEVEIHLYKCGKGPIDVFKSNLGGYEQDQLEVRSILEKYGLKAIFAFNVEKGRAVPIRFHPRNGRSVLPYRDGAVIYIDGEPQDSLLKPITRIILGVVIVTLLITFLLKDPPAWIKNNISIGTFPPWVLACIVIVFTRARKRTRDFFKKYGW

SEQ ID NO: 35926 - protein, 194 aa, Arabidopsis thaliana
  peptide (1)..(194): Ceres Seq. ID no. 12333660
  misc_feature (43)..(125): Homolog of NCBI NO: 34906292 NR Description: unnamed protein product [Oryza sativa (japonica
  misc_feature (17)..(194): Homolog of NCBI NO: 34910596 NR Description: B1131B07.26 [Oryza sativa (japonica
  misc_feature (1)..(194): Homolog of NCBI NO: 25373323 NR Description: hypothetical protein F14O23.16 [imported] -
  misc_feature (1)..(194): Homolog of NCBI NO: 18409911 NR Description: expressed protein
MTEKEKERDPPPPHQEIEETTPLLENSQPESELRSTTAAAKVPEVEIHLYKCGKGPIDVFKSNLGGYEQDQLEVRSILEKYGLKAIFAFNVEKGRAVPIRFHPRNGRSVLPYRDGAVIYIDGEPQDSLLKPITRIILGVVIVTLLITFLLKDPPAWIKNNISIGTFPPWVLACIVIVFTRARKRTRDFFKKYGW

SEQ ID NO: 35927 - DNA, 805 bp, Arabidopsis thaliana
  misc_feature (1)..(805): Ceres Seq. ID no. 12333653
  misc_feature: MA Experiment ID: 108434 Result: Up-regulated in Transcription
  misc_feature: MA Experiment 108434 PARAMETER Experiment Name: At_Root_Tips_cDNA_P Parameter: Tissue Value: Root Tips
  misc_feature: MA Experiment ID: 108435 Result: Up-regulated in Transcription
  misc_feature: MA Experiment 108435 PARAMETER Experiment Name: At_stm_Mutants_cDNA_P Parameter: Plant Line Value: wt Landsburg vs stm
  misc_feature: MA Experiment 108435 PARAMETER Experiment Name: At_stm_Mutants_cDNA_P Parameter: Tissue Value: Shoot Apical Meristem Region
  misc_feature: MA Experiment ID: 108461 Result: Down-regulated in Transcription
  misc_feature: MA Experiment 108461 PARAMETER Experiment Name: At_Germinating_Seeds_cDNA_P Parameter: Age (day) Value: 1 vs. 0
  misc_feature: MA Experiment 108461 PARAMETER Experiment Name: At_Germinating_Seeds_cDNA_P Parameter: Tissue Value: Germinating Seeds
  misc_feature: MA Experiment ID: 108462 Result: Down-regulated in Transcription
  misc_feature: MA Experiment 108462 PARAMETER Experiment Name: At_Germinating_Seeds_cDNA_P Parameter: Age (day) Value: 2 vs. 0
  misc_feature: MA Experiment 108462 PARAMETER Experiment Name: At_Germinating_Seeds_cDNA_P Parameter: Tissue Value: Germinating Seeds
  misc_feature: MA Experiment ID: 108463 Result: Down-regulated in Transcription
  misc_feature: MA Experiment 108463 PARAMETER Experiment Name: At_Germinating_Seeds_cDNA_P Parameter: Age (day) Value: 3 vs. 0
  misc_feature: MA Experiment 108463 PARAMETER Experiment Name: At_Germinating_Seeds_cDNA_P Parameter: Tissue Value: Germinating Seeds
  misc_feature: MA Experiment ID: 108464 Result: Down-regulated in Transcription
  misc_feature: MA Experiment 108464 PARAMETER Experiment Name: At_Germinating_Seeds_cDNA_P Parameter: Age (day) Value: 4 vs. 0
  misc_feature: MA Experiment 108464 PARAMETER Experiment Name: At_Germinating_Seeds_cDNA_P Parameter: Tissue Value: Germinating Seeds
  misc_feature: MA Experiment ID: 20000179 Result: Down-regulated in Transcription
  misc_feature: MA Experiment 20000179 PARAMETER Experiment Name: At_Germinating_Seeds_P Parameter: Age (hr) Value: 6 vs. 0
  misc_feature: MA Experiment 20000179 PARAMETER Experiment Name: At_Germinating_Seeds_P Parameter: Tissue Value: Germinating Seeds
  misc_feature: MA Experiment ID: 20000180 Result: Down-regulated in Transcription
  misc_feature: MA Experiment 20000180 PARAMETER Experiment Name: At_Germinating_Seeds_P Parameter: Age (hr) Value: 24 vs. 0
  misc_feature: MA Experiment 20000180 PARAMETER Experiment Name: At_Germinating_Seeds_P Parameter: Tissue Value: Germinating Seeds
  misc_feature: MA Experiment ID: 20001557 Result: Up-regulated in Transcription
  misc_feature: MA Experiment 20001557 PARAMETER Experiment Name: At_Drought_Soil_Dry_P Parameter: Age (day) Value: 27
  misc_feature: MA Experiment 20001557 PARAMETER Experiment Name: At_Drought_Soil_Dry_P Parameter: Organism Value: A. thaliana
  misc_feature: MA Experiment 20001557 PARAMETER Experiment Name: At_Drought_Soil_Dry_P Parameter: Plant Line Value: WS
  misc_feature: MA Experiment 20001557 PARAMETER Experiment Name: At_Drought_Soil_Dry_P Parameter: Post Timepoint (hr) Value: 3
  misc_feature: MA Experiment 20001557 PARAMETER Experiment Name: At_Drought_Soil_Dry_P Parameter: Post-Treatment Value: Re-Water vs. No Drought
  misc_feature: MA Experiment 20001557 PARAMETER Experiment Name: At_Drought_Soil_Dry_P Parameter: Timepoint (day) Value: 13
  misc_feature: MA Experiment 20001557 PARAMETER Experiment Name: At_Drought_Soil_Dry_P Parameter: Treatment Value: Drought vs. No Drought
  misc_feature: MA Experiment ID: 20001558 Result: Up-regulated in Transcription
  misc_feature: MA Experiment 20001558 PARAMETER Experiment Name: At_Drought_Soil_Dry_P Parameter: Age (day) Value: 27
  misc_feature: MA Experiment 20001558 PARAMETER Experiment Name: At_Drought_Soil_Dry_P Parameter: Organism Value: A. thaliana
  misc_feature: MA Experiment 20001558 PARAMETER Experiment Name: At_Drought_Soil_Dry_P Parameter: Plant Line Value: WS
  misc_feature: MA Experiment 20001558 PARAMETER Experiment Name: At_Drought_Soil_Dry_P Parameter: Post Timepoint (hr) Value: 6
  misc_feature: MA Experiment 20001558 PARAMETER Experiment Name: At_Drought_Soil_Dry_P Parameter: Post-Treatment Value: Re-Water vs. No Drought
  misc_feature: MA Experiment 20001558 PARAMETER Experiment Name: At_Drought_Soil_Dry_P Parameter: Timepoint (day) Value: 13
  misc_feature: MA Experiment 20001558 PARAMETER Experiment Name: At_Drought_Soil_Dry_P Parameter: Treatment Value: Drought vs. No Drought
agcattttctttcagctcaaacccaagaacctcatcgccgattatttcttcattcttactctatcccgcgccgattaatctctctcagaaccgtccgagatgaggaagctcaagtatcacgagaagaagcttataaagaaagtaaatttcttagaatggaaaagagaaggtaaccatcgggaaaacgagattacgtatcgataccacatgggctctcgtgatgattacaaaaagtattcaggattgtgtaggatgttgcagaaactgacgaatataatgaaacaaatggatcctgcagatccttttcgtattcagatgactgatatgcttttggagaagctatataacatgggtgttataccgactaggaaaagcttgactctaactgagcggttatcagtttcatccttctgtaggcgtaggctatctactgtgctggttcacctgaagtttgcagagcaccacaaagaagctgtgacatacatagagcaaggacacgttcgtgtaggaccagaaacaattactgatccagctttcttagtaactcggaacatggaagatttcatcacttgggttgattcatccaagattaaacgaaaggttcttgagtacaatgacacattggatgattatgacatgcttgcttagctttgaggaagttaaaaaagactgatgttttgtaaaagccaaaaaaggttcactgctactactattgcagggtttgtttggatttttgaatatgcaaatgtgctactattcccttgtctttaatcttactttcgatctatttgcaagaagaaacttg

SEQ ID NO: 35928 - protein, 182 aa, Arabidopsis thaliana
  peptide (1)..(182): Ceres Seq. ID no. 12333654
  misc_feature (1)..(106): Pfam Name: Ribosomal protein S4/S9 N-terminal domain Pfam Description: Ribosomal protein S4/S9 N-terminal domain
  misc_feature (1)..(168): Homolog of NCBI NO: 29124591 NR Description: Similar to chromosome 15 open reading frame 12
  misc_feature (1)..(181): Homolog of NCBI NO: 19115815 NR Description: putative component of U3 snoRNP, required for
  misc_feature (1)..(179): Homolog of NCBI NO: 6321942 NR Description: part of small (ribosomal) subunit (SSU)
  misc_feature (1)..(182): Homolog of NCBI NO: 8922794 NR Description: chromosome 15 open reading frame 12
  misc_feature (1)..(180): Homolog of NCBI NO: 34864645 NR Description: similar to RIKEN cDNA 1190002L16 [Rattus
  misc_feature (1)..(180): Homolog of NCBI NO: 19527196 NR Description: RIKEN cDNA 1190002L16 [Mus musculus]
  misc_feature (1)..(182): Homolog of NCBI NO: 38346067 NR Description: OSJNBa0084K01.7 [Oryza sativa (japonica
  misc_feature (1)..(182): Homolog of NCBI NO: 11358773 NR Description: ribosomal protein-like - Arabidopsis thaliana
  misc_feature (1)..(182): Homolog of NCBI NO: 18417773 NR Description: ribosomal protein-like
  misc_feature (1)..(182): Homolog of NCBI NO: 21554411 NR Description: ribosomal protein-like [Arabidopsis thaliana]
MRKLKYHEKKLIKKVNFLEWKREGNHRENEITYRYHMGSRDDYKKYSGLCRMLQKLTNIMKQMDPADPFRIQMTDMLLEKLYNMGVIPTRKSLTLTERLSVSSFCRRRLSTVLVHLKFAEHHKEAVTYIEQGHVRVGPETITDPAFLVTRNMEDFITWVDSSKIKRKVLEYNDTLDDYDMLA

SEQ ID NO: 35929 - protein, 146 aa, Arabidopsis thaliana
  peptide (1)..(146): Ceres Seq. ID no. 12333655
  misc_feature (1)..(70): Pfam Name: Ribosomal protein S4/S9 N-terminal domain Pfam Description: Ribosomal protein S4/S9 N-terminal domain
  misc_feature (1)..(132): Homolog of NCBI NO: 29124591 NR Description: Similar to chromosome 15 open reading frame 12
  misc_feature (1)..(145): Homolog of NCBI NO: 19115815 NR Description: putative component of U3 snoRNP, required for
  misc_feature (1)..(143): Homolog of NCBI NO: 6321942 NR Description: part of small (ribosomal) subunit (SSU)
  misc_feature (1)..(146): Homolog of NCBI NO: 8922794 NR Description: chromosome 15 open reading frame 12
  misc_feature (1)..(144): Homolog of NCBI NO: 34864645 NR Description: similar to RIKEN cDNA 1190002L16 [Rattus
  misc_feature (1)..(144): Homolog of NCBI NO: 19527196 NR Description: RIKEN cDNA 1190002L16 [Mus musculus]
  misc_feature (1)..(146): Homolog of NCBI NO: 38346067 NR Description: OSJNBa0084K01.7 [Oryza sativa (japonica
  misc_feature (1)..(146): Homolog of NCBI NO: 11358773 NR Description: ribosomal protein-like - Arabidopsis thaliana
  misc_feature (1)..(146): Homolog of NCBI NO: 18417773 NR Description: ribosomal protein-like
  misc_feature (1)..(146): Homolog of NCBI NO: 21554411 NR Description: ribosomal protein-like [Arabidopsis thaliana]
MGSRDDYKKYSGLCRMLQKLTNIMKQMDPADPFRIQMTDMLLEKLYNMGVIPTRKSLTLTERLSVSSFCRRRLSTVLVHLKFAEHHKEAVTYIEQGHVRVGPETITDPAFLVTRNMEDFITWVDSSKIKRKVLEYNDTLDDYDMLA

SEQ ID NO: 35930 - protein, 131 aa, Arabidopsis thaliana
  peptide (1)..(131): Ceres Seq. ID no. 12333656
  misc_feature (1)..(55): Pfam Name: Ribosomal protein S4/S9 N-terminal domain Pfam Description: Ribosomal protein S4/S9 N-terminal domain
  misc_feature (1)..(117): Homolog of NCBI NO: 29124591 NR Description: Similar to chromosome 15 open reading frame 12
  misc_feature (1)..(130): Homolog of NCBI NO: 19115815 NR Description: putative component of U3 snoRNP, required for
  misc_feature (1)..(128): Homolog of NCBI NO: 6321942 NR Description: part of small (ribosomal) subunit (SSU)
  misc_feature (1)..(131): Homolog of NCBI NO: 8922794 NR Description: chromosome 15 open reading frame 12
  misc_feature (1)..(129): Homolog of NCBI NO: 34864645 NR Description: similar to RIKEN cDNA 1190002L16 [Rattus
  misc_feature (1)..(129): Homolog of NCBI NO: 19527196 NR Description: RIKEN cDNA 1190002L16 [Mus musculus]
  misc_feature (1)..(131): Homolog of NCBI NO: 38346067 NR Description: OSJNBa0084K01.7 [Oryza sativa (japonica
  misc_feature (1)..(131): Homolog of NCBI NO: 11358773 NR Description: ribosomal protein-like - Arabidopsis thaliana
  misc_feature (1)..(131): Homolog of NCBI NO: 18417773 NR Description: ribosomal protein-like
  misc_feature (1)..(131): Homolog of NCBI NO: 21554411 NR Description: ribosomal protein-like [Arabidopsis thaliana]
MLQKLTNIMKQMDPADPFRIQMTDMLLEKLYNMGVIPTRKSLTLTERLSVSSFCRRRLSTVLVHLKFAEHHKEAVTYIEQGHVRVGPETITDPAFLVTRNMEDFITWVDSSKIKRKVLEYNDTLDDYDMLA

SEQ ID NO: 35931 - DNA, 776 bp, Arabidopsis thaliana
  misc_feature (1)..(776): Ceres Seq. ID no. 13490249
  misc_feature: MA Experiment ID: 108434 Result: Down-regulated in Transcription
  misc_feature: MA Experiment 108434 PARAMETER Experiment Name: At_Root_Tips_cDNA_P Parameter: Tissue Value: Root Tips
  misc_feature: MA Experiment ID: 108462 Result: Up-regulated in Transcription
  misc_feature: MA Experiment 108462 PARAMETER Experiment Name: At_Germinating_Seeds_cDNA_P Parameter: Age (day) Value: 2 vs. 0
  misc_feature: MA Experiment 108462 PARAMETER Experiment Name: At_Germinating_Seeds_cDNA_P Parameter: Tissue Value: Germinating Seeds
  misc_feature: MA Experiment ID: 108464 Result: Up-regulated in Transcription
  misc_feature: MA Experiment 108464 PARAMETER Experiment Name: At_Germinating_Seeds_cDNA_P Parameter: Age (day) Value: 4 vs. 0
  misc_feature: MA Experiment 108464 PARAMETER Experiment Name: At_Germinating_Seeds_cDNA_P Parameter: Tissue Value: Germinating Seeds
  misc_feature: MA Experiment ID: 108488 Result: Down-regulated in Transcription
  misc_feature: MA Experiment ID: 108561 Result: Up-regulated in Transcription
  misc_feature: MA Experiment 108561 PARAMETER Experiment Name: At_100uM_ABA_cDNA_P Parameter: Timepoint (hr) Value: 6
  misc_feature: MA Experiment 108561 PARAMETER Experiment Name: At_100uM_ABA_cDNA_P Parameter: Tissue Value: Aerial
  misc_feature: MA Experiment 108561 PARAMETER Experiment Name: At_100uM_ABA_cDNA_P Parameter: Treatment Value: 100uM ABA vs. No Treatment
  misc_feature: MA Experiment ID: 108573 Result: Up-regulated in Transcription
  misc_feature: MA Experiment 108573 PARAMETER Experiment Name: At_Drought_cDNA_P Parameter: Timepoint (hr) Value: 6
  misc_feature: MA Experiment 108573 PARAMETER Experiment Name: At_Drought_cDNA_P Parameter: Tissue Value: Aerial
  misc_feature: MA Experiment 108573 PARAMETER Experiment Name: At_Drought_cDNA_P Parameter: Treatment Value: Drought vs. No Drought
  misc_feature: MA Experiment ID: 108585 Result: Up-regulated in Transcription
  misc_feature: MA Experiment 108585 PARAMETER Experiment Name: At_5mM_NaNP_cDNA_P Parameter: Timepoint (hr) Value: 6
  misc_feature: MA Experiment 108585 PARAMETER Experiment Name: At_5mM_NaNP_cDNA_P Parameter: Tissue Value: Aerial
  misc_feature: MA Experiment 108585 PARAMETER Experiment Name: At_5mM_NaNP_cDNA_P Parameter: Treatment Value: null
  misc_feature: MA Experiment ID: 108594 Result: Down-regulated in Transcription
  misc_feature: MA Experiment 108594 PARAMETER Experiment Name: At_Ler-rhl_Root_cDNA_P Parameter: Plant Line Value: null
  misc_feature: MA Experiment ID: 108595 Result: Down-regulated in Transcription
  misc_feature: MA Experiment 108595 PARAMETER Experiment Name: At_Ler-pi_Ovule_cDNA_P Parameter: Plant Line Value: null
  misc_feature: MA Experiment ID: 108605 Result: Up-regulated in Transcription
  misc_feature: MA Experiment 108605 PARAMETER Experiment Name: At_100uM_ABA_cDNA_P Parameter: Timepoint (hr) Value: 6
  misc_feature: MA Experiment 108605 PARAMETER Experiment Name: At_100uM_ABA_cDNA_P Parameter: Tissue Value: Aerial
  misc_feature: MA Experiment 108605 PARAMETER Experiment Name: At_100uM_ABA_cDNA_P Parameter: Treatment Value: 100uM ABA vs. No Treatment
  misc_feature: MA Experiment ID: 108607 Result: Up-regulated in Transcription
  misc_feature: MA Experiment 108607 PARAMETER Experiment Name: At_100uM_ABA_cDNA_P Parameter: Timepoint (hr) Value: 4
  misc_feature: MA Experiment 108607 PARAMETER Experiment Name: At_100uM_ABA_cDNA_P Parameter: Tissue Value: Aerial
  misc_feature: MA Experiment 108607 PARAMETER Experiment Name: At_100uM_ABA_cDNA_P Parameter: Treatment Value: 100uM ABA vs. No Treatment
  misc_feature: MA Experiment ID: 108668 Result: Up-regulated in Transcription
  misc_feature: MA Experiment 108668 PARAMETER Experiment Name: At_2mM_SA_cDNA_P Parameter: Plant Line Value: WS
  misc_feature: MA Experiment 108668 PARAMETER Experiment Name: At_2mM_SA_cDNA_P Parameter: Timepoint (hr) Value: 6
  misc_feature: MA Experiment 108668 PARAMETER Experiment Name: At_2mM_SA_cDNA_P Parameter: Treatment Value: 2mM SA vs. No Treatment
  misc_feature: MA Experiment ID: 20000070 Result: Up-regulated in Transcription
  misc_feature: MA Experiment 20000070 PARAMETER Experiment Name: At_100uM_ABA_Mutants_cDNA_P Parameter: Plant Line Value: CS24
  misc_feature: MA Experiment 20000070 PARAMETER Experiment Name: At_100uM_ABA_Mutants_cDNA_P Parameter: Timepoint (hr) Value: 6
  misc_feature: MA Experiment 20000070 PARAMETER Experiment Name: At_100uM_ABA_Mutants_cDNA_P Parameter: Tissue Value: Aerial
  misc_feature: MA Experiment 20000070 PARAMETER Experiment Name: At_100uM_ABA_Mutants_cDNA_P Parameter: Treatment Value: 100uM ABA vs. No Treatment
  misc_feature: MA Experiment ID: 20000071 Result: Up-regulated in Transcription
  misc_feature: MA Experiment 20000071 PARAMETER Experiment Name: At_100uM_ABA_Mutants_cDNA_P Parameter: Plant Line Value: CS8104
  misc_feature: MA Experiment 20000071 PARAMETER Experiment Name: At_100uM_ABA_Mutants_cDNA_P Parameter: Timepoint (hr) Value: 6
  misc_feature: MA Experiment 20000071 PARAMETER Experiment Name: At_100uM_ABA_Mutants_cDNA_P Parameter: Tissue Value: Aerial
  misc_feature: MA Experiment 20000071 PARAMETER Experiment Name: At_100uM_ABA_Mutants_cDNA_P Parameter: Treatment Value: 100uM ABA vs. No Treatment
  misc_feature: MA Experiment ID: 20000072 Result: Up-regulated in Transcription
  misc_feature: MA Experiment 20000072 PARAMETER Experiment Name: At_100uM_ABA_Mutants_cDNA_P Parameter: Plant Line Value: CS8105
  misc_feature: MA Experiment 20000072 PARAMETER Experiment Name: At_100uM_ABA_Mutants_cDNA_P Parameter: Timepoint (hr) Value: 6
  misc_feature: MA Experiment 20000072 PARAMETER Experiment Name: At_100uM_ABA_Mutants_cDNA_P Parameter: Tissue Value: Aerial
  misc_feature: MA Experiment 20000072 PARAMETER Experiment Name: At_100uM_ABA_Mutants_cDNA_P Parameter: Treatment Value: 100uM ABA vs. No Treatment
  misc_feature: MA Experiment ID: 20000117 Result: Up-regulated in Transcription
  misc_feature: MA Experiment 20000117 PARAMETER Experiment Name: At_100uM_ABA_Mutants_cDNA_P Parameter: Plant Line Value: Columbia
  misc_feature: MA Experiment 20000117 PARAMETER Experiment Name: At_100uM_ABA_Mutants_cDNA_P Parameter: Timepoint (hr) Value: 6
  misc_feature: MA Experiment 20000117 PARAMETER Experiment Name: At_100uM_ABA_Mutants_cDNA_P Parameter: Tissue Value: Aerial
  misc_feature: MA Experiment 20000117 PARAMETER Experiment Name: At_100uM_ABA_Mutants_cDNA_P Parameter: Treatment Value: 100uM ABA vs. No Treatment
  misc_feature: MA Experiment ID: 20000169 Result: Up-regulated in Transcription
  misc_feature: MA Experiment 20000169 PARAMETER Experiment Name: At_100uM_ABA_P Parameter: Age (day) Value: 14
  misc_feature: MA Experiment 20000169 PARAMETER Experiment Name: At_100uM_ABA_P Parameter: Organism Value: A. thaliana
  misc_feature: MA Experiment 20000169 PARAMETER Experiment Name: At_100uM_ABA_P Parameter: Plant Line Value: WS
  misc_feature: MA Experiment 20000169 PARAMETER Experiment Name: At_100uM_ABA_P Parameter: Timepoint (hr) Value: 6
  misc_feature: MA Experiment 20000169 PARAMETER Experiment Name: At_100uM_ABA_P Parameter: Tissue Value: Aerial
  misc_feature: MA Experiment 20000169 PARAMETER Experiment Name: At_100uM_ABA_P Parameter: Treatment Value: 100uM ABA vs. No Treatment
  misc_feature: MA Experiment ID: 20000180 Result: Up-regulated in Transcription
  misc_feature: MA Experiment 20000180 PARAMETER Experiment Name: At_Germinating_Seeds_P Parameter: Age (hr) Value: 24 vs. 0
  misc_feature: MA Experiment 20000180 PARAMETER Experiment Name: At_Germinating_Seeds_P Parameter: Tissue Value: Germinating Seeds
  misc_feature: MA Experiment ID: 20000182 Result: Up-regulated in Transcription
  misc_feature: MA Experiment 20000182 PARAMETER Experiment Name: At_2mM_SA_P Parameter: Age (day) Value: 14
  misc_feature: MA Experiment 20000182 PARAMETER Experiment Name: At_2mM_SA_P Parameter: Organism Value: A. thaliana
  misc_feature: MA Experiment 20000182 PARAMETER Experiment Name: At_2mM_SA_P Parameter: Plant Line Value: WS
  misc_feature: MA Experiment 20000182 PARAMETER Experiment Name: At_2mM_SA_P Parameter: Timepoint (hr) Value: 6
  misc_feature: MA Experiment 20000182 PARAMETER Experiment Name: At_2mM_SA_P Parameter: Tissue Value: Aerial
  misc_feature: MA Experiment 20000182 PARAMETER Experiment Name: At_2mM_SA_P Parameter: Treatment Value: 2mM SA vs. No Treatment
  misc_feature: MA Experiment ID: 20000185 Result: Up-regulated in Transcription
  misc_feature: MA Experiment 20000185 PARAMETER Experiment Name: At_Roots__P Parameter: Age (day) Value: 7 vs. 21
  misc_feature: MA Experiment 20000185 PARAMETER Experiment Name: At_Roots__P Parameter: Organism Value: A. thaliana
  misc_feature: MA Experiment 20000185 PARAMETER Experiment Name: At_Roots__P Parameter: Tissue Value: Roots vs. Whole Plant
  misc_feature: MA Experiment ID: 20000437 Result: Up-regulated in Transcription
  misc_feature: MA Experiment 20000437 PARAMETER Experiment Name: At_Drought_P Parameter: Age (day) Value: 8
  misc_feature: MA Experiment 20000437 PARAMETER Experiment Name: At_Drought_P Parameter: Organism Value: A. thaliana
  misc_feature: MA Experiment 20000437 PARAMETER Experiment Name: At_Drought_P Parameter: Plant Line Value: WS
  misc_feature: MA Experiment 20000437 PARAMETER Experiment Name: At_Drought_P Parameter: Timepoint (hr) Value: 24
  misc_feature: MA Experiment 20000437 PARAMETER Experiment Name: At_Drought_P Parameter: Tissue Value: Whole Plant
  misc_feature: MA Experiment 20000437 PARAMETER Experiment Name: At_Drought_P Parameter: Treatment Value: Drought vs. No Drought
  misc_feature: MA Experiment ID: 20000439 Result: Up-regulated in Transcription
  misc_feature: MA Experiment 20000439 PARAMETER Experiment Name: At_Roots__P Parameter: Age (day) Value: 14 vs. 21
  misc_feature: MA Experiment 20000439 PARAMETER Experiment Name: At_Roots__P Parameter: Organism Value: A. thaliana
  misc_feature: MA Experiment 20000439 PARAMETER Experiment Name: At_Roots__P Parameter: Tissue Value: Roots vs. Whole Plant
  misc_feature: MA Experiment ID: 20000794 Result: Up-regulated in Transcription
  misc_feature: MA Experiment 20000794 PARAMETER Experiment Name: At_Petals_P Parameter: Age (day) Value: 23-25 days
  misc_feature: MA Experiment 20000794 PARAMETER Experiment Name: At_Petals_P Parameter: Plant Line Value: WS
  misc_feature: MA Experiment 20000794 PARAMETER Experiment Name: At_Petals_P Parameter: Tissue Value: Petals vs. Whole plant
  misc_feature: MA Experiment ID: 20001905 Result: Up-regulated in Transcription
  misc_feature: MA Experiment 20001905 PARAMETER Experiment Name: At_Drought_Reproduction_P Parameter: Age (day) Value: 40
  misc_feature: MA Experiment 20001905 PARAMETER Experiment Name: At_Drought_Reproduction_P Parameter: Organism Value: A. thaliana
  misc_feature: MA Experiment 20001905 PARAMETER Experiment Name: At_Drought_Reproduction_P Parameter: Plant Line Value: WS
  misc_feature: MA Experiment 20001905 PARAMETER Experiment Name: At_Drought_Reproduction_P Parameter: Timepoint (day) Value: 10
  misc_feature: MA Experiment 20001905 PARAMETER Experiment Name: At_Drought_Reproduction_P Parameter: Tissue Value: Rosettes
  misc_feature: MA Experiment 20001905 PARAMETER Experiment Name: At_Drought_Reproduction_P Parameter: Treatment Value: Drought vs. No Drought
aaccatatatatacacacaaaatatttgttaacaaaaagatttatatttcttctcttctttgttcataactaagaactcagaaagagaccaacgacactgcaaatggcggatgaatctccaaagtctatctacgacttcaccgtcaaggatatcggaggtaacgatgtgagtttggaccaatacaaaggcaaaactcttttggttgtaaacgttgcttccaaatgtggtctgacggatgcgaactacaaggaactgaatgttctgtacgagaaatacaaggagcaagggttggagatattagcattcccgtgtaatcagttcttaggacaagaaccaggaaacaatgaagagattcaacaaactgtctgcaccaggttcaaagctgaattccccatctttgacaaggtggatgtgaacggtaagaacacggcaccattatacaagtacttgaaagcagagaaaggaggtttgctcattgatgctatcaaatggaacttcaccaaattcttggtttctcctgatggcaaggtcttacagagatattctcccagaacctctcctcttcaattcgagaaggacattcaaactgcgttgggacaggcctcttcttaatcaccagaagaagaagtttcaagaactttcgtttggtccaaattatgatcttagaatcatcaacattgcaaacttattttctttgaattctatcattcttgttttaaataattgatgtattcgatgtcttttcatgggatgatatatcatatattatcatgcg

SEQ ID NO: 35932 - protein, 169 aa, Arabidopsis thaliana
  peptide (1)..(169): Ceres Seq. ID no. 13490250
  misc_feature (8)..(117): Pfam Name: Glutathione peroxidase Pfam Description: Glutathione peroxidase
  misc_feature (1)..(167): Homolog of NCBI NO: 485512 NR Description: glutathione peroxidase (EC 1.11.1.9) - sweet
  misc_feature (1)..(167): Homolog of NCBI NO: 20138338 NR Description: Probable phospholipid hydroperoxide glutathione
  misc_feature (1)..(167): Homolog of NCBI NO: 232190 NR Description: Probable phospholipid hydroperoxide glutathione
  misc_feature (1)..(165): Homolog of NCBI NO: 20138384 NR Description: Probable phospholipid hydroperoxide glutathione
  misc_feature (2)..(167): Homolog of NCBI NO: 21360380 NR Description: glutathione peroxidase 1 [Oryza sativa]
  misc_feature (7)..(164): Homolog of NCBI NO: 22329066 NR Description: glutathione peroxidase, putative [Arabidopsis
  misc_feature (1)..(161): Homolog of NCBI NO: 21068666 NR Description: putative phospholipid hydroperoxide glutathione
  misc_feature (1)..(167): Homolog of NCBI NO: 17646156 NR Description: phospholipid hydroperoxide glutathione peroxidase
  misc_feature (1)..(167): Homolog of NCBI NO: 31872080 NR Description: phospholipid hydroperoxide glutathione peroxidase
  misc_feature (1)..(169): Homolog of NCBI NO: 15225103 NR Description: glutathione peroxidase, putative [Arabidopsis
MADESPKSIYDFTVKDIGGNDVSLDQYKGKTLLVVNVASKCGLTDANYKELNVLYEKYKEQGLEILAFPCNQFLGQEPGNNEEIQQTVCTRFKAEFPIFDKVDVNGKNTAPLYKYLKAEKGGLLIDAIKWNFTKFLVSPDGKVLQRYSPRTSPLQFEKDIQTALGQASS

SEQ ID NO: 35933 - DNA, 982 bp, Arabidopsis thaliana
  misc_feature (1)..(982): Ceres Seq. ID no. 12482664
  misc_feature: MA Experiment ID: 108434 Result: Up-regulated in Transcription
  misc_feature: MA Experiment 108434 PARAMETER Experiment Name: At_Root_Tips_cDNA_P Parameter: Tissue Value: Root Tips
  misc_feature: MA Experiment ID: 108462 Result: Down-regulated in Transcription
  misc_feature: MA Experiment 108462 PARAMETER Experiment Name: At_Germinating_Seeds_cDNA_P Parameter: Age (day) Value: 2 vs. 0
  misc_feature: MA Experiment 108462 PARAMETER Experiment Name: At_Germinating_Seeds_cDNA_P Parameter: Tissue Value: Germinating Seeds
  misc_feature: MA Experiment ID: 108463 Result: Down-regulated in Transcription
  misc_feature: MA Experiment 108463 PARAMETER Experiment Name: At_Germinating_Seeds_cDNA_P Parameter: Age (day) Value: 3 vs. 0
  misc_feature: MA Experiment 108463 PARAMETER Experiment Name: At_Germinating_Seeds_cDNA_P Parameter: Tissue Value: Germinating Seeds
  misc_feature: MA Experiment ID: 108464 Result: Down-regulated in Transcription
  misc_feature: MA Experiment 108464 PARAMETER Experiment Name: At_Germinating_Seeds_cDNA_P Parameter: Age (day) Value: 4 vs. 0
  misc_feature: MA Experiment 108464 PARAMETER Experiment Name: At_Germinating_Seeds_cDNA_P Parameter: Tissue Value: Germinating Seeds
  misc_feature: MA Experiment ID: 20000088 Result: Up-regulated in Transcription
  misc_feature: MA Experiment 20000088 PARAMETER Experiment Name: At_100uM_ABA_Mutants_cDNA_P Parameter: Plant Line Value: Landsberg
  misc_feature: MA Experiment 20000088 PARAMETER Experiment Name: At_100uM_ABA_Mutants_cDNA_P Parameter: Timepoint (hr) Value: 6
  misc_feature: MA Experiment 20000088 PARAMETER Experiment Name: At_100uM_ABA_Mutants_cDNA_P Parameter: Tissue Value: Aerial
  misc_feature: MA Experiment 20000088 PARAMETER Experiment Name: At_100uM_ABA_Mutants_cDNA_P Parameter: Treatment Value: 100uM ABA vs. No Treatment
  misc_feature: MA Experiment ID: 20000227 Result: Up-regulated in Transcription
  misc_feature: MA Experiment 20000227 PARAMETER Experiment Name: At_Root-Tips-vs-Tops_P Parameter: Tissue Value: Root Tips vs. Root Tops
  misc_feature: MA Experiment ID: 20000451 Result: Down-regulated in Transcription
  misc_feature: MA Experiment 20000451 PARAMETER Experiment Name: At_CS6879_Shoots-Roots_P Parameter: Age (day) Value: 14
  misc_feature: MA Experiment 20000451 PARAMETER Experiment Name: At_CS6879_Shoots-Roots_P Parameter: Organism Value: A. thaliana
  misc_feature: MA Experiment 20000451 PARAMETER Experiment Name: At_CS6879_Shoots-Roots_P Parameter: Plant Line Value: CS6879 vs. WS
  misc_feature: MA Experiment 20000451 PARAMETER Experiment Name: At_CS6879_Shoots-Roots_P Parameter: Tissue Value: Roots
  misc_feature: MA Experiment ID: 20000452 Result: Down-regulated in Transcription
  misc_feature: MA Experiment 20000452 PARAMETER Experiment Name: At_CS6879_Shoots-Roots_P Parameter: Age (day) Value: 14
  misc_feature: MA Experiment 20000452 PARAMETER Experiment Name: At_CS6879_Shoots-Roots_P Parameter: Organism Value: A. thaliana
  misc_feature: MA Experiment 20000452 PARAMETER Experiment Name: At_CS6879_Shoots-Roots_P Parameter: Plant Line Value: CS6879 vs. WS
  misc_feature: MA Experiment 20000452 PARAMETER Experiment Name: At_CS6879_Shoots-Roots_P Parameter: Tissue Value: Shoots
agattcagaaaccctaatttcttcacaaagcaaaacacagaaaaagccattctttttgccccttgagtgctttcagctcttcccacaaggttacagaagtaatgtcacgtgtgtacgtcggaaatttggacccgcgagttactgagcgtgaacttgaggatgagttccgtgcctttggagttgtcaggagtgtttgggttgcccgtagaccacctggttacgcttttctagatttcgaagatcctagggatgcccgtgatgctatccgtgctttagatggcaagaatggctggagggttgaacagtctcacaatcgaggtgagcgtggtggcggcggtcgtggtggtgaccgtggaggtggtggcggcggccgtggtggtcgtggtggctctgatttgaaatgctatgaatgcggtgagactggtcatttcgcacgtgaatgccgtaaccgtggtggaactggaaggcgtcgcagcaagagccgtagtcgcactcctccaagatacagaaggagcccaagctatggacggaggagttacagccctcgtgcaagatctccccctcctccaaggcgccgcagtccttctcctcctcctgcccgtggccgcagctacagtagatcaccacctccatacagagcgcgtgaggaagtgccatatgctaatggaaatggactgaaagaaagacgcagaagcaggagctgagtgagtgattttgcaagaaaacgagtgtgtgggaggatactttggaagagaagaagagagggactaagggaagttactatcatctatgaatttcagtaagagaacatgttttaggtctgctgggttggataaagcttgctacttttgcttttggatatgaaacgtacgtagttgtgtatctaccaataggtaaaagaacacttgattcgtaccctagtttcttaaagacataatgtttgattggaaattctgctaaatgcctaagcgtttcttgtctt

SEQ ID NO: 35934 - protein, 200 aa, Arabidopsis thaliana
  peptide (1)..(200): Ceres Seq. ID no. 12482665
  misc_feature (4)..(61): Pfam Name: RNA recognition motif. (a.k.a. RRM, RBD, or RNP domain) Pfam Description: RNA recognition motif. (a.k.a. RRM, RBD, or RNP
  misc_feature (2)..(174): Homolog of NCBI NO: 30584739 NR Description: Homo sapiens splicing factor,
  misc_feature (1)..(152): Homolog of NCBI NO: 29841408 NR Description: similar to NM_006276 splicing factor,
  misc_feature (2)..(174): Homolog of NCBI NO: 25144919 NR Description: pre-mRNA splicing SR Protein RSP-6 (20.5 kD)
  misc_feature (3)..(191): Homolog of NCBI NO: 24582360 NR Description: CG10203-PA [Drosophila melanogaster]
  misc_feature (1)..(189): Homolog of NCBI NO: 25294317 NR Description: protein T23E23.2 [imported] - Arabidopsis
  misc_feature (1)..(189): Homolog of NCBI NO: 25294319 NR Description: splicing factor RSZp21 [imported] - Arabidopsis
  misc_feature (1)..(185): Homolog of NCBI NO: 18395314 NR Description: splicing factor SRZ_21
  misc_feature (1)..(200): Homolog of NCBI NO: 15224171 NR Description: putative RSZp22 splicing factor; protein id:
  misc_feature (1)..(200): Homolog of NCBI NO: 25294318 NR Description: splicing factor RSZp22 [validated] - Arabidopsis
  misc_feature (1)..(200): Homolog of NCBI NO: 15236000 NR Description: splicing factor SRZ_22
MSRVYVGNLDPRVTERELEDEFRAFGVVRSVWVARRPPGYAFLDFEDPRDARDAIRALDGKNGWRVEQSHNRGERGGGGRGGDRGGGGGGRGGRGGSDLKCYECGETGHFARECRNRGGTGRRRSKSRSRTPPRYRRSPSYGRRSYSPRARSPPPPRRRSPSPPPARGRSYSRSPPPYRAREEVPYANGNGLKERRRSRS

SEQ ID NO: 35935 - DNA, 1133 bp, Arabidopsis thaliana
  misc_feature (1)..(1133): Ceres Seq. ID no. 12436710
  misc_feature: MA Experiment ID: 108461 Result: Up-regulated in Transcription
  misc_feature: MA Experiment 108461 PARAMETER Experiment Name: At_Germinating_Seeds_cDNA_P Parameter: Age (day) Value: 1 vs. 0
  misc_feature: MA Experiment 108461 PARAMETER Experiment Name: At_Germinating_Seeds_cDNA_P Parameter: Tissue Value: Germinating Seeds
  misc_feature: MA Experiment ID: 108585 Result: Down-regulated in Transcription
  misc_feature: MA Experiment 108585 PARAMETER Experiment Name: At_5mM_NaNP_cDNA_P Parameter: Timepoint (hr) Value: 6
  misc_feature: MA Experiment 108585 PARAMETER Experiment Name: At_5mM_NaNP_cDNA_P Parameter: Tissue Value: Aerial
  misc_feature: MA Experiment 108585 PARAMETER Experiment Name: At_5mM_NaNP_cDNA_P Parameter: Treatment Value: null
  misc_feature: MA Experiment ID: 20001905 Result: Down-regulated in Transcription
  misc_feature: MA Experiment 20001905 PARAMETER Experiment Name: At_Drought_Reproduction_P Parameter: Age (day) Value: 40
  misc_feature: MA Experiment 20001905 PARAMETER Experiment Name: At_Drought_Reproduction_P Parameter: Organism Value: A. thaliana
  misc_feature: MA Experiment 20001905 PARAMETER Experiment Name: At_Drought_Reproduction_P Parameter: Plant Line Value: WS
  misc_feature: MA Experiment 20001905 PARAMETER Experiment Name: At_Drought_Reproduction_P Parameter: Timepoint (day) Value: 10
  misc_feature: MA Experiment 20001905 PARAMETER Experiment Name: At_Drought_Reproduction_P Parameter: Tissue Value: Rosettes
  misc_feature: MA Experiment 20001905 PARAMETER Experiment Name: At_Drought_Reproduction_P Parameter: Treatment Value: Drought vs. No Drought
aagtgttcttgaggagaaggacgatcgatctaaggagacgatgaagatcttccacgttccttgtctgcaagacaactactcttatctgataatcgatgagagcaccggagacgcggcggttgtggatccagttgatccggagaaggtgatcgcatcggctgagaagcaccaagctaagatcaagttcgtactcactacgcatcatcactgggatcatgccggtggaaacgagaagattaagcagttggttcctgatatcaaagtatatggaggttctctggataaggtgaagggttgcactgatgcggttgataatggtgacaagctgactttgggtcaggatattaacatattggctctccacactccttggtttgtttgtttttttttttttttccaatgaatttagatgcatctaatctacttgatgtttaactcagtcattttctcttgtcatcgctgattcctctgatatatctacttgttacagtcacaccaagggtcacattagttattatgtgaccggaaaagaaggagaaaacccagccgtgttcaccggagatacactttttgttgctggatgtgggaagttttttgaagggacagctgagcagatgtatcagtcgttgtgtgtgactctggctgcattacctaaaccgacacaggtttactgcggccatgagtacaccgttaagaacttggaatttgctctaactgtggaaccaaacaacgggaagatacaacagaagttagcatgggcccgtcaacagcgccaagcagatcttcccacaatcccttcaacactggaggaagagctcgaaacaaatccatttatgcgtgttgataagccagagatacaggagaaactcggttgcaagtcgccaattgatacaatgagggaagttcggaacaagaaggatcagtggaggggatgatgataaatggagagcttcttgcctatgttttgtgtacttgtgttgaatgatcctgtaaaaggtgtatgaaccagtaatgttgatattctgtgtgaaactgtgaaccggtttggtaaaccgaaatcagaccgacctgtaagccgtactccctttttgaattttcagtttactatggataataatttcagtgtctacacc

SEQ ID NO: 35936 - protein, 133 aa, Arabidopsis thaliana
  peptide (1)..(133): Ceres Seq. ID no. 12436711
  misc_feature (24)..(123): Pfam Name: Metallo-beta-lactamase superfamily Pfam Description: Metallo-beta-lactamase superfamily
  misc_feature (14)..(123): Homolog of NCBI NO: 29841459 NR Description: similar to probable hydroxyacylglutathione
  misc_feature (7)..(123): Homolog of NCBI NO: 24667711 NR Description: CG4365-PB [Drosophila melanogaster]
  misc_feature (7)..(123): Homolog of NCBI NO: 24667703 NR Description: CG4365-PC [Drosophila melanogaster]
  misc_feature (7)..(123): Homolog of NCBI NO: 21356335 NR Description: CG4365-PA [Drosophila melanogaster]
  misc_feature (14)..(129): Homolog of NCBI NO: 2494848 NR Description: Hydroxyacylglutathione hydrolase (Glyoxalase II)
  misc_feature (14)..(129): Homolog of NCBI NO: 4885389 NR Description: hydroxyacyl glutathione hydrolase
  misc_feature (14)..(129): Homolog of NCBI NO: 15375320 NR Description: hydroxyacyl glutathione hydrolase
  misc_feature (14)..(129): Homolog of NCBI NO: 21729786 NR Description: hydroxyacyl glutathione hydrolase
  misc_feature (14)..(123): Homolog of NCBI NO: 2570342 NR Description: glyoxalase II cytoplasmic isozyme [Arabidopsis
  misc_feature (14)..(123): Homolog of NCBI NO: 15228389 NR Description: glyoxalase II (hydroxyacylglutathione
SVLEEKDDRSKETMKIFHVPCLQDNYSYLIIDESTGDAAVVDPVDPEKVIASAEKHQAKIKFVLTTHHHWDHAGGNEKIKQLVPDIKVYGGSLDKVKGCTDAVDNGDKLTLGQDINILALHTPWFVCFFFFFQ

SEQ ID NO: 35937 - protein, 120 aa, Arabidopsis thaliana
  peptide (1)..(120): Ceres Seq. ID no. 12436712
  misc_feature (11)..(110): Pfam Name: Metallo-beta-lactamase superfamily Pfam Description: Metallo-beta-lactamase superfamily
  misc_feature (1)..(110): Homolog of NCBI NO: 29841459 NR Description: similar to probable hydroxyacylglutathione
  misc_feature (1)..(110): Homolog of NCBI NO: 24667711 NR Description: CG4365-PB [Drosophila melanogaster]
  misc_feature (1)..(110): Homolog of NCBI NO: 24667703 NR Description: CG4365-PC [Drosophila melanogaster]
  misc_feature (1)..(110): Homolog of NCBI NO: 21356335 NR Description: CG4365-PA [Drosophila melanogaster]
  misc_feature (1)..(116): Homolog of NCBI NO: 2494848 NR Description: Hydroxyacylglutathione hydrolase (Glyoxalase II)
  misc_feature (1)..(116): Homolog of NCBI NO: 4885389 NR Description: hydroxyacyl glutathione hydrolase
  misc_feature (1)..(116): Homolog of NCBI NO: 15375320 NR Description: hydroxyacyl glutathione hydrolase
  misc_feature (1)..(116): Homolog of NCBI NO: 21729786 NR Description: hydroxyacyl glutathione hydrolase
  misc_feature (1)..(110): Homolog of NCBI NO: 2570342 NR Description: glyoxalase II cytoplasmic isozyme [Arabidopsis
  misc_feature (1)..(110): Homolog of NCBI NO: 15228389 NR Description: glyoxalase II (hydroxyacylglutathione
MKIFHVPCLQDNYSYLIIDESTGDAAVVDPVDPEKVIASAEKHQAKIKFVLTTHHHWDHAGGNEKIKQLVPDIKVYGGSLDKVKGCTDAVDNGDKLTLGQDINILALHTPWFVCFFFFFQ

SEQ ID NO: 35938 - protein, 106 aa, Arabidopsis thaliana
  peptide (1)..(106): Ceres Seq. ID no. 12436713
  misc_feature (1)..(104): Homolog of NCBI NO: 29841459 NR Description: similar to probable hydroxyacylglutathione
  misc_feature (1)..(105): Homolog of NCBI NO: 24667711 NR Description: CG4365-PB [Drosophila melanogaster]
  misc_feature (1)..(105): Homolog of NCBI NO: 24667703 NR Description: CG4365-PC [Drosophila melanogaster]
  misc_feature (1)..(105): Homolog of NCBI NO: 21356335 NR Description: CG4365-PA [Drosophila melanogaster]
  misc_feature (1)..(105): Homolog of NCBI NO: 2494848 NR Description: Hydroxyacylglutathione hydrolase (Glyoxalase II)
  misc_feature (1)..(105): Homolog of NCBI NO: 4885389 NR Description: hydroxyacyl glutathione hydrolase
  misc_feature (1)..(105): Homolog of NCBI NO: 15375320 NR Description: hydroxyacyl glutathione hydrolase
  misc_feature (1)..(105): Homolog of NCBI NO: 21729786 NR Description: hydroxyacyl glutathione hydrolase
  misc_feature (1)..(106): Homolog of NCBI NO: 2570342 NR Description: glyoxalase II cytoplasmic isozyme [Arabidopsis
  misc_feature (1)..(106): Homolog of NCBI NO: 15228389 NR Description: glyoxalase II (hydroxyacylglutathione
MYQSLCVTLAALPKPTQVYCGHEYTVKNLEFALTVEPNNGKIQQKLAWARQQRQADLPTIPSTLEEELETNPFMRVDKPEIQEKLGCKSPIDTMREVRNKKDQWRG

SEQ ID NO: 35939 - DNA, 1500 bp, Arabidopsis thaliana
  misc_feature (1)..(1500): Ceres Seq. ID no. 13497169
  misc_feature: MA Experiment ID: 20000070 Result: Down-regulated in Transcription
  misc_feature: MA Experiment 20000070 PARAMETER Experiment Name: At_100uM_ABA_Mutants_cDNA_P Parameter: Plant Line Value: CS24
  misc_feature: MA Experiment 20000070 PARAMETER Experiment Name: At_100uM_ABA_Mutants_cDNA_P Parameter: Timepoint (hr) Value: 6
  misc_feature: MA Experiment 20000070 PARAMETER Experiment Name: At_100uM_ABA_Mutants_cDNA_P Parameter: Tissue Value: Aerial
  misc_feature: MA Experiment 20000070 PARAMETER Experiment Name: At_100uM_ABA_Mutants_cDNA_P Parameter: Treatment Value: 100uM ABA vs. No Treatment
  misc_feature: MA Experiment ID: 20000184 Result: Up-regulated in Transcription
  misc_feature: MA Experiment 20000184 PARAMETER Experiment Name: At_Shoots__P Parameter: Age (day) Value: 7
  misc_feature: MA Experiment 20000184 PARAMETER Experiment Name: At_Shoots__P Parameter: Tissue Value: Shoots vs. Whole Plant
  misc_feature: MA Experiment ID: 20000185 Result: Up-regulated in Transcription
  misc_feature: MA Experiment 20000185 PARAMETER Experiment Name: At_Roots__P Parameter: Age (day) Value: 7 vs. 21
  misc_feature: MA Experiment 20000185 PARAMETER Experiment Name: At_Roots__P Parameter: Organism Value: A. thaliana
  misc_feature: MA Experiment 20000185 PARAMETER Experiment Name: At_Roots__P Parameter: Tissue Value: Roots vs. Whole Plant
  misc_feature: MA Experiment ID: 20000227 Result: Up-regulated in Transcription
  misc_feature: MA Experiment 20000227 PARAMETER Experiment Name: At_Root-Tips-vs-Tops_P Parameter: Tissue Value: Root Tips vs. Root Tops
  misc_feature: MA Experiment ID: 20000234 Result: Up-regulated in Transcription
  misc_feature: MA Experiment 20000234 PARAMETER Experiment Name: At_Siliques_P Parameter: Age (day) Value: 21
  misc_feature: MA Experiment 20000234 PARAMETER Experiment Name: At_Siliques_P Parameter: Organism Value: A. thaliana
  misc_feature: MA Experiment 20000234 PARAMETER Experiment Name: At_Siliques_P Parameter: Plant Line Value: WS
  misc_feature: MA Experiment 20000234 PARAMETER Experiment Name: At_Siliques_P Parameter: Tissue Value: Less Than 5mm Siliques vs. Whole Plant
  misc_feature: MA Experiment ID: 20000264 Result: Up-regulated in Transcription
  misc_feature: MA Experiment 20000264 PARAMETER Experiment Name: At_Open_Flower_P Parameter: Age (day) Value: 21
  misc_feature: MA Experiment 20000264 PARAMETER Experiment Name: At_Open_Flower_P Parameter: Plant Line Value: WS
  misc_feature: MA Experiment 20000264 PARAMETER Experiment Name: At_Open_Flower_P Parameter: Tissue Value: Open Flower vs. Whole Plant
  misc_feature: MA Experiment ID: 20000265 Result: Up-regulated in Transcription
  misc_feature: MA Experiment 20000265 PARAMETER Experiment Name: At_Open_Flower_P Parameter: Age (day) Value: 21
  misc_feature: MA Experiment 20000265 PARAMETER Experiment Name: At_Open_Flower_P Parameter: Plant Line Value: WS
  misc_feature: MA Experiment 20000265 PARAMETER Experiment Name: At_Open_Flower_P Parameter: Tissue Value: Closed Flower vs. Whole Plant
  misc_feature: MA Experiment ID: 20000286 Result: Up-regulated in Transcription
  misc_feature: MA Experiment 20000286 PARAMETER Experiment Name: At_Open_Flower_P Parameter: Age (day) Value: 21
  misc_feature: MA Experiment 20000286 PARAMETER Experiment Name: At_Open_Flower_P Parameter: Plant Line Value: WS
  misc_feature: MA Experiment 20000286 PARAMETER Experiment Name: At_Open_Flower_P Parameter: Tissue Value: Half Open vs. Whole Plant
  misc_feature: MA Experiment ID: 20000439 Result: Up-regulated in Transcription
  misc_feature: MA Experiment 20000439 PARAMETER Experiment Name: At_Roots__P Parameter: Age (day) Value: 14 vs. 21
  misc_feature: MA Experiment 20000439 PARAMETER Experiment Name: At_Roots__P Parameter: Organism Value: A. thaliana
  misc_feature: MA Experiment 20000439 PARAMETER Experiment Name: At_Roots__P Parameter: Tissue Value: Roots vs. Whole Plant
  misc_feature: MA Experiment ID: 20000441 Result: Down-regulated in Transcription
  misc_feature: MA Experiment 20000441 PARAMETER Experiment Name: At_1uM_BR-BRZ__P Parameter: Tissue Value: Shoot Apices
  misc_feature: MA Experiment 20000441 PARAMETER Experiment Name: At_1uM_BR-BRZ__P Parameter: Treatment Value: 1uM BR vs. No Treatment
  misc_feature: MA Experiment ID: 20000527 Result: Down-regulated in Transcription
  misc_feature: MA Experiment 20000527 PARAMETER Experiment Name: At_10percent_PEG_P Parameter: Age (day) Value: 20
  misc_feature: MA Experiment 20000527 PARAMETER Experiment Name: At_10percent_PEG_P Parameter: Organism Value: A. thaliana
  misc_feature: MA Experiment 20000527 PARAMETER Experiment Name: At_10percent_PEG_P Parameter: Plant Line Value: WS
  misc_feature: MA Experiment 20000527 PARAMETER Experiment Name: At_10percent_PEG_P Parameter: Timepoint (day) Value: 20
  misc_feature: MA Experiment 20000527 PARAMETER Experiment Name: At_10percent_PEG_P Parameter: Tissue Value: Whole Plant
  misc_feature: MA Experiment 20000527 PARAMETER Experiment Name: At_10percent_PEG_P Parameter: Treatment Value: 10percent PEG vs. No Treatment
  misc_feature: MA Experiment ID: 20001451 Result: Down-regulated in Transcription
  misc_feature: MA Experiment 20001451 PARAMETER Experiment Name: At_Far-red-induction_P Parameter: Age (day) Value: 7
  misc_feature: MA Experiment 20001451 PARAMETER Experiment Name: At_Far-red-induction_P Parameter: Light Value: Far-red vs. White
  misc_feature: MA Experiment 20001451 PARAMETER Experiment Name: At_Far-red-induction_P Parameter: Organism Value: A. thaliana
  misc_feature: MA Experiment 20001451 PARAMETER Experiment Name: At_Far-red-induction_P Parameter: Plant Line Value: Columbia
  misc_feature: MA Experiment 20001451 PARAMETER Experiment Name: At_Far-red-induction_P Parameter: Timepoint (hr) Value: 24
  misc_feature: MA Experiment 20001451 PARAMETER Experiment Name: At_Far-red-induction_P Parameter: Tissue Value: Whole Plant
  misc_feature: MA Experiment ID: 20001558 Result: Up-regulated in Transcription
  misc_feature: MA Experiment 20001558 PARAMETER Experiment Name: At_Drought_Soil_Dry_P Parameter: Age (day) Value: 27
  misc_feature: MA Experiment 20001558 PARAMETER Experiment Name: At_Drought_Soil_Dry_P Parameter: Organism Value: A. thaliana
  misc_feature: MA Experiment 20001558 PARAMETER Experiment Name: At_Drought_Soil_Dry_P Parameter: Plant Line Value: WS
  misc_feature: MA Experiment 20001558 PARAMETER Experiment Name: At_Drought_Soil_Dry_P Parameter: Post Timepoint (hr) Value: 6
  misc_feature: MA Experiment 20001558 PARAMETER Experiment Name: At_Drought_Soil_Dry_P Parameter: Post-Treatment Value: Re-Water vs. No Drought
  misc_feature: MA Experiment 20001558 PARAMETER Experiment Name: At_Drought_Soil_Dry_P Parameter: Timepoint (day) Value: 13
  misc_feature: MA Experiment 20001558 PARAMETER Experiment Name: At_Drought_Soil_Dry_P Parameter: Treatment Value: Drought vs. No Drought
  misc_feature: MA Experiment ID: 20001560 Result: Up-regulated in Transcription
  misc_feature: MA Experiment 20001560 PARAMETER Experiment Name: At_Drought_Soil_Dry_P Parameter: Age (day) Value: 28
  misc_feature: MA Experiment 20001560 PARAMETER Experiment Name: At_Drought_Soil_Dry_P Parameter: Organism Value: A. thaliana
  misc_feature: MA Experiment 20001560 PARAMETER Experiment Name: At_Drought_Soil_Dry_P Parameter: Plant Line Value: WS
  misc_feature: MA Experiment 20001560 PARAMETER Experiment Name: At_Drought_Soil_Dry_P Parameter: Post Timepoint (hr) Value: None
  misc_feature: MA Experiment 20001560 PARAMETER Experiment Name: At_Drought_Soil_Dry_P Parameter: Post-Treatment Value: None
  misc_feature: MA Experiment 20001560 PARAMETER Experiment Name: At_Drought_Soil_Dry_P Parameter: Timepoint (day) Value: 14
  misc_feature: MA Experiment 20001560 PARAMETER Experiment Name: At_Drought_Soil_Dry_P Parameter: Treatment Value: Drought vs. No Drought
gttgatcaacaattaaacacaaaaacccttaagttgacatggctgtatctcttccaactcttaaaaatcaattactattatacccctcagaaaaatggcagagcgtgtgtctctcacactcaacggaaccctcctttctcctcctcccacaacaacaacaacaacaatgtcttcttctctccgatctaccaccgccgcttctcttctcctccgctcctcctcctcctcctccagatccactctcactctctccgcttcctcctctctctccttcgtcagatctctcgtctcttctccacgtctctcttcttcttcatccctctctcagaagaaatatcgaattgcgtcggtgaatcggagtttcaactccaccaccgccgctactaaatcttcatcttcagatcctgatcagttgaagaacgctagagaagatatcaaagagcttctcagcaccaaattctgccatccgattttggttagattaggttggcatgatgctggtacgtataacaagaacattaaggaatggccacaaagaggtggagctaatggaagtttgagattcgatattgagcttaaacatgctgctaacgctggtcttgtgaatgctttaaacttgattaaggatatcaaagagaaatactctgggatcagttatgctgatttgttccagttagctagtgctactgctatagaggaagctggaggaccgaaaataccgatgaaatatggtagagttgatgcctctggtcctgaggattgtccagaagaaggaaggcttccagatgctggtcctccttcacctgctactcatctcagagaagttttttacagaatgggattagatgacaaggacatagttgcattatctggtgctcacacgttaggaagatctaggccagaacgtagtggttgggggaagcctgagacgaagtacacgaaagaaggacctggagcaccaggaggacagtcatggacaccagagtggctgaagtttgataattcttacttcaaggagatcaaggaaaagagagatgaagatctccttgtcctacccactgatgctgccatcttcgaagattcttctttcaaggtctatgctgaaaagtatgctgcagatcaggatgcatttttcaaggattacgctgtagcccatgcgaagctcagcaatcttggagcagaatttaaccctccggagggtatcgttatctaatgggggcacataatttactcaaccagacttatgattttagagaaacgtagttcaataatgaaagagaagaaaaagttgacggagaacttttcatgcgagtacttttcgagataccttttggacaaatgtttctggctgttcaaaggattttgtttagccgaaagtatttgatcgttttcatggttttgtgctttcatgtttttttcttgtaataaattgcggaagtgattatccaaaatctatacaaattttgtctggaattgaattattttatcgatgttataact

SEQ ID NO: 35940 - protein, 372 aa, Arabidopsis thaliana
  peptide (1)..(372): Ceres Seq. ID no. 13497170
  misc_feature (110)..(342): Pfam Name: Peroxidase Pfam Description: Peroxidase
  misc_feature (12)..(372): Homolog of NCBI NO: 4996604 NR Description: stromal ascorbate peroxidase [Nicotiana tabacum]
  misc_feature (12)..(372): Homolog of NCBI NO: 4996602 NR Description: thylakoid-bound ascorbate peroxidase [Nicotiana
  misc_feature (14)..(372): Homolog of NCBI NO: 7484621 NR Description: L-ascorbate peroxidase (EC 1.11.1.11) precursor -
  misc_feature (25)..(372): Homolog of NCBI NO: 2832921 NR Description: stromal ascorbate peroxidase [Spinacia oleracea]
  misc_feature (25)..(372): Homolog of NCBI NO: 2832920 NR Description: thylakoid-bound ascorbate peroxidase [Spinacia
  misc_feature (25)..(372): Homolog of NCBI NO: 1944507 NR Description: thylakoid-bound ascorbate peroxidase [Spinacia
  misc_feature (25)..(372): Homolog of NCBI NO: 1369920 NR Description: stromal ascorbate peroxidase [Spinacia oleracea]
  misc_feature (20)..(372): Homolog of NCBI NO: 2146725 NR Description: L-ascorbate peroxidase (EC 1.11.1.11) precursor -
  misc_feature (1)..(372): Homolog of NCBI NO: 1419388 NR Description: stromal ascorbate peroxidase [Arabidopsis
  misc_feature (1)..(372): Homolog of NCBI NO: 15236483 NR Description: stromal ascorbate peroxidase, putative (sAPX)
MAERVSLTLNGTLLSPPPTTTTTTMSSSLRSTTAASLLLRSSSSSSRSTLTLSASSSLSFVRSLVSSPRLSSSSSLSQKKYRIASVNRSFNSTTAATKSSSSDPDQLKNAREDIKELLSTKFCHPILVRLGWHDAGTYNKNIKEWPQRGGANGSLRFDIELKHAANAGLVNALNLIKDIKEKYSGISYADLFQLASATAIEEAGGPKIPMKYGRVDASGPEDCPEEGRLPDAGPPSPATHLREVFYRMGLDDKDIVALSGAHTLGRSRPERSGWGKPETKYTKEGPGAPGGQSWTPEWLKFDNSYFKEIKEKRDEDLLVLPTDAAIFEDSSFKVYAEKYAADQDAFFKDYAVAHAKLSNLGAEFNPPEGIVI

SEQ ID NO: 35941 - protein, 348 aa, Arabidopsis thaliana
  peptide (1)..(348): Ceres Seq. ID no. 13497171
  misc_feature (86)..(318): Pfam Name: Peroxidase Pfam Description: Peroxidase
  misc_feature (1)..(348): Homolog of NCBI NO: 4996604 NR Description: stromal ascorbate peroxidase [Nicotiana tabacum]
  misc_feature (1)..(348): Homolog of NCBI NO: 4996602 NR Description: thylakoid-bound ascorbate peroxidase [Nicotiana
  misc_feature (1)..(348): Homolog of NCBI NO: 7484621 NR Description: L-ascorbate peroxidase (EC 1.11.1.11) precursor -
  misc_feature (1)..(348): Homolog of NCBI NO: 2832921 NR Description: stromal ascorbate peroxidase [Spinacia oleracea]
  misc_feature (1)..(348): Homolog of NCBI NO: 2832920 NR Description: thylakoid-bound ascorbate peroxidase [Spinacia
  misc_feature (1)..(348): Homolog of NCBI NO: 1944507 NR Description: thylakoid-bound ascorbate peroxidase [Spinacia
  misc_feature (1)..(348): Homolog of NCBI NO: 1369920 NR Description: stromal ascorbate peroxidase [Spinacia oleracea]
  misc_feature (1)..(348): Homolog of NCBI NO: 2146725 NR Description: L-ascorbate peroxidase (EC 1.11.1.11) precursor -
  misc_feature (1)..(348): Homolog of NCBI NO: 1419388 NR Description: stromal ascorbate peroxidase [Arabidopsis
  misc_feature (1)..(348): Homolog of NCBI NO: 15236483 NR Description: stromal ascorbate peroxidase, putative (sAPX)
MSSSLRSTTAASLLLRSSSSSSRSTLTLSASSSLSFVRSLVSSPRLSSSSSLSQKKYRIASVNRSFNSTTAATKSSSSDPDQLKNAREDIKELLSTKFCHPILVRLGWHDAGTYNKNIKEWPQRGGANGSLRFDIELKHAANAGLVNALNLIKDIKEKYSGISYADLFQLASATAIEEAGGPKIPMKYGRVDASGPEDCPEEGRLPDAGPPSPATHLREVFYRMGLDDKDIVALSGAHTLGRSRPERSGWGKPETKYTKEGPGAPGGQSWTPEWLKFDNSYFKEIKEKRDEDLLVLPTDAAIFEDSSFKVYAEKYAADQDAFFKDYAVAHAKLSNLGAEFNPPEGIVI

SEQ ID NO: 35942 - DNA, 1123 bp, Arabidopsis thaliana
  misc_feature (1)..(1123): Ceres Seq. ID no. 12394899
  misc_feature: MA Experiment ID: 20000184 Result: Down-regulated in Transcription
  misc_feature: MA Experiment 20000184 PARAMETER Experiment Name: At_Shoots__P Parameter: Age (day) Value: 7
  misc_feature: MA Experiment 20000184 PARAMETER Experiment Name: At_Shoots__P Parameter: Tissue Value: Shoots vs. Whole Plant
  misc_feature: MA Experiment ID: 20000235 Result: Up-regulated in Transcription
  misc_feature: MA Experiment 20000235 PARAMETER Experiment Name: At_Siliques_P Parameter: Age (day) Value: 21
  misc_feature: MA Experiment 20000235 PARAMETER Experiment Name: At_Siliques_P Parameter: Organism Value: A. thaliana
  misc_feature: MA Experiment 20000235 PARAMETER Experiment Name: At_Siliques_P Parameter: Plant Line Value: WS
  misc_feature: MA Experiment 20000235 PARAMETER Experiment Name: At_Siliques_P Parameter: Tissue Value: 5-10mm Siliques vs. Whole Plant
  misc_feature: MA Experiment ID: 20000437 Result: Up-regulated in Transcription
  misc_feature: MA Experiment 20000437 PARAMETER Experiment Name: At_Drought_P Parameter: Age (day) Value: 8
  misc_feature: MA Experiment 20000437 PARAMETER Experiment Name: At_Drought_P Parameter: Organism Value: A. thaliana
  misc_feature: MA Experiment 20000437 PARAMETER Experiment Name: At_Drought_P Parameter: Plant Line Value: WS
  misc_feature: MA Experiment 20000437 PARAMETER Experiment Name: At_Drought_P Parameter: Timepoint (hr) Value: 24
  misc_feature: MA Experiment 20000437 PARAMETER Experiment Name: At_Drought_P Parameter: Tissue Value: Whole Plant
  misc_feature: MA Experiment 20000437 PARAMETER Experiment Name: At_Drought_P Parameter: Treatment Value: Drought vs. No Drought
  misc_feature: MA Experiment ID: 20000438 Result: Down-regulated in Transcription
  misc_feature: MA Experiment 20000438 PARAMETER Experiment Name: At_Shoots__P Parameter: Age (day) Value: 14
  misc_feature: MA Experiment 20000438 PARAMETER Experiment Name: At_Shoots__P Parameter: Tissue Value: Shoots vs. Whole Plant
  misc_feature: MA Experiment ID: 20000453 Result: Up-regulated in Transcription
  misc_feature: MA Experiment 20000453 PARAMETER Experiment Name: At_100uM_ABA_P Parameter: Age (day) Value: 15
  misc_feature: MA Experiment 20000453 PARAMETER Experiment Name: At_100uM_ABA_P Parameter: Organism Value: A. thaliana
  misc_feature: MA Experiment 20000453 PARAMETER Experiment Name: At_100uM_ABA_P Parameter: Plant Line Value: WS
  misc_feature: MA Experiment 20000453 PARAMETER Experiment Name: At_100uM_ABA_P Parameter: Timepoint (hr) Value: 24
  misc_feature: MA Experiment 20000453 PARAMETER Experiment Name: At_100uM_ABA_P Parameter: Tissue Value: Aerial
  misc_feature: MA Experiment 20000453 PARAMETER Experiment Name: At_100uM_ABA_P Parameter: Treatment Value: 100uM ABA vs. No Treatment
  misc_feature: MA Experiment ID: 20000460 Result: Down-regulated in Transcription
  misc_feature: MA Experiment 20000460 PARAMETER Experiment Name: At_10percent_PEG_P Parameter: Age (day) Value: 12
  misc_feature: MA Experiment 20000460 PARAMETER Experiment Name: At_10percent_PEG_P Parameter: Organism Value: A. thaliana
  misc_feature: MA Experiment 20000460 PARAMETER Experiment Name: At_10percent_PEG_P Parameter: Plant Line Value: WS
  misc_feature: MA Experiment 20000460 PARAMETER Experiment Name: At_10percent_PEG_P Parameter: Timepoint (day) Value: 12
  misc_feature: MA Experiment 20000460 PARAMETER Experiment Name: At_10percent_PEG_P Parameter: Tissue Value: Whole Plant
  misc_feature: MA Experiment 20000460 PARAMETER Experiment Name: At_10percent_PEG_P Parameter: Treatment Value: 10percent PEG vs. No Treatment
  misc_feature: MA Experiment ID: 20000495 Result: Up-regulated in Transcription
  misc_feature: MA Experiment 20000495 PARAMETER Experiment Name: At_Guard_Cells_P Parameter: Harvest Date Value: 8/2/2002
  misc_feature: MA Experiment 20000495 PARAMETER Experiment Name: At_Guard_Cells_P Parameter: Organism Value: A. thaliana
  misc_feature: MA Experiment 20000495 PARAMETER Experiment Name: At_Guard_Cells_P Parameter: Tissue Value: Guard Cells vs. Leaves
  misc_feature: MA Experiment ID: 20000794 Result: Down-regulated in Transcription
  misc_feature: MA Experiment 20000794 PARAMETER Experiment Name: At_Petals_P Parameter: Age (day) Value: 23-25 days
  misc_feature: MA Experiment 20000794 PARAMETER Experiment Name: At_Petals_P Parameter: Plant Line Value: WS
  misc_feature: MA Experiment 20000794 PARAMETER Experiment Name: At_Petals_P Parameter: Tissue Value: Petals vs. Whole plant
  misc_feature: MA Experiment ID: 20001504 Result: Up-regulated in Transcription
  misc_feature: MA Experiment 20001504 PARAMETER Experiment Name: At_Far-red-enriched_P Parameter: Age (day) Value: 10
  misc_feature: MA Experiment 20001504 PARAMETER Experiment Name: At_Far-red-enriched_P Parameter: Light Value: Far-red enriched vs. White
  misc_feature: MA Experiment 20001504 PARAMETER Experiment Name: At_Far-red-enriched_P Parameter: Organism Value: A. thaliana
  misc_feature: MA Experiment 20001504 PARAMETER Experiment Name: At_Far-red-enriched_P Parameter: Plant Line Value: Columbia
  misc_feature: MA Experiment 20001504 PARAMETER Experiment Name: At_Far-red-enriched_P Parameter: Timepoint (day) Value: 6
  misc_feature: MA Experiment 20001504 PARAMETER Experiment Name: At_Far-red-enriched_P Parameter: Tissue Value: Whole Plant
  misc_feature: MA Experiment ID: 20001559 Result: Up-regulated in Transcription
  misc_feature: MA Experiment 20001559 PARAMETER Experiment Name: At_Drought_Soil_Dry_P Parameter: Age (day) Value: 28
  misc_feature: MA Experiment 20001559 PARAMETER Experiment Name: At_Drought_Soil_Dry_P Parameter: Organism Value: A. thaliana
  misc_feature: MA Experiment 20001559 PARAMETER Experiment Name: At_Drought_Soil_Dry_P Parameter: Plant Line Value: WS
  misc_feature: MA Experiment 20001559 PARAMETER Experiment Name: At_Drought_Soil_Dry_P Parameter: Post Timepoint (hr) Value: 29
  misc_feature: MA Experiment 20001559 PARAMETER Experiment Name: At_Drought_Soil_Dry_P Parameter: Post-Treatment Value: Re-Water vs. No Drought
  misc_feature: MA Experiment 20001559 PARAMETER Experiment Name: At_Drought_Soil_Dry_P Parameter: Timepoint (day) Value: 14
  misc_feature: MA Experiment 20001559 PARAMETER Experiment Name: At_Drought_Soil_Dry_P Parameter: Treatment Value: Drought vs. No Drought
  misc_feature: MA Experiment ID: 20001911 Result: Up-regulated in Transcription
  misc_feature: MA Experiment 20001911 PARAMETER Experiment Name: At_Drought_Reproduction_P Parameter: Age (day) Value: 40
  misc_feature: MA Experiment 20001911 PARAMETER Experiment Name: At_Drought_Reproduction_P Parameter: Organism Value: A. thaliana
  misc_feature: MA Experiment 20001911 PARAMETER Experiment Name: At_Drought_Reproduction_P Parameter: Plant Line Value: WS
  misc_feature: MA Experiment 20001911 PARAMETER Experiment Name: At_Drought_Reproduction_P Parameter: Timepoint (day) Value: 10
  misc_feature: MA Experiment 20001911 PARAMETER Experiment Name: At_Drought_Reproduction_P Parameter: Tissue Value: Flowers
  misc_feature: MA Experiment 20001911 PARAMETER Experiment Name: At_Drought_Reproduction_P Parameter: Treatment Value: Drought vs. No Drought
acattcatcaacacaaaagatacccagagagacataagaaagaaagagagagagagatactttggtcatttcagggttgtcgtttctctctcttgttcttgagattttgaagagagagagatatgggaagaggtagggttcagctgaagaggatagagaacaagatcaataggcaagttactttctcaaagagaaggtctggtttgctcaagaaagctcatgagatctctgttctctgcgatgctgaggttgctctcatcgtcttctcttccaaaggcaaactcttcgaatattccaccgactcttgcatggagaggatacttgaacgctatgatcgctatttatattcagacaaacaacttgttggccgagacgtttcacaaagtgaaaattgggttctagaacatgctaagctcaaggcaagagttgaggtacttgagaagaacaaaaggaattttatgggggaagatcttgattcgttgagcttgaaggagcttcaaagcttggagcatcagctcgatgcagctatcaagagcattaggtcaagaaagaaccaagctatgttcgaatccatatctgcgctccagaagaaggataaagccttgcaagatcacaacaattcgcttctcaaaaagattaaggagagggagaagaaaacgggtcagcaagaaggacaattagtccaatgctccaactcttcttcagttcttctgcctcaatactgcgtaacctcctccagagatggctttgtggagagagttgggggagagaacggtggtgcatcgtcgttgacggaaccaaactctctgcttccggcttggatgttacgtcctaccactacgaacgagtagaactatctcactctttataatataatgataatataattaatgtttaatattttcataacattcagcatttttttggtgacttatactcattactaataccgatatgttttagctagtcatattatatgtatgatggaactccgttgtcgagacgtatgtacgtaagctatcattagattcactgcgtcttaagaacaaagattcatatcttggtaatgatttctcatgaataattaatgtaacttttactttttaaaaaaaaaaagcaaact

SEQ ID NO: 35943 - protein, 242 aa, Arabidopsis thaliana
  peptide (1)..(242): Ceres Seq. ID no. 12394900
  misc_feature (75)..(174): Pfam Name: K-box region Pfam Description: K-box region
  misc_feature (1)..(236): Homolog of NCBI NO: 14518447 NR Description: MADS box protein [Capsicum annuum]
  misc_feature (1)..(236): Homolog of NCBI NO: 27373049 NR Description: MADS11 [Nicotiana tabacum]
  misc_feature (1)..(236): Homolog of NCBI NO: 5070142 NR Description: MADS-box protein MADS1 [Nicotiana sylvestris]
  misc_feature (1)..(236): Homolog of NCBI NO: 1483232 NR Description: MADS5 protein [Betula pendula]
  misc_feature (1)..(239): Homolog of NCBI NO: 23304674 NR Description: MADS-box protein FUL-b [Brassica oleracea var.
  misc_feature (1)..(242): Homolog of NCBI NO: 3913000 NR Description: Agamous-like MADS box protein AGL8 homolog (MADS
  misc_feature (3)..(242): Homolog of NCBI NO: 23304672 NR Description: MADS-box protein FUL-a [Brassica oleracea var.
  misc_feature (1)..(242): Homolog of NCBI NO: 23304676 NR Description: MADS-box protein FUL-c [Brassica oleracea var.
  misc_feature (1)..(239): Homolog of NCBI NO: 23304678 NR Description: MADS-box protein FUL-d [Brassica oleracea var.
  misc_feature (1)..(242): Homolog of NCBI NO: 18424410 NR Description: MADS-box protein
MGRGRVQLKRIENKINRQVTFSKRRSGLLKKAHEISVLCDAEVALIVFSSKGKLFEYSTDSCMERILERYDRYLYSDKQLVGRDVSQSENWVLEHAKLKARVEVLEKNKRNFMGEDLDSLSLKELQSLEHQLDAAIKSIRSRKNQAMFESISALQKKDKALQDHNNSLLKKIKEREKKTGQQEGQLVQCSNSSSVLLPQYCVTSSRDGFVERVGGENGGASSLTEPNSLLPAWMLRPTTTNE

SEQ ID NO: 35944 - protein, 180 aa, Arabidopsis thaliana
  peptide (1)..(180): Ceres Seq. ID no. 12394901
  misc_feature (13)..(112): Pfam Name: K-box region Pfam Description: K-box region
  misc_feature (1)..(174): Homolog of NCBI NO: 14518447 NR Description: MADS box protein [Capsicum annuum]
  misc_feature (1)..(174): Homolog of NCBI NO: 27373049 NR Description: MADS11 [Nicotiana tabacum]
  misc_feature (1)..(174): Homolog of NCBI NO: 5070142 NR Description: MADS-box protein MADS1 [Nicotiana sylvestris]
  misc_feature (1)..(174): Homolog of NCBI NO: 1483232 NR Description: MADS5 protein [Betula pendula]
  misc_feature (1)..(177): Homolog of NCBI NO: 23304674 NR Description: MADS-box protein FUL-b [Brassica oleracea var.
  misc_feature (1)..(180): Homolog of NCBI NO: 3913000 NR Description: Agamous-like MADS box protein AGL8 homolog (MADS
  misc_feature (1)..(180): Homolog of NCBI NO: 23304672 NR Description: MADS-box protein FUL-a [Brassica oleracea var.
  misc_feature (1)..(180): Homolog of NCBI NO: 23304676 NR Description: MADS-box protein FUL-c [Brassica oleracea var.
  misc_feature (1)..(177): Homolog of NCBI NO: 23304678 NR Description: MADS-box protein FUL-d [Brassica oleracea var.
  misc_feature (1)..(180): Homolog of NCBI NO: 18424410 NR Description: MADS-box protein
MERILERYDRYLYSDKQLVGRDVSQSENWVLEHAKLKARVEVLEKNKRNFMGEDLDSLSLKELQSLEHQLDAAIKSIRSRKNQAMFESISALQKKDKALQDHNNSLLKKIKEREKKTGQQEGQLVQCSNSSSVLLPQYCVTSSRDGFVERVGGENGGASSLTEPNSLLPAWMLRPTTTNE

SEQ ID NO: 35945 - protein, 130 aa, Arabidopsis thaliana
  peptide (1)..(130): Ceres Seq. ID no. 12394902
  misc_feature (1)..(62): Pfam Name: K-box region Pfam Description: K-box region
  misc_feature (1)..(124): Homolog of NCBI NO: 14518447 NR Description: MADS box protein [Capsicum annuum]
  misc_feature (1)..(124): Homolog of NCBI NO: 27373049 NR Description: MADS11 [Nicotiana tabacum]
  misc_feature (1)..(124): Homolog of NCBI NO: 5070142 NR Description: MADS-box protein MADS1 [Nicotiana sylvestris]
  misc_feature (1)..(124): Homolog of NCBI NO: 1483232 NR Description: MADS5 protein [Betula pendula]
  misc_feature (1)..(127): Homolog of NCBI NO: 23304674 NR Description: MADS-box protein FUL-b [Brassica oleracea var.
  misc_feature (1)..(130): Homolog of NCBI NO: 3913000 NR Description: Agamous-like MADS box protein AGL8 homolog (MADS
  misc_feature (1)..(130): Homolog of NCBI NO: 23304672 NR Description: MADS-box protein FUL-a [Brassica oleracea var.
  misc_feature (1)..(130): Homolog of NCBI NO: 23304676 NR Description: MADS-box protein FUL-c [Brassica oleracea var.
  misc_feature (1)..(127): Homolog of NCBI NO: 23304678 NR Description: MADS-box protein FUL-d [Brassica oleracea var.
  misc_feature (1)..(130): Homolog of NCBI NO: 18424410 NR Description: MADS-box protein
MGEDLDSLSLKELQSLEHQLDAAIKSIRSRKNQAMFESISALQKKDKALQDHNNSLLKKIKEREKKTGQQEGQLVQCSNSSSVLLPQYCVTSSRDGFVERVGGENGGASSLTEPNSLLPAWMLRPTTTNE

SEQ ID NO: 35946 - DNA, 1307 bp, Arabidopsis thaliana
  misc_feature (1)..(1307): Ceres Seq. ID no. 12482093
  misc_feature: MA Experiment ID: 20000180 Result: Up-regulated in Transcription
  misc_feature: MA Experiment 20000180 PARAMETER Experiment Name: At_Germinating_Seeds_P Parameter: Age (hr) Value: 24 vs. 0
  misc_feature: MA Experiment 20000180 PARAMETER Experiment Name: At_Germinating_Seeds_P Parameter: Tissue Value: Germinating Seeds
  misc_feature: MA Experiment ID: 20000184 Result: Up-regulated in Transcription
  misc_feature: MA Experiment 20000184 PARAMETER Experiment Name: At_Shoots__P Parameter: Age (day) Value: 7
  misc_feature: MA Experiment 20000184 PARAMETER Experiment Name: At_Shoots__P Parameter: Tissue Value: Shoots vs. Whole Plant
  misc_feature: MA Experiment ID: 20000185 Result: Up-regulated in Transcription
  misc_feature: MA Experiment 20000185 PARAMETER Experiment Name: At_Roots__P Parameter: Age (day) Value: 7 vs. 21
  misc_feature: MA Experiment 20000185 PARAMETER Experiment Name: At_Roots__P Parameter: Organism Value: A. thaliana
  misc_feature: MA Experiment 20000185 PARAMETER Experiment Name: At_Roots__P Parameter: Tissue Value: Roots vs. Whole Plant
  misc_feature: MA Experiment ID: 20000227 Result: Up-regulated in Transcription
  misc_feature: MA Experiment 20000227 PARAMETER Experiment Name: At_Root-Tips-vs-Tops_P Parameter: Tissue Value: Root Tips vs. Root Tops
  misc_feature: MA Experiment ID: 20000234 Result: Up-regulated in Transcription
  misc_feature: MA Experiment 20000234 PARAMETER Experiment Name: At_Siliques_P Parameter: Age (day) Value: 21
  misc_feature: MA Experiment 20000234 PARAMETER Experiment Name: At_Siliques_P Parameter: Organism Value: A. thaliana
  misc_feature: MA Experiment 20000234 PARAMETER Experiment Name: At_Siliques_P Parameter: Plant Line Value: WS
  misc_feature: MA Experiment 20000234 PARAMETER Experiment Name: At_Siliques_P Parameter: Tissue Value: Less Than 5mm Siliques vs. Whole Plant
  misc_feature: MA Experiment ID: 20000264 Result: Up-regulated in Transcription
  misc_feature: MA Experiment 20000264 PARAMETER Experiment Name: At_Open_Flower_P Parameter: Age (day) Value: 21
  misc_feature: MA Experiment 20000264 PARAMETER Experiment Name: At_Open_Flower_P Parameter: Plant Line Value: WS
  misc_feature: MA Experiment 20000264 PARAMETER Experiment Name: At_Open_Flower_P Parameter: Tissue Value: Open Flower vs. Whole Plant
  misc_feature: MA Experiment ID: 20000265 Result: Up-regulated in Transcription
  misc_feature: MA Experiment 20000265 PARAMETER Experiment Name: At_Open_Flower_P Parameter: Age (day) Value: 21
  misc_feature: MA Experiment 20000265 PARAMETER Experiment Name: At_Open_Flower_P Parameter: Plant Line Value: WS
  misc_feature: MA Experiment 20000265 PARAMETER Experiment Name: At_Open_Flower_P Parameter: Tissue Value: Closed Flower vs. Whole Plant
  misc_feature: MA Experiment ID: 20000286 Result: Up-regulated in Transcription
  misc_feature: MA Experiment 20000286 PARAMETER Experiment Name: At_Open_Flower_P Parameter: Age (day) Value: 21
  misc_feature: MA Experiment 20000286 PARAMETER Experiment Name: At_Open_Flower_P Parameter: Plant Line Value: WS
  misc_feature: MA Experiment 20000286 PARAMETER Experiment Name: At_Open_Flower_P Parameter: Tissue Value: Half Open vs. Whole Plant
  misc_feature: MA Experiment ID: 20000437 Result: Down-regulated in Transcription
  misc_feature: MA Experiment 20000437 PARAMETER Experiment Name: At_Drought_P Parameter: Age (day) Value: 8
  misc_feature: MA Experiment 20000437 PARAMETER Experiment Name: At_Drought_P Parameter: Organism Value: A. thaliana
  misc_feature: MA Experiment 20000437 PARAMETER Experiment Name: At_Drought_P Parameter: Plant Line Value: WS
  misc_feature: MA Experiment 20000437 PARAMETER Experiment Name: At_Drought_P Parameter: Timepoint (hr) Value: 24
  misc_feature: MA Experiment 20000437 PARAMETER Experiment Name: At_Drought_P Parameter: Tissue Value: Whole Plant
  misc_feature: MA Experiment 20000437 PARAMETER Experiment Name: At_Drought_P Parameter: Treatment Value: Drought vs. No Drought
  misc_feature: MA Experiment ID: 20000439 Result: Up-regulated in Transcription
  misc_feature: MA Experiment 20000439 PARAMETER Experiment Name: At_Roots__P Parameter: Age (day) Value: 14 vs. 21
  misc_feature: MA Experiment 20000439 PARAMETER Experiment Name: At_Roots__P Parameter: Organism Value: A. thaliana
  misc_feature: MA Experiment 20000439 PARAMETER Experiment Name: At_Roots__P Parameter: Tissue Value: Roots vs. Whole Plant
  misc_feature: MA Experiment ID: 20001911 Result: Down-regulated in Transcription
  misc_feature: MA Experiment 20001911 PARAMETER Experiment Name: At_Drought_Reproduction_P Parameter: Age (day) Value: 40
  misc_feature: MA Experiment 20001911 PARAMETER Experiment Name: At_Drought_Reproduction_P Parameter: Organism Value: A. thaliana
  misc_feature: MA Experiment 20001911 PARAMETER Experiment Name: At_Drought_Reproduction_P Parameter: Plant Line Value: WS
  misc_feature: MA Experiment 20001911 PARAMETER Experiment Name: At_Drought_Reproduction_P Parameter: Timepoint (day) Value: 10
  misc_feature: MA Experiment 20001911 PARAMETER Experiment Name: At_Drought_Reproduction_P Parameter: Tissue Value: Flowers
  misc_feature: MA Experiment 20001911 PARAMETER Experiment Name: At_Drought_Reproduction_P Parameter: Treatment Value: Drought vs. No Drought
  misc_feature: Phenotype: ROSETTE LEAVES Shape-Serrate
  misc_feature: Phenotype: WHOLE PLANT Other
  misc_feature: Phenotype: FERTILITY Fertility-Reduced
  misc_feature: Phenotype: ROSETTE LEAVES Shape-Serrate
  misc_feature: Phenotype: WHOLE PLANT Other
  misc_feature: Phenotype: FERTILITY Fertility-Reduced
  misc_feature: Phenotype: ROSETTE LEAVES Shape-Lanceolate
  misc_feature: Phenotype: ROSETTE LEAVES Shape-Serrate
  misc_feature: Phenotype: WHOLE PLANT Color-Dark Green
  misc_feature: Phenotype: FERTILITY Fertility-Reduced
aagacaaaaggagcggtttggtgaagttagttaaaagagttgggtttcttcgtaagcatcgaaatcagatttctttaccaaagaaaaaataaagaaaagaaaaatatagcaagtacactgcatttcaacactctcatatctctccttcctacttcctcggtttcatcgtccactgtctcaacaatggcgtcattgtcggtaccttgcgtcaagatctgtgctctgaacaggcgggtcggatctctccctggaatctctactcaaagatggcagccgcaacccaatgggatctcctttccctccgatgtttctcagaatcattctgcattctggaggttgcgtgcaacaactaatgaggttgtttctaactccactccaatgactaatggtgggtatatgaacggaaaagcgaaaaccaatgttcctgaacccgccgagctctctgaatttatggctaaagtctctggtcttcttaagcttgtggattcaaaagacatagtggaacttgaactaaagcagctcgactgtgagatcgttattcgaaagaaggaagctttacagcaagctgtaccaccagctccagtttatcactcaatgcctcctgtaatggcagacttttcaatgcctccagctcaaccagtggctcttcctccttctcctactcctacctcaacgcctgcaacagcaaaaccaacatccgccccatcctcgtctcatcctccactcaagagtcccatggctggtactttctatagatctcctggacccggtgaacccccttttgtaaaggttggagataaggtacagaagggtcaaattgtttgtattatcgaagctatgaaactgatgaacgagattgaggctgagaagtcaggaaccatcatggaactactggctgaagatggaaaaccagtcagcgttgacacgcctctttttgtcatcgcaccttgaaacgaagaaggatccttttagctgcttcaaaacatcttcaaagtctcggttaagctatagcaacgtgctaaaactcatcaagtaattatttcagcttaagttggttggtttcggatttctgcttgtcgcttcaataattgacccatcttttgggatttcacgtaacgtactacactttgctttttagttttctgcgaaactaatgtattttgtagcctctcaatcctggctctctgtcccatacttcagttttttacacaacgcactgcttataaaagcacagttaaaggtgtctaaaggagaatggtgtgtctttgactgaggcaacaaataaaacagtgaaaagttaaggtttt

SEQ ID NO: 35947 - protein, 255 aa, Arabidopsis thaliana
  peptide (1)..(255): Ceres Seq. ID no. 12482094
  misc_feature (179)..(253): Pfam Name: Biotin-requiring enzyme Pfam Description: Biotin-requiring enzyme
  misc_feature (179)..(253): Pfam Name: Biotin-requiring enzyme Pfam Description: Biotin-requiring enzyme
  misc_feature (45)..(255): Homolog of NCBI NO: 29169309 NR Description: biotin carboxylase carrier protein [Lycopersicon
  misc_feature (114)..(255): Homolog of NCBI NO: 2129788 NR Description: biotin carboxyl carrier protein (clone BP7) -
  misc_feature (1)..(255): Homolog of NCBI NO: 2129787 NR Description: biotin carboxyl carrier protein (clone BP6)
  misc_feature (45)..(255): Homolog of NCBI NO: 29169309 NR Description: biotin carboxylase carrier protein [Lycopersicon
  misc_feature (1)..(255): Homolog of NCBI NO: 2129787 NR Description: biotin carboxyl carrier protein (clone BP6)
  misc_feature (36)..(252): Homolog of NCBI NO: 11357199 NR Description: biotin carboxyl carrier protein homolog
  misc_feature (1)..(255): Homolog of NCBI NO: 18417704 NR Description: biotin carboxyl carrier protein 2 (BCCP2)
  misc_feature (1)..(255): Homolog of NCBI NO: 2129789 NR Description: biotin carboxyl carrier protein precursor (clone
  misc_feature (114)..(255): Homolog of NCBI NO: 2129788 NR Description: biotin carboxyl carrier protein (clone BP7) -
  misc_feature (1)..(255): Homolog of NCBI NO: 2129789 NR Description: biotin carboxyl carrier protein precursor (clone
  misc_feature (36)..(252): Homolog of NCBI NO: 11357199 NR Description: biotin carboxyl carrier protein homolog
  misc_feature (1)..(255): Homolog of NCBI NO: 18417704 NR Description: biotin carboxyl carrier protein 2 (BCCP2)
MASLSVPCVKICALNRRVGSLPGISTQRWQPQPNGISFPSDVSQNHSAFWRLRATTNEVVSNSTPMTNGGYMNGKAKTNVPEPAELSEFMAKVSGLLKLVDSKDIVELELKQLDCEIVIRKKEALQQAVPPAPVYHSMPPVMADFSMPPAQPVALPPSPTPTSTPATAKPTSAPSSSHPPLKSPMAGTFYRSPGPGEPPFVKVGDKVQKGQIVCIIEAMKLMNEIEAEKSGTIMELLAEDGKPVSVDTPLFVIAP

SEQ ID NO: 35948 - protein, 190 aa, Arabidopsis thaliana
  peptide (1)..(190): Ceres Seq. ID no. 12482095
  misc_feature (114)..(188): Pfam Name: Biotin-requiring enzyme Pfam Description: Biotin-requiring enzyme
  misc_feature (114)..(188): Pfam Name: Biotin-requiring enzyme Pfam Description: Biotin-requiring enzyme
  misc_feature (1)..(190): Homolog of NCBI NO: 29169309 NR Description: biotin carboxylase carrier protein [Lycopersicon
  misc_feature (49)..(190): Homolog of NCBI NO: 2129788 NR Description: biotin carboxyl carrier protein (clone BP7) -
  misc_feature (1)..(190): Homolog of NCBI NO: 2129787 NR Description: biotin carboxyl carrier protein (clone BP6)
  misc_feature (1)..(190): Homolog of NCBI NO: 29169309 NR Description: biotin carboxylase carrier protein [Lycopersicon
  misc_feature (1)..(190): Homolog of NCBI NO: 2129787 NR Description: biotin carboxyl carrier protein (clone BP6)
  misc_feature (1)..(187): Homolog of NCBI NO: 11357199 NR Description: biotin carboxyl carrier protein homolog
  misc_feature (1)..(190): Homolog of NCBI NO: 18417704 NR Description: biotin carboxyl carrier protein 2 (BCCP2)
  misc_feature (1)..(190): Homolog of NCBI NO: 2129789 NR Description: biotin carboxyl carrier protein precursor (clone
  misc_feature (49)..(190): Homolog of NCBI NO: 2129788 NR Description: biotin carboxyl carrier protein (clone BP7) -
  misc_feature (1)..(190): Homolog of NCBI NO: 2129789 NR Description: biotin carboxyl carrier protein precursor (clone
  misc_feature (1)..(187): Homolog of NCBI NO: 11357199 NR Description: biotin carboxyl carrier protein homolog
  misc_feature (1)..(190): Homolog of NCBI NO: 18417704 NR Description: biotin carboxyl carrier protein 2 (BCCP2)
MTNGGYMNGKAKTNVPEPAELSEFMAKVSGLLKLVDSKDIVELELKQLDCEIVIRKKEALQQAVPPAPVYHSMPPVMADFSMPPAQPVALPPSPTPTSTPATAKPTSAPSSSHPPLKSPMAGTFYRSPGPGEPPFVKVGDKVQKGQIVCIIEAMKLMNEIEAEKSGTIMELLAEDGKPVSVDTPLFVIAP

SEQ ID NO: 35949 - protein, 184 aa, Arabidopsis thaliana
  peptide (1)..(184): Ceres Seq. ID no. 12482096
  misc_feature (108)..(182): Pfam Name: Biotin-requiring enzyme Pfam Description: Biotin-requiring enzyme
  misc_feature (108)..(182): Pfam Name: Biotin-requiring enzyme Pfam Description: Biotin-requiring enzyme
  misc_feature (1)..(184): Homolog of NCBI NO: 29169309 NR Description: biotin carboxylase carrier protein [Lycopersicon
  misc_feature (43)..(184): Homolog of NCBI NO: 2129788 NR Description: biotin carboxyl carrier protein (clone BP7) -
  misc_feature (1)..(184): Homolog of NCBI NO: 2129787 NR Description: biotin carboxyl carrier protein (clone BP6)
  misc_feature (1)..(184): Homolog of NCBI NO: 29169309 NR Description: biotin carboxylase carrier protein [Lycopersicon
  misc_feature (1)..(184): Homolog of NCBI NO: 2129787 NR Description: biotin carboxyl carrier protein (clone BP6)
  misc_feature (1)..(181): Homolog of NCBI NO: 11357199 NR Description: biotin carboxyl carrier protein homolog
  misc_feature (1)..(184): Homolog of NCBI NO: 18417704 NR Description: biotin carboxyl carrier protein 2 (BCCP2)
  misc_feature (1)..(184): Homolog of NCBI NO: 2129789 NR Description: biotin carboxyl carrier protein precursor (clone
  misc_feature (43)..(184): Homolog of NCBI NO: 2129788 NR Description: biotin carboxyl carrier protein (clone BP7) -
  misc_feature (1)..(184): Homolog of NCBI NO: 2129789 NR Description: biotin carboxyl carrier protein precursor (clone
  misc_feature (1)..(181): Homolog of NCBI NO: 11357199 NR Description: biotin carboxyl carrier protein homolog
  misc_feature (1)..(184): Homolog of NCBI NO: 18417704 NR Description: biotin carboxyl carrier protein 2 (BCCP2)
MNGKAKTNVPEPAELSEFMAKVSGLLKLVDSKDIVELELKQLDCEIVIRKKEALQQAVPPAPVYHSMPPVMADFSMPPAQPVALPPSPTPTSTPATAKPTSAPSSSHPPLKSPMAGTFYRSPGPGEPPFVKVGDKVQKGQIVCIIEAMKLMNEIEAEKSGTIMELLAEDGKPVSVDTPLFVIAP

SEQ ID NO: 35950 - DNA, 1552 bp, Arabidopsis thaliana
  misc_feature (1)..(1552): Ceres Seq. ID no. 12325208
  misc_feature: MA Experiment ID: 108434 Result: Down-regulated in Transcription
  misc_feature: MA Experiment 108434 PARAMETER Experiment Name: At_Root_Tips_cDNA_P Parameter: Tissue Value: Root Tips
  misc_feature: MA Experiment ID: 108595 Result: Up-regulated in Transcription
  misc_feature: MA Experiment 108595 PARAMETER Experiment Name: At_Ler-pi_Ovule_cDNA_P Parameter: Plant Line Value: null
  misc_feature: MA Experiment ID: 20000113 Result: Down-regulated in Transcription
  misc_feature: MA Experiment 20000113 PARAMETER Experiment Name: At_42deg_Heat_cDNA_P Parameter: Temperature (deg C) Value: 42 vs. 22
  misc_feature: MA Experiment 20000113 PARAMETER Experiment Name: At_42deg_Heat_cDNA_P Parameter: Timepoint (hr) Value: 8
  misc_feature: MA Experiment 20000113 PARAMETER Experiment Name: At_42deg_Heat_cDNA_P Parameter: Tissue Value: Aerial
  misc_feature: MA Experiment ID: 20000173 Result: Down-regulated in Transcription
  misc_feature: MA Experiment 20000173 PARAMETER Experiment Name: At_42deg_Heat_P Parameter: Age (day) Value: 14
  misc_feature: MA Experiment 20000173 PARAMETER Experiment Name: At_42deg_Heat_P Parameter: Organism Value: A. thaliana
  misc_feature: MA Experiment 20000173 PARAMETER Experiment Name: At_42deg_Heat_P Parameter: Plant Line Value: WS
  misc_feature: MA Experiment 20000173 PARAMETER Experiment Name: At_42deg_Heat_P Parameter: Temperature (deg C) Value: 42 vs. 22
  misc_feature: MA Experiment 20000173 PARAMETER Experiment Name: At_42deg_Heat_P Parameter: Timepoint (hr) Value: 6
  misc_feature: MA Experiment 20000173 PARAMETER Experiment Name: At_42deg_Heat_P Parameter: Tissue Value: Aerial
  misc_feature: MA Experiment ID: 20000184 Result: Down-regulated in Transcription
  misc_feature: MA Experiment 20000184 PARAMETER Experiment Name: At_Shoots__P Parameter: Age (day) Value: 7
  misc_feature: MA Experiment 20000184 PARAMETER Experiment Name: At_Shoots__P Parameter: Tissue Value: Shoots vs. Whole Plant
  misc_feature: MA Experiment ID: 20000438 Result: Down-regulated in Transcription
  misc_feature: MA Experiment 20000438 PARAMETER Experiment Name: At_Shoots__P Parameter: Age (day) Value: 14
  misc_feature: MA Experiment 20000438 PARAMETER Experiment Name: At_Shoots__P Parameter: Tissue Value: Shoots vs. Whole Plant
atgtagatttgactttgtttcaaagcggaggaagaaggagaaggcaacactaaagatcaaaaccttagatctttgcttacgctttcctctggttaggaacggtttttcagaaacaaaagattccatttttagattcaattcccttctggtttgaaaaatgatatcaaaatggtgaatagaagtgatttggtggtgattggcatctcggttgggcttgcacttggtctcttgctcgctctgcttttgttcttcgccataaaatggtactatggccgctctcacctcaggcgatgcgctaatgaacagaattccccgactctacctgttcacactgctaaaagaggtgtagtaatccctgatgatagagcaaacacagaatcgtcacagccacctgagaatggagcaccaactcaacatcagccatggtggaacaaccacaccaaagatctcactgtatctgcatccggcatacctagatataactacaaggatattcagaaagcaacacaaaatttcacaaccgttctaggacaaggatcttttggtcctgtctacaaagcggttatgcccaatggagaattagctgcagcgaaagttcatggctctaattcaagtcaaggagacagagagtttcaaaccgaggtatctttacttgggagactgcatcaccggaatcttgtgaacttgacaggatactgtgtcgataaaagtcaccggatgttgatctatgagttcatgagtaatggaagtttggagaatcttttgtatggcggaatgcaagtcttgaattgggaagagcggcttcaaatcgctcttgacatctcccacggcattgaataccttcacgaaggggccgtgccgccagttattcaccgtgatcttaagtcagcaaacattttgttagatcattccatgagagctaaggtcgcggatttcgggttgtcgaaagagatggttttagatagaatgacttccggattgaagggtactcacggctacatggatccaacatacatttcgactaacaaatacacgatgaagagcgacatttacagtttcggtgtcatcattcttgagctcattactgcaatccatccccaacagaatctgatggaatacatcaacctggcttcgatgagtccagatggtatcgacgaaatactcgatcagaaactagtgggaaacgcaagcattgaagaagtgaggttactggcgaagattgcaaacaggtgtgtgcataagacaccaagaaaaagaccatctattggagaagtaacacagttcatactaaagatcaaacaaagtcggtctcgaggaagaagacaggacacgatgtcttcatcgtttggtgttggttatgaggaagatctgtcaagggttatgagcaggattaaggatcagcatgttgagttagggttattggctggtgttaaggaagagaatcatcaagagaggaacattgcaacaacatagtaactatttactttaggagtaagtctttttgtacatattaccacatgaggctcaaaagtaagatttctccctcttctgc

SEQ ID NO: 35951 - protein, 434 aa, Arabidopsis thaliana
  peptide (1)..(434): Ceres Seq. ID no. 12325209
  misc_feature (114)..(373): Pfam Name: Protein kinase domain Pfam Description: Protein kinase domain
  misc_feature (87)..(401): Homolog of NCBI NO: 7715608 NR Description: F20B17.5 [Arabidopsis thaliana]
  misc_feature (87)..(401): Homolog of NCBI NO: 30699436 NR Description: leucine-rich repeat transmembrane protein kinase,
  misc_feature (79)..(413): Homolog of NCBI NO: 8978273 NR Description: receptor protein kinase-like [Arabidopsis
  misc_feature (63)..(396): Homolog of NCBI NO: 15227790 NR Description: putative protein kinase; protein id: At2g23200.1
  misc_feature (72)..(399): Homolog of NCBI NO: 38345516 NR Description: OSJNBa0039K24.19 [Oryza sativa (japonica
  misc_feature (1)..(392): Homolog of NCBI NO: 30696480 NR Description: protein kinase family [Arabidopsis thaliana]
  misc_feature (1)..(382): Homolog of NCBI NO: 38636770 NR Description: putative serine/threonine-specific protein kinase
  misc_feature (1)..(423): Homolog of NCBI NO: 1076634 NR Description: serine/threonine-specific protein kinase NPK15
  misc_feature (1)..(434): Homolog of NCBI NO: 11358843 NR Description: serine/threonine-specific protein kinase-like
  misc_feature (1)..(434): Homolog of NCBI NO: 18417765 NR Description: serine/threonine-specific protein kinase-like
MVNRSDLVVIGISVGLALGLLLALLLFFAIKWYYGRSHLRRCANEQNSPTLPVHTAKRGVVIPDDRANTESSQPPENGAPTQHQPWWNNHTKDLTVSASGIPRYNYKDIQKATQNFTTVLGQGSFGPVYKAVMPNGELAAAKVHGSNSSQGDREFQTEVSLLGRLHHRNLVNLTGYCVDKSHRMLIYEFMSNGSLENLLYGGMQVLNWEERLQIALDISHGIEYLHEGAVPPVIHRDLKSANILLDHSMRAKVADFGLSKEMVLDRMTSGLKGTHGYMDPTYISTNKYTMKSDIYSFGVIILELITAIHPQQNLMEYINLASMSPDGIDEILDQKLVGNASIEEVRLLAKIANRCVHKTPRKRPSIGEVTQFILKIKQSRSRGRRQDTMSSSFGVGYEEDLSRVMSRIKDQHVELGLLAGVKEENHQERNIATT

SEQ ID NO: 35952 - protein, 302 aa, Arabidopsis thaliana
  peptide (1)..(302): Ceres Seq. ID no. 12325210
  misc_feature (1)..(241): Pfam Name: Protein kinase domain Pfam Description: Protein kinase domain
  misc_feature (1)..(269): Homolog of NCBI NO: 7715608 NR Description: F20B17.5 [Arabidopsis thaliana]
  misc_feature (1)..(269): Homolog of NCBI NO: 30699436 NR Description: leucine-rich repeat transmembrane protein kinase,
  misc_feature (1)..(281): Homolog of NCBI NO: 8978273 NR Description: receptor protein kinase-like [Arabidopsis
  misc_feature (1)..(264): Homolog of NCBI NO: 15227790 NR Description: putative protein kinase; protein id: At2g23200.1
  misc_feature (1)..(267): Homolog of NCBI NO: 38345516 NR Description: OSJNBa0039K24.19 [Oryza sativa (japonica
  misc_feature (1)..(260): Homolog of NCBI NO: 30696480 NR Description: protein kinase family [Arabidopsis thaliana]
  misc_feature (1)..(250): Homolog of NCBI NO: 38636770 NR Description: putative serine/threonine-specific protein kinase
  misc_feature (1)..(291): Homolog of NCBI NO: 1076634 NR Description: serine/threonine-specific protein kinase NPK15
  misc_feature (1)..(302): Homolog of NCBI NO: 11358843 NR Description: serine/threonine-specific protein kinase-like
  misc_feature (1)..(302): Homolog of NCBI NO: 18417765 NR Description: serine/threonine-specific protein kinase-like
MPNGELAAAKVHGSNSSQGDREFQTEVSLLGRLHHRNLVNLTGYCVDKSHRMLIYEFMSNGSLENLLYGGMQVLNWEERLQIALDISHGIEYLHEGAVPPVIHRDLKSANILLDHSMRAKVADFGLSKEMVLDRMTSGLKGTHGYMDPTYISTNKYTMKSDIYSFGVIILELITAIHPQQNLMEYINLASMSPDGIDEILDQKLVGNASIEEVRLLAKIANRCVHKTPRKRPSIGEVTQFILKIKQSRSRGRRQDTMSSSFGVGYEEDLSRVMSRIKDQHVELGLLAGVKEENHQERNIATT

SEQ ID NO: 35953 - protein, 251 aa, Arabidopsis thaliana
  peptide (1)..(251): Ceres Seq. ID no. 12325211
  misc_feature (1)..(190): Pfam Name: Protein kinase domain Pfam Description: Protein kinase domain
  misc_feature (1)..(218): Homolog of NCBI NO: 7715608 NR Description: F20B17.5 [Arabidopsis thaliana]
  misc_feature (1)..(218): Homolog of NCBI NO: 30699436 NR Description: leucine-rich repeat transmembrane protein kinase,
  misc_feature (1)..(230): Homolog of NCBI NO: 8978273 NR Description: receptor protein kinase-like [Arabidopsis
  misc_feature (1)..(213): Homolog of NCBI NO: 15227790 NR Description: putative protein kinase; protein id: At2g23200.1
  misc_feature (1)..(216): Homolog of NCBI NO: 38345516 NR Description: OSJNBa0039K24.19 [Oryza sativa (japonica
  misc_feature (1)..(209): Homolog of NCBI NO: 30696480 NR Description: protein kinase family [Arabidopsis thaliana]
  misc_feature (1)..(199): Homolog of NCBI NO: 38636770 NR Description: putative serine/threonine-specific protein kinase
  misc_feature (1)..(240): Homolog of NCBI NO: 1076634 NR Description: serine/threonine-specific protein kinase NPK15
  misc_feature (1)..(251): Homolog of NCBI NO: 11358843 NR Description: serine/threonine-specific protein kinase-like
  misc_feature (1)..(251): Homolog of NCBI NO: 18417765 NR Description: serine/threonine-specific protein kinase-like
MLIYEFMSNGSLENLLYGGMQVLNWEERLQIALDISHGIEYLHEGAVPPVIHRDLKSANILLDHSMRAKVADFGLSKEMVLDRMTSGLKGTHGYMDPTYISTNKYTMKSDIYSFGVIILELITAIHPQQNLMEYINLASMSPDGIDEILDQKLVGNASIEEVRLLAKIANRCVHKTPRKRPSIGEVTQFILKIKQSRSRGRRQDTMSSSFGVGYEEDLSRVMSRIKDQHVELGLLAGVKEENHQERNIATT

SEQ ID NO: 35954 - DNA, 1397 bp, Arabidopsis thaliana
  misc_feature (1)..(1397): Ceres Seq. ID no. 12370917
  misc_feature: MA Experiment ID: 108434 Result: Up-regulated in Transcription
  misc_feature: MA Experiment 108434 PARAMETER Experiment Name: At_Root_Tips_cDNA_P Parameter: Tissue Value: Root Tips
  misc_feature: MA Experiment ID: 108462 Result: Down-regulated in Transcription
  misc_feature: MA Experiment 108462 PARAMETER Experiment Name: At_Germinating_Seeds_cDNA_P Parameter: Age (day) Value: 2 vs. 0
  misc_feature: MA Experiment 108462 PARAMETER Experiment Name: At_Germinating_Seeds_cDNA_P Parameter: Tissue Value: Germinating Seeds
  misc_feature: MA Experiment ID: 108463 Result: Down-regulated in Transcription
  misc_feature: MA Experiment 108463 PARAMETER Experiment Name: At_Germinating_Seeds_cDNA_P Parameter: Age (day) Value: 3 vs. 0
  misc_feature: MA Experiment 108463 PARAMETER Experiment Name: At_Germinating_Seeds_cDNA_P Parameter: Tissue Value: Germinating Seeds
  misc_feature: MA Experiment ID: 108464 Result: Down-regulated in Transcription
  misc_feature: MA Experiment 108464 PARAMETER Experiment Name: At_Germinating_Seeds_cDNA_P Parameter: Age (day) Value: 4 vs. 0
  misc_feature: MA Experiment 108464 PARAMETER Experiment Name: At_Germinating_Seeds_cDNA_P Parameter: Tissue Value: Germinating Seeds
  misc_feature: MA Experiment ID: 108595 Result: Down-regulated in Transcription
  misc_feature: MA Experiment 108595 PARAMETER Experiment Name: At_Ler-pi_Ovule_cDNA_P Parameter: Plant Line Value: null
  misc_feature: MA Experiment ID: 108607 Result: Down-regulated in Transcription
  misc_feature: MA Experiment 108607 PARAMETER Experiment Name: At_100uM_ABA_cDNA_P Parameter: Timepoint (hr) Value: 4
  misc_feature: MA Experiment 108607 PARAMETER Experiment Name: At_100uM_ABA_cDNA_P Parameter: Tissue Value: Aerial
  misc_feature: MA Experiment 108607 PARAMETER Experiment Name: At_100uM_ABA_cDNA_P Parameter: Treatment Value: 100uM ABA vs. No Treatment
  misc_feature: MA Experiment ID: 20000184 Result: Up-regulated in Transcription
  misc_feature: MA Experiment 20000184 PARAMETER Experiment Name: At_Shoots__P Parameter: Age (day) Value: 7
  misc_feature: MA Experiment 20000184 PARAMETER Experiment Name: At_Shoots__P Parameter: Tissue Value: Shoots vs. Whole Plant
  misc_feature: MA Experiment ID: 20000227 Result: Up-regulated in Transcription
  misc_feature: MA Experiment 20000227 PARAMETER Experiment Name: At_Root-Tips-vs-Tops_P Parameter: Tissue Value: Root Tips vs. Root Tops
  misc_feature: MA Experiment ID: 20000234 Result: Up-regulated in Transcription
  misc_feature: MA Experiment 20000234 PARAMETER Experiment Name: At_Siliques_P Parameter: Age (day) Value: 21
  misc_feature: MA Experiment 20000234 PARAMETER Experiment Name: At_Siliques_P Parameter: Organism Value: A. thaliana
  misc_feature: MA Experiment 20000234 PARAMETER Experiment Name: At_Siliques_P Parameter: Plant Line Value: WS
  misc_feature: MA Experiment 20000234 PARAMETER Experiment Name: At_Siliques_P Parameter: Tissue Value: Less Than 5mm Siliques vs. Whole Plant
  misc_feature: MA Experiment ID: 20001557 Result: Up-regulated in Transcription
  misc_feature: MA Experiment 20001557 PARAMETER Experiment Name: At_Drought_Soil_Dry_P Parameter: Age (day) Value: 27
  misc_feature: MA Experiment 20001557 PARAMETER Experiment Name: At_Drought_Soil_Dry_P Parameter: Organism Value: A. thaliana
  misc_feature: MA Experiment 20001557 PARAMETER Experiment Name: At_Drought_Soil_Dry_P Parameter: Plant Line Value: WS
  misc_feature: MA Experiment 20001557 PARAMETER Experiment Name: At_Drought_Soil_Dry_P Parameter: Post Timepoint (hr) Value: 3
  misc_feature: MA Experiment 20001557 PARAMETER Experiment Name: At_Drought_Soil_Dry_P Parameter: Post-Treatment Value: Re-Water vs. No Drought
  misc_feature: MA Experiment 20001557 PARAMETER Experiment Name: At_Drought_Soil_Dry_P Parameter: Timepoint (day) Value: 13
  misc_feature: MA Experiment 20001557 PARAMETER Experiment Name: At_Drought_Soil_Dry_P Parameter: Treatment Value: Drought vs. No Drought
  misc_feature: MA Experiment ID: 20001558 Result: Up-regulated in Transcription
  misc_feature: MA Experiment 20001558 PARAMETER Experiment Name: At_Drought_Soil_Dry_P Parameter: Age (day) Value: 27
  misc_feature: MA Experiment 20001558 PARAMETER Experiment Name: At_Drought_Soil_Dry_P Parameter: Organism Value: A. thaliana
  misc_feature: MA Experiment 20001558 PARAMETER Experiment Name: At_Drought_Soil_Dry_P Parameter: Plant Line Value: WS
  misc_feature: MA Experiment 20001558 PARAMETER Experiment Name: At_Drought_Soil_Dry_P Parameter: Post Timepoint (hr) Value: 6
  misc_feature: MA Experiment 20001558 PARAMETER Experiment Name: At_Drought_Soil_Dry_P Parameter: Post-Treatment Value: Re-Water vs. No Drought
  misc_feature: MA Experiment 20001558 PARAMETER Experiment Name: At_Drought_Soil_Dry_P Parameter: Timepoint (day) Value: 13
  misc_feature: MA Experiment 20001558 PARAMETER Experiment Name: At_Drought_Soil_Dry_P Parameter: Treatment Value: Drought vs. No Drought
  misc_feature: MA Experiment ID: 20001560 Result: Up-regulated in Transcription
  misc_feature: MA Experiment 20001560 PARAMETER Experiment Name: At_Drought_Soil_Dry_P Parameter: Age (day) Value: 28
  misc_feature: MA Experiment 20001560 PARAMETER Experiment Name: At_Drought_Soil_Dry_P Parameter: Organism Value: A. thaliana
  misc_feature: MA Experiment 20001560 PARAMETER Experiment Name: At_Drought_Soil_Dry_P Parameter: Plant Line Value: WS
  misc_feature: MA Experiment 20001560 PARAMETER Experiment Name: At_Drought_Soil_Dry_P Parameter: Post Timepoint (hr) Value: None
  misc_feature: MA Experiment 20001560 PARAMETER Experiment Name: At_Drought_Soil_Dry_P Parameter: Post-Treatment Value: None
  misc_feature: MA Experiment 20001560 PARAMETER Experiment Name: At_Drought_Soil_Dry_P Parameter: Timepoint (day) Value: 14
  misc_feature: MA Experiment 20001560 PARAMETER Experiment Name: At_Drought_Soil_Dry_P Parameter: Treatment Value: Drought vs. No Drought
  misc_feature: MA Experiment ID: 20001757 Result: Up-regulated in Transcription
  misc_feature: MA Experiment 20001757 PARAMETER Experiment Name: At_50mM_NH4NO3_L-to-H_P Parameter: Timepoint (hr) Value: 6
  misc_feature: MA Experiment 20001757 PARAMETER Experiment Name: At_50mM_NH4NO3_L-to-H_P Parameter: Tissue Value: Leaf
  misc_feature: MA Experiment 20001757 PARAMETER Experiment Name: At_50mM_NH4NO3_L-to-H_P Parameter: Treatment Value: 50mM NH4NO3 vs 100mM Mannitol
ctaatttctcaaagagtctaaagagacggagagtgagagaagagagaaacatttcgagacaaatggccgccgccgctgctcgtcctctcgtcaccatccaaaccttggatggtgacatgtccaccgatcaatcctccaccgtcgtacttcccgacgtcatgacggcgccagttcgaccagacatcgttaacttcgttcacgcccaaatctccaacaacagccgtcagccatacgccgtatcgaagaaggccgagtcctggggaaccggacgtgccgtgtctcgtatccctcgtgttcccggtggtggtactcaccgtgctggtcaagctgcgttcggtaacatgtgtcgtggtggtcgtatgttcgctccaaccaagatctggcgccgctggcaccgtcgtgtcaatgtcaacatgaagcgtcacgcaatcgtctcagctatcgctgcaactgctgttcctgcgcttgtgatggctcgtggtcacaagatcgagaatgttcctgagatgcctcttgttgtgagtgactccgccgaagctgtggagaagacctcagctgcgatcaaggttttgaaacagatcggtgcttatgatgatgctgagaaggcaaagaacagcattggaatccgtcctggtaaaggtaaaatgaggaaccgtcgttacatttctaggaaaggtcctctggtggtttatggaactgaaggatctaagatagttaaggcgtttagaaaccttcctggtgttgagctttgtcatgtggagaggcttaatttgttgaagcttgctcctggtggtcaccttggtcggtttgtgatctggaccaagtctgcctttgagaagcttgagtctatctatggttcgtttgaagccatcagagaagaaggggggtatgtgcttcctcgtgcaaagatggtgaatgctgatcttgccaggattatcaattcagatgagattcagagtgttgtgaatccgatcaagaaggatgcgaagagggctgttcttaagaagaatccattgaagaatctcaatgtgatgttgaagttgaatccttatgctaagaccgcgaagaggatgtcactgttagctgaagcacagagagttaaggctaagaaggagaagctcgccaagaagaggaaaaccgttaccaaggaggaggcgttggcaatcaaagcagcaggcaagtcgtggtacaagactatgatctccgacagtgattacaccgagtttgataacttcaccaaatggctcggtgctagccagtaataatctcgtctgctttggaacactttccatattttagtcaaaagattttggtttttttaatctgttttgtctttgggtgtctggatatcaagttgaattatgaacaagtttcacttttttacatctccatttctt

SEQ ID NO: 35955 - protein, 419 aa, Arabidopsis thaliana
  peptide (1)..(419): Ceres Seq. ID no. 12370918
  misc_feature (45)..(283): Pfam Name: Ribosomal protein L4/L1 family Pfam Description: Ribosomal protein L4/L1 family
  misc_feature (25)..(384): Homolog of NCBI NO: 1350686 NR Description: 60S RIBOSOMAL PROTEIN L4 (L1)
  misc_feature (69)..(419): Homolog of NCBI NO: 6441068 NR Description: 60S ribosomal protein L4 [Chlamydomonas sp. HS-5]
  misc_feature (114)..(419): Homolog of NCBI NO: 13605831 NR Description: AT5g02870/F9G14_180 [Arabidopsis thaliana]
  misc_feature (23)..(419): Homolog of NCBI NO: 34897236 NR Description: putative 60S ribosomal protein L1
  misc_feature (23)..(419): Homolog of NCBI NO: 34393487 NR Description: putative 60S ribosomal protein L4/L1
  misc_feature (22)..(419): Homolog of NCBI NO: 17367847 NR Description: 60S ribosomal protein L4 (L1)
  misc_feature (21)..(419): Homolog of NCBI NO: 26450328 NR Description: putative 60S ribosomal protein [Arabidopsis
  misc_feature (21)..(419): Homolog of NCBI NO: 15242558 NR Description: 60S ribosomal protein - like
  misc_feature (21)..(419): Homolog of NCBI NO: 21593543 NR Description: 60S ribosomal protein L4-B (L1) [Arabidopsis
  misc_feature (21)..(419): Homolog of NCBI NO: 15232723 NR Description: putative 60S ribosomal protein L1
NFSKSLKRRRVREERNISRQMAAAAARPLVTIQTLDGDMSTDQSSTVVLPDVMTAPVRPDIVNFVHAQISNNSRQPYAVSKKAESWGTGRAVSRIPRVPGGGTHRAGQAAFGNMCRGGRMFAPTKIWRRWHRRVNVNMKRHAIVSAIAATAVPALVMARGHKIENVPEMPLVVSDSAEAVEKTSAAIKVLKQIGAYDDAEKAKNSIGIRPGKGKMRNRRYISRKGPLVVYGTEGSKIVKAFRNLPGVELCHVERLNLLKLAPGGHLGRFVIWTKSAFEKLESIYGSFEAIREEGGYVLPRAKMVNADLARIINSDEIQSVVNPIKKDAKRAVLKKNPLKNLNVMLKLNPYAKTAKRMSLLAEAQRVKAKKEKLAKKRKTVTKEEALAIKAAGKSWYKTMISDSDYTEFDNFTKWLGASQ

SEQ ID NO: 35956 - protein, 399 aa, Arabidopsis thaliana
  peptide (1)..(399): Ceres Seq. ID no. 12370919
  misc_feature (25)..(263): Pfam Name: Ribosomal protein L4/L1 family Pfam Description: Ribosomal protein L4/L1 family
  misc_feature (5)..(364): Homolog of NCBI NO: 1350686 NR Description: 60S RIBOSOMAL PROTEIN L4 (L1)
  misc_feature (49)..(399): Homolog of NCBI NO: 6441068 NR Description: 60S ribosomal protein L4 [Chlamydomonas sp. HS-5]
  misc_feature (94)..(399): Homolog of NCBI NO: 13605831 NR Description: AT5g02870/F9G14_180 [Arabidopsis thaliana]
  misc_feature (3)..(399): Homolog of NCBI NO: 34897236 NR Description: putative 60S ribosomal protein L1
  misc_feature (3)..(399): Homolog of NCBI NO: 34393487 NR Description: putative 60S ribosomal protein L4/L1
  misc_feature (2)..(399): Homolog of NCBI NO: 17367847 NR Description: 60S ribosomal protein L4 (L1)
  misc_feature (1)..(399): Homolog of NCBI NO: 26450328 NR Description: putative 60S ribosomal protein [Arabidopsis
  misc_feature (1)..(399): Homolog of NCBI NO: 15242558 NR Description: 60S ribosomal protein - like
  misc_feature (1)..(399): Homolog of NCBI NO: 21593543 NR Description: 60S ribosomal protein L4-B (L1) [Arabidopsis
  misc_feature (1)..(399): Homolog of NCBI NO: 15232723 NR Description: putative 60S ribosomal protein L1
MAAAAARPLVTIQTLDGDMSTDQSSTVVLPDVMTAPVRPDIVNFVHAQISNNSRQPYAVSKKAESWGTGRAVSRIPRVPGGGTHRAGQAAFGNMCRGGRMFAPTKIWRRWHRRVNVNMKRHAIVSAIAATAVPALVMARGHKIENVPEMPLVVSDSAEAVEKTSAAIKVLKQIGAYDDAEKAKNSIGIRPGKGKMRNRRYISRKGPLVVYGTEGSKIVKAFRNLPGVELCHVERLNLLKLAPGGHLGRFVIWTKSAFEKLESIYGSFEAIREEGGYVLPRAKMVNADLARIINSDEIQSVVNPIKKDAKRAVLKKNPLKNLNVMLKLNPYAKTAKRMSLLAEAQRVKAKKEKLAKKRKTVTKEEALAIKAAGKSWYKTMISDSDYTEFDNFTKWLGASQ

SEQ ID NO: 35957 - protein, 381 aa, Arabidopsis thaliana
  peptide (1)..(381): Ceres Seq. ID no. 12370920
  misc_feature (7)..(245): Pfam Name: Ribosomal protein L4/L1 family Pfam Description: Ribosomal protein L4/L1 family
  misc_feature (1)..(346): Homolog of NCBI NO: 1350686 NR Description: 60S RIBOSOMAL PROTEIN L4 (L1)
  misc_feature (31)..(381): Homolog of NCBI NO: 6441068 NR Description: 60S ribosomal protein L4 [Chlamydomonas sp. HS-5]
  misc_feature (76)..(381): Homolog of NCBI NO: 13605831 NR Description: AT5g02870/F9G14_180 [Arabidopsis thaliana]
  misc_feature (1)..(381): Homolog of NCBI NO: 34897236 NR Description: putative 60S ribosomal protein L1
  misc_feature (1)..(381): Homolog of NCBI NO: 34393487 NR Description: putative 60S ribosomal protein L4/L1
  misc_feature (1)..(381): Homolog of NCBI NO: 17367847 NR Description: 60S ribosomal protein L4 (L1)
  misc_feature (1)..(381): Homolog of NCBI NO: 26450328 NR Description: putative 60S ribosomal protein [Arabidopsis
  misc_feature (1)..(381): Homolog of NCBI NO: 15242558 NR Description: 60S ribosomal protein - like
  misc_feature (1)..(381): Homolog of NCBI NO: 21593543 NR Description: 60S ribosomal protein L4-B (L1) [Arabidopsis
  misc_feature (1)..(381): Homolog of NCBI NO: 15232723 NR Description: putative 60S ribosomal protein L1
MSTDQSSTVVLPDVMTAPVRPDIVNFVHAQISNNSRQPYAVSKKAESWGTGRAVSRIPRVPGGGTHRAGQAAFGNMCRGGRMFAPTKIWRRWHRRVNVNMKRHAIVSAIAATAVPALVMARGHKIENVPEMPLVVSDSAEAVEKTSAAIKVLKQIGAYDDAEKAKNSIGIRPGKGKMRNRRYISRKGPLVVYGTEGSKIVKAFRNLPGVELCHVERLNLLKLAPGGHLGRFVIWTKSAFEKLESIYGSFEAIREEGGYVLPRAKMVNADLARIINSDEIQSVVNPIKKDAKRAVLKKNPLKNLNVMLKLNPYAKTAKRMSLLAEAQRVKAKKEKLAKKRKTVTKEEALAIKAAGKSWYKTMISDSDYTEFDNFTKWLGASQ

SEQ ID NO: 35958 - DNA, 1910 bp, Arabidopsis thaliana; identical to SEQ ID NO: 30306
  misc_feature (1)..(1910): Ceres Seq. ID no. 13509014
  misc_feature: MA Experiment ID: 108461 Result: Down-regulated in Transcription
  misc_feature: MA Experiment 108461 PARAMETER Experiment Name: At_Germinating_Seeds_cDNA_P Parameter: Age (day) Value: 1 vs. 0
  misc_feature: MA Experiment 108461 PARAMETER Experiment Name: At_Germinating_Seeds_cDNA_P Parameter: Tissue Value: Germinating Seeds
  misc_feature: MA Experiment ID: 108462 Result: Down-regulated in Transcription
  misc_feature: MA Experiment 108462 PARAMETER Experiment Name: At_Germinating_Seeds_cDNA_P Parameter: Age (day) Value: 2 vs. 0
  misc_feature: MA Experiment 108462 PARAMETER Experiment Name: At_Germinating_Seeds_cDNA_P Parameter: Tissue Value: Germinating Seeds
  misc_feature: MA Experiment ID: 108464 Result: Down-regulated in Transcription
  misc_feature: MA Experiment 108464 PARAMETER Experiment Name: At_Germinating_Seeds_cDNA_P Parameter: Age (day) Value: 4 vs. 0
  misc_feature: MA Experiment 108464 PARAMETER Experiment Name: At_Germinating_Seeds_cDNA_P Parameter: Tissue Value: Germinating Seeds
  misc_feature: MA Experiment ID: 20000089 Result: Down-regulated in Transcription
  misc_feature: MA Experiment ID: 20000171 Result: Down-regulated in Transcription
  misc_feature: MA Experiment 20000171 PARAMETER Experiment Name: At_42deg_Heat_P Parameter: Age (day) Value: 14
  misc_feature: MA Experiment 20000171 PARAMETER Experiment Name: At_42deg_Heat_P Parameter: Organism Value: A. thaliana
  misc_feature: MA Experiment 20000171 PARAMETER Experiment Name: At_42deg_Heat_P Parameter: Plant Line Value: WS
  misc_feature: MA Experiment 20000171 PARAMETER Experiment Name: At_42deg_Heat_P Parameter: Temperature (deg C) Value: 42 vs. 22
  misc_feature: MA Experiment 20000171 PARAMETER Experiment Name: At_42deg_Heat_P Parameter: Timepoint (hr) Value: 1
  misc_feature: MA Experiment 20000171 PARAMETER Experiment Name: At_42deg_Heat_P Parameter: Tissue Value: Aerial
  misc_feature: MA Experiment ID: 20000179 Result: Up-regulated in Transcription
  misc_feature: MA Experiment 20000179 PARAMETER Experiment Name: At_Germinating_Seeds_P Parameter: Age (hr) Value: 6 vs. 0
  misc_feature: MA Experiment 20000179 PARAMETER Experiment Name: At_Germinating_Seeds_P Parameter: Tissue Value: Germinating Seeds
  misc_feature: MA Experiment ID: 20000185 Result: Down-regulated in Transcription
  misc_feature: MA Experiment 20000185 PARAMETER Experiment Name: At_Roots__P Parameter: Age (day) Value: 7 vs. 21
  misc_feature: MA Experiment 20000185 PARAMETER Experiment Name: At_Roots__P Parameter: Organism Value: A. thaliana
  misc_feature: MA Experiment 20000185 PARAMETER Experiment Name: At_Roots__P Parameter: Tissue Value: Roots vs. Whole Plant
  misc_feature: MA Experiment ID: 20000227 Result: Down-regulated in Transcription
  misc_feature: MA Experiment 20000227 PARAMETER Experiment Name: At_Root-Tips-vs-Tops_P Parameter: Tissue Value: Root Tips vs. Root Tops
  misc_feature: MA Experiment ID: 20000437 Result: Down-regulated in Transcription
  misc_feature: MA Experiment 20000437 PARAMETER Experiment Name: At_Drought_P Parameter: Age (day) Value: 8
  misc_feature: MA Experiment 20000437 PARAMETER Experiment Name: At_Drought_P Parameter: Organism Value: A. thaliana
  misc_feature: MA Experiment 20000437 PARAMETER Experiment Name: At_Drought_P Parameter: Plant Line Value: WS
  misc_feature: MA Experiment 20000437 PARAMETER Experiment Name: At_Drought_P Parameter: Timepoint (hr) Value: 24
  misc_feature: MA Experiment 20000437 PARAMETER Experiment Name: At_Drought_P Parameter: Tissue Value: Whole Plant
  misc_feature: MA Experiment 20000437 PARAMETER Experiment Name: At_Drought_P Parameter: Treatment Value: Drought vs. No Drought
  misc_feature: MA Experiment ID: 20000439 Result: Down-regulated in Transcription
  misc_feature: MA Experiment 20000439 PARAMETER Experiment Name: At_Roots__P Parameter: Age (day) Value: 14 vs. 21
  misc_feature: MA Experiment 20000439 PARAMETER Experiment Name: At_Roots__P Parameter: Organism Value: A. thaliana
  misc_feature: MA Experiment 20000439 PARAMETER Experiment Name: At_Roots__P Parameter: Tissue Value: Roots vs. Whole Plant
  misc_feature: MA Experiment ID: 20000495 Result: Down-regulated in Transcription
  misc_feature: MA Experiment 20000495 PARAMETER Experiment Name: At_Guard_Cells_P Parameter: Harvest Date Value: 8/2/2002
  misc_feature: MA Experiment 20000495 PARAMETER Experiment Name: At_Guard_Cells_P Parameter: Organism Value: A. thaliana
  misc_feature: MA Experiment 20000495 PARAMETER Experiment Name: At_Guard_Cells_P Parameter: Tissue Value: Guard Cells vs. Leaves
  misc_feature: MA Experiment ID: 20000573 Result: Down-regulated in Transcription
  misc_feature: MA Experiment 20000573 PARAMETER Experiment Name: At_100uM_ABA_Mutants__P Parameter: Organism Value: A. thaliana
  misc_feature: MA Experiment 20000573 PARAMETER Experiment Name: At_100uM_ABA_Mutants__P Parameter: Plant Line Value: CS22 vs. Ler wt
  misc_feature: MA Experiment 20000573 PARAMETER Experiment Name: At_100uM_ABA_Mutants__P Parameter: Timepoint (hr) Value: N/A
  misc_feature: MA Experiment 20000573 PARAMETER Experiment Name: At_100uM_ABA_Mutants__P Parameter: Tissue Value: Whole Plant
  misc_feature: MA Experiment 20000573 PARAMETER Experiment Name: At_100uM_ABA_Mutants__P Parameter: Treatment Value: None
  misc_feature: MA Experiment ID: 20000574 Result: Down-regulated in Transcription
  misc_feature: MA Experiment 20000574 PARAMETER Experiment Name: At_100uM_ABA_Mutants__P Parameter: Organism Value: A. thaliana
  misc_feature: MA Experiment 20000574 PARAMETER Experiment Name: At_100uM_ABA_Mutants__P Parameter: Plant Line Value: CS23 vs. Ler wt
  misc_feature: MA Experiment 20000574 PARAMETER Experiment Name: At_100uM_ABA_Mutants__P Parameter: Timepoint (hr) Value: N/A
  misc_feature: MA Experiment 20000574 PARAMETER Experiment Name: At_100uM_ABA_Mutants__P Parameter: Tissue Value: Whole Plant
  misc_feature: MA Experiment 20000574 PARAMETER Experiment Name: At_100uM_ABA_Mutants__P Parameter: Treatment Value: None
  misc_feature: MA Experiment ID: 20001248 Result: Down-regulated in Transcription
  misc_feature: MA Experiment 20001248 PARAMETER Experiment Name: At_Far-red-induction_P Parameter: Age (day) Value: 7
  misc_feature: MA Experiment 20001248 PARAMETER Experiment Name: At_Far-red-induction_P Parameter: Light Value: Far-red vs. White
  misc_feature: MA Experiment 20001248 PARAMETER Experiment Name: At_Far-red-induction_P Parameter: Organism Value: A. thaliana
  misc_feature: MA Experiment 20001248 PARAMETER Experiment Name: At_Far-red-induction_P Parameter: Plant Line Value: Columbia
  misc_feature: MA Experiment 20001248 PARAMETER Experiment Name: At_Far-red-induction_P Parameter: Timepoint (hr) Value: 4
  misc_feature: MA Experiment 20001248 PARAMETER Experiment Name: At_Far-red-induction_P Parameter: Tissue Value: Whole Plant
  misc_feature: MA Experiment ID: 20001560 Result: Down-regulated in Transcription
  misc_feature: MA Experiment 20001560 PARAMETER Experiment Name: At_Drought_Soil_Dry_P Parameter: Age (day) Value: 28
  misc_feature: MA Experiment 20001560 PARAMETER Experiment Name: At_Drought_Soil_Dry_P Parameter: Organism Value: A. thaliana
  misc_feature: MA Experiment 20001560 PARAMETER Experiment Name: At_Drought_Soil_Dry_P Parameter: Plant Line Value: WS
  misc_feature: MA Experiment 20001560 PARAMETER Experiment Name: At_Drought_Soil_Dry_P Parameter: Post Timepoint (hr) Value: None
  misc_feature: MA Experiment 20001560 PARAMETER Experiment Name: At_Drought_Soil_Dry_P Parameter: Post-Treatment Value: None
  misc_feature: MA Experiment 20001560 PARAMETER Experiment Name: At_Drought_Soil_Dry_P Parameter: Timepoint (day) Value: 14
  misc_feature: MA Experiment 20001560 PARAMETER Experiment Name: At_Drought_Soil_Dry_P Parameter: Treatment Value: Drought vs. No Drought
  misc_feature: MA Experiment ID: 20001905 Result: Down-regulated in Transcription
  misc_feature: MA Experiment 20001905 PARAMETER Experiment Name: At_Drought_Reproduction_P Parameter: Age (day) Value: 40
  misc_feature: MA Experiment 20001905 PARAMETER Experiment Name: At_Drought_Reproduction_P Parameter: Organism Value: A. thaliana
  misc_feature: MA Experiment 20001905 PARAMETER Experiment Name: At_Drought_Reproduction_P Parameter: Plant Line Value: WS
  misc_feature: MA Experiment 20001905 PARAMETER Experiment Name: At_Drought_Reproduction_P Parameter: Timepoint (day) Value: 10
  misc_feature: MA Experiment 20001905 PARAMETER Experiment Name: At_Drought_Reproduction_P Parameter: Tissue Value: Rosettes
  misc_feature: MA Experiment 20001905 PARAMETER Experiment Name: At_Drought_Reproduction_P Parameter: Treatment Value: Drought vs. No Drought

SEQ ID NO: 35959 - protein, 510 aa, Arabidopsis thaliana; identical to SEQ ID NO: 30307
  peptide (1)..(510): Ceres Seq. ID no. 13509015
  misc_feature (120)..(508): Pfam Name: Eukaryotic aspartyl protease Pfam Description: Eukaryotic aspartyl protease
  misc_feature (120)..(508): Pfam Name: Eukaryotic aspartyl protease Pfam Description: Eukaryotic aspartyl protease
  misc_feature (120)..(508): Pfam Name: Eukaryotic aspartyl protease Pfam Description: Eukaryotic aspartyl protease
  misc_feature (120)..(508): Pfam Name: Eukaryotic aspartyl protease Pfam Description: Eukaryotic aspartyl protease
  misc_feature (86)..(510): Homolog of NCBI NO: 15290061 NR Description: nucleoid DNA-binding protein cnd41-like protein
  misc_feature (52)..(510): Homolog of NCBI NO: 15228618 NR Description: expressed protein [Arabidopsis thaliana]
  misc_feature (116)..(510): Homolog of NCBI NO: 15231010 NR Description: expressed protein [Arabidopsis thaliana]
  misc_feature (64)..(510): Homolog of NCBI NO: 21594980 NR Description: chloroplast nucleoid DNA binding protein,
  misc_feature (64)..(510): Homolog of NCBI NO: 15223368 NR Description: chloroplast nucleoid DNA binding protein -related
  misc_feature (86)..(510): Homolog of NCBI NO: 15290061 NR Description: nucleoid DNA-binding protein cnd41-like protein
  misc_feature (116)..(510): Homolog of NCBI NO: 15231010 NR Description: expressed protein [Arabidopsis thaliana]
  misc_feature (64)..(510): Homolog of NCBI NO: 15223368 NR Description: chloroplast nucleoid DNA binding protein -related
  misc_feature (64)..(510): Homolog of NCBI NO: 21594980 NR Description: chloroplast nucleoid DNA binding protein,
  misc_feature (116)..(510): Homolog of NCBI NO: 15231010 NR Description: expressed protein [Arabidopsis thaliana]
  misc_feature (52)..(510): Homolog of NCBI NO: 15228618 NR Description: expressed protein [Arabidopsis thaliana]
  misc_feature (86)..(510): Homolog of NCBI NO: 15290061 NR Description: nucleoid DNA-binding protein cnd41-like protein
  misc_feature (11)..(510): Homolog of NCBI NO: 15229656 NR Description: chloroplast nucleoid DNA-binding protein -related
  misc_feature (11)..(510): Homolog of NCBI NO: 19424106 NR Description: putative chloroplast nucleoid DNA-binding protein
  misc_feature (28)..(510): Homolog of NCBI NO: 15222611 NR Description: expressed protein [Arabidopsis thaliana]
  misc_feature (14)..(510): Homolog of NCBI NO: 34895664 NR Description: nucleoid DNA-binding protein cnd41-like protein
  misc_feature (53)..(510): Homolog of NCBI NO: 28392860 NR Description: unknown protein [Arabidopsis thaliana]
  misc_feature (11)..(510): Homolog of NCBI NO: 15229656 NR Description: chloroplast nucleoid DNA-binding protein -related
  misc_feature (11)..(510): Homolog of NCBI NO: 19424106 NR Description: putative chloroplast nucleoid DNA-binding protein
  misc_feature (28)..(510): Homolog of NCBI NO: 15222611 NR Description: expressed protein [Arabidopsis thaliana]
  misc_feature (14)..(510): Homolog of NCBI NO: 34895664 NR Description: nucleoid DNA-binding protein cnd41-like protein
  misc_feature (53)..(510): Homolog of NCBI NO: 28392860 NR Description: unknown protein [Arabidopsis thaliana]
  misc_feature (64)..(510): Homolog of NCBI NO: 15223368 NR Description: chloroplast nucleoid DNA binding protein -related
  misc_feature (64)..(510): Homolog of NCBI NO: 21594980 NR Description: chloroplast nucleoid DNA binding protein,
  misc_feature (116)..(510): Homolog of NCBI NO: 15231010 NR Description: expressed protein [Arabidopsis thaliana]
  misc_feature (52)..(510): Homolog of NCBI NO: 15228618 NR Description: expressed protein [Arabidopsis thaliana]
  misc_feature (86)..(510): Homolog of NCBI NO: 15290061 NR Description: nucleoid DNA-binding protein cnd41-like protein
  misc_feature (11)..(510): Homolog of NCBI NO: 15229656 NR Description: chloroplast nucleoid DNA-binding protein -related
  misc_feature (11)..(510): Homolog of NCBI NO: 19424106 NR Description: putative chloroplast nucleoid DNA-binding protein
  misc_feature (28)..(510): Homolog of NCBI NO: 15222611 NR Description: expressed protein [Arabidopsis thaliana]
  misc_feature (14)..(510): Homolog of NCBI NO: 34895664 NR Description: nucleoid DNA-binding protein cnd41-like protein
  misc_feature (53)..(510): Homolog of NCBI NO: 28392860 NR Description: unknown protein [Arabidopsis thaliana]
  misc_feature (64)..(510): Homolog of NCBI NO: 15223368 NR Description: chloroplast nucleoid DNA binding protein -related
  misc_feature (64)..(510): Homolog of NCBI NO: 21594980 NR Description: chloroplast nucleoid DNA binding protein,
  misc_feature (52)..(510): Homolog of NCBI NO: 15228618 NR Description: expressed protein [Arabidopsis thaliana]
  misc_feature (53)..(510): Homolog of NCBI NO: 28392860 NR Description: unknown protein [Arabidopsis thaliana]
  misc_feature (14)..(510): Homolog of NCBI NO: 34895664 NR Description: nucleoid DNA-binding protein cnd41-like protein
  misc_feature (28)..(510): Homolog of NCBI NO: 15222611 NR Description: expressed protein [Arabidopsis thaliana]
  misc_feature (11)..(510): Homolog of NCBI NO: 19424106 NR Description: putative chloroplast nucleoid DNA-binding protein
  misc_feature (11)..(510): Homolog of NCBI NO: 15229656 NR Description: chloroplast nucleoid DNA-binding protein -related

SEQ ID NO: 35960 - protein, 500 aa, Arabidopsis thaliana [sequence omitted]

SEQ ID NO: 35961 - protein, 326 aa, Arabidopsis thaliana; identical to SEQ ID NO: 30309
  peptide (1)..(326): Ceres Seq. ID no. 13509017
  misc_feature (1)..(324): Pfam Name: Eukaryotic aspartyl protease Pfam Description: Eukaryotic aspartyl protease
  misc_feature (1)..(324): Pfam Name: Eukaryotic aspartyl protease Pfam Description: Eukaryotic aspartyl protease
  misc_feature (1)..(324): Pfam Name: Eukaryotic aspartyl protease Pfam Description: Eukaryotic aspartyl protease
  misc_feature (1)..(324): Pfam Name: Eukaryotic aspartyl protease Pfam Description: Eukaryotic aspartyl protease
  misc_feature (1)..(326): Homolog of NCBI NO: 15290061 NR Description: nucleoid DNA-binding protein cnd41-like protein
  misc_feature (1)..(326): Homolog of NCBI NO: 15228618 NR Description: expressed protein [Arabidopsis thaliana]
  misc_feature (1)..(326): Homolog of NCBI NO: 15231010 NR Description: expressed protein [Arabidopsis thaliana]
  misc_feature (1)..(326): Homolog of NCBI NO: 21594980 NR Description: chloroplast nucleoid DNA binding protein,
  misc_feature (1)..(326): Homolog of NCBI NO: 15223368 NR Description: chloroplast nucleoid DNA binding protein -related
  misc_feature (1)..(326): Homolog of NCBI NO: 15290061 NR Description: nucleoid DNA-binding protein cnd41-like protein
  misc_feature (1)..(326): Homolog of NCBI NO: 15231010 NR Description: expressed protein [Arabidopsis thaliana]
  misc_feature (1)..(326): Homolog of NCBI NO: 15223368 NR Description: chloroplast nucleoid DNA binding protein -related
  misc_feature (1)..(326): Homolog of NCBI NO: 21594980 NR Description: chloroplast nucleoid DNA binding protein,
  misc_feature (1)..(326): Homolog of NCBI NO: 15231010 NR Description: expressed protein [Arabidopsis thaliana]
  misc_feature (1)..(326): Homolog of NCBI NO: 15228618 NR Description: expressed protein [Arabidopsis thaliana]
  misc_feature (1)..(326): Homolog of NCBI NO: 15290061 NR Description: nucleoid DNA-binding protein cnd41-like protein
  misc_feature (1)..(326): Homolog of NCBI NO: 15229656 NR Description: chloroplast nucleoid DNA-binding protein -related
  misc_feature (1)..(326): Homolog of NCBI NO: 19424106 NR Description: putative chloroplast nucleoid DNA-binding protein
  misc_feature (1)..(326): Homolog of NCBI NO: 15222611 NR Description: expressed protein [Arabidopsis thaliana]
  misc_feature (1)..(326): Homolog of NCBI NO: 34895664 NR Description: nucleoid DNA-binding protein cnd41-like protein
  misc_feature (1)..(326): Homolog of NCBI NO: 28392860 NR Description: unknown protein [Arabidopsis thaliana]
  misc_feature (1)..(326): Homolog of NCBI NO: 15229656 NR Description: chloroplast nucleoid DNA-binding protein -related
  misc_feature (1)..(326): Homolog of NCBI NO: 19424106 NR Description: putative chloroplast nucleoid DNA-binding protein
  misc_feature (1)..(326): Homolog of NCBI NO: 15222611 NR Description: expressed protein [Arabidopsis thaliana]
  misc_feature (1)..(326): Homolog of NCBI NO: 34895664 NR Description: nucleoid DNA-binding protein cnd41-like protein
  misc_feature (1)..(326): Homolog of NCBI NO: 28392860 NR Description: unknown protein [Arabidopsis thaliana]
  misc_feature (1)..(326): Homolog of NCBI NO: 15223368 NR Description: chloroplast nucleoid DNA binding protein -related
  misc_feature (1)..(326): Homolog of NCBI NO: 21594980 NR Description: chloroplast nucleoid DNA binding protein,
  misc_feature (1)..(326): Homolog of NCBI NO: 15231010 NR Description: expressed protein [Arabidopsis thaliana]
  misc_feature (1)..(326): Homolog of NCBI NO: 15228618 NR Description: expressed protein [Arabidopsis thaliana]
  misc_feature (1)..(326): Homolog of NCBI NO: 15290061 NR Description: nucleoid DNA-binding protein cnd41-like protein
  misc_feature (1)..(326): Homolog of NCBI NO: 15229656 NR Description: chloroplast nucleoid DNA-binding protein -related
  misc_feature (1)..(326): Homolog of NCBI NO: 19424106 NR Description: putative chloroplast nucleoid DNA-binding protein
  misc_feature (1)..(326): Homolog of NCBI NO: 15222611 NR Description: expressed protein [Arabidopsis thaliana]
  misc_feature (1)..(326): Homolog of NCBI NO: 34895664 NR Description: nucleoid DNA-binding protein cnd41-like protein
  misc_feature (1)..(326): Homolog of NCBI NO: 28392860 NR Description: unknown protein [Arabidopsis thaliana]
  misc_feature (1)..(326): Homolog of NCBI NO: 15223368 NR Description: chloroplast nucleoid DNA binding protein -related
  misc_feature (1)..(326): Homolog of NCBI NO: 21594980 NR Description: chloroplast nucleoid DNA binding protein,
  misc_feature (1)..(326): Homolog of NCBI NO: 15228618 NR Description: expressed protein [Arabidopsis thaliana]
  misc_feature (1)..(326): Homolog of NCBI NO: 28392860 NR Description: unknown protein [Arabidopsis thaliana]
  misc_feature (1)..(326): Homolog of NCBI NO: 34895664 NR Description: nucleoid DNA-binding protein cnd41-like protein
  misc_feature (1)..(326): Homolog of NCBI NO: 15222611 NR Description: expressed protein [Arabidopsis thaliana]
  misc_feature (1)..(326): Homolog of NCBI NO: 19424106 NR Description: putative chloroplast nucleoid DNA-binding protein
  misc_feature (1)..(326): Homolog of NCBI NO: 15229656 NR Description: chloroplast nucleoid DNA-binding protein -related

SEQ ID NO: 35962 - DNA, 1205 bp, Arabidopsis thaliana
  misc_feature (1)..(1205): Ceres Seq. ID no. 12334500
  misc_feature: MA Experiment ID: 20000180 Result: Up-regulated in Transcription
  misc_feature: MA Experiment 20000180 PARAMETER Experiment Name: At_Germinating_Seeds_P Parameter: Age (hr) Value: 24 vs. 0
  misc_feature: MA Experiment 20000180 PARAMETER Experiment Name: At_Germinating_Seeds_P Parameter: Tissue Value: Germinating Seeds
  misc_feature: MA Experiment ID: 20000182 Result: Up-regulated in Transcription
  misc_feature: MA Experiment 20000182 PARAMETER Experiment Name: At_2mM_SA_P Parameter: Age (day) Value: 14
  misc_feature: MA Experiment 20000182 PARAMETER Experiment Name: At_2mM_SA_P Parameter: Organism Value: A. thaliana
  misc_feature: MA Experiment 20000182 PARAMETER Experiment Name: At_2mM_SA_P Parameter: Plant Line Value: WS
  misc_feature: MA Experiment 20000182 PARAMETER Experiment Name: At_2mM_SA_P Parameter: Timepoint (hr) Value: 6
  misc_feature: MA Experiment 20000182 PARAMETER Experiment Name: At_2mM_SA_P Parameter: Tissue Value: Aerial
  misc_feature: MA Experiment 20000182 PARAMETER Experiment Name: At_2mM_SA_P Parameter: Treatment Value: 2mM SA vs. No Treatment
  misc_feature: MA Experiment ID: 20000184 Result: Up-regulated in Transcription
  misc_feature: MA Experiment 20000184 PARAMETER Experiment Name: At_Shoots__P Parameter: Age (day) Value: 7
  misc_feature: MA Experiment 20000184 PARAMETER Experiment Name: At_Shoots__P Parameter: Tissue Value: Shoots vs. Whole Plant
  misc_feature: MA Experiment ID: 20000227 Result: Down-regulated in Transcription
  misc_feature: MA Experiment 20000227 PARAMETER Experiment Name: At_Root-Tips-vs-Tops_P Parameter: Tissue Value: Root Tips vs. Root Tops
  misc_feature: MA Experiment ID: 20000264 Result: Down-regulated in Transcription
  misc_feature: MA Experiment 20000264 PARAMETER Experiment Name: At_Open_Flower_P Parameter: Age (day) Value: 21
  misc_feature: MA Experiment 20000264 PARAMETER Experiment Name: At_Open_Flower_P Parameter: Plant Line Value: WS
  misc_feature: MA Experiment 20000264 PARAMETER Experiment Name: At_Open_Flower_P Parameter: Tissue Value: Open Flower vs. Whole Plant
  misc_feature: MA Experiment ID: 20000265 Result: Down-regulated in Transcription
  misc_feature: MA Experiment 20000265 PARAMETER Experiment Name: At_Open_Flower_P Parameter: Age (day) Value: 21
  misc_feature: MA Experiment 20000265 PARAMETER Experiment Name: At_Open_Flower_P Parameter: Plant Line Value: WS
  misc_feature: MA Experiment 20000265 PARAMETER Experiment Name: At_Open_Flower_P Parameter: Tissue Value: Closed Flower vs. Whole Plant
  misc_feature: MA Experiment ID: 20000286 Result: Down-regulated in Transcription
  misc_feature: MA Experiment 20000286 PARAMETER Experiment Name: At_Open_Flower_P Parameter: Age (day) Value: 21
  misc_feature: MA Experiment 20000286 PARAMETER Experiment Name: At_Open_Flower_P Parameter: Plant Line Value: WS
  misc_feature: MA Experiment 20000286 PARAMETER Experiment Name: At_Open_Flower_P Parameter: Tissue Value: Half Open vs. Whole Plant
  misc_feature: MA Experiment ID: 20000445 Result: Up-regulated in Transcription
  misc_feature: MA Experiment 20000445 PARAMETER Experiment Name: At_100uM_NAA__P Parameter: Age (day) Value: 14
  misc_feature: MA Experiment 20000445 PARAMETER Experiment Name: At_100uM_NAA__P Parameter: Organism Value: A. thaliana
  misc_feature: MA Experiment 20000445 PARAMETER Experiment Name: At_100uM_NAA__P Parameter: Plant Line Value: WS
  misc_feature: MA Experiment 20000445 PARAMETER Experiment Name: At_100uM_NAA__P Parameter: Timepoint (hr) Value: 6
  misc_feature: MA Experiment 20000445 PARAMETER Experiment Name: At_100uM_NAA__P Parameter: Tissue Value: Aerial
  misc_feature: MA Experiment 20000445 PARAMETER Experiment Name: At_100uM_NAA__P Parameter: Treatment Value: 100uM NAA vs. No Treatment
  misc_feature: MA Experiment ID: 20000794 Result: Down-regulated in Transcription
  misc_feature: MA Experiment 20000794 PARAMETER Experiment Name: At_Petals_P Parameter: Age (day) Value: 23-25 days
  misc_feature: MA Experiment 20000794 PARAMETER Experiment Name: At_Petals_P Parameter: Plant Line Value: WS
  misc_feature: MA Experiment 20000794 PARAMETER Experiment Name: At_Petals_P Parameter: Tissue Value: Petals vs. Whole plant
  misc_feature: MA Experiment ID: 20001555 Result: Down-regulated in Transcription
  misc_feature: MA Experiment 20001555 PARAMETER Experiment Name: At_Drought_Soil_Dry_P Parameter: Age (day) Value: 24
  misc_feature: MA Experiment 20001555 PARAMETER Experiment Name: At_Drought_Soil_Dry_P Parameter: Organism Value: A. thaliana
  misc_feature: MA Experiment 20001555 PARAMETER Experiment Name: At_Drought_Soil_Dry_P Parameter: Plant Line Value: WS
  misc_feature: MA Experiment 20001555 PARAMETER Experiment Name: At_Drought_Soil_Dry_P Parameter: Post Timepoint (hr) Value: None
  misc_feature: MA Experiment 20001555 PARAMETER Experiment Name: At_Drought_Soil_Dry_P Parameter: Post-Treatment Value: None
  misc_feature: MA Experiment 20001555 PARAMETER Experiment Name: At_Drought_Soil_Dry_P Parameter: Timepoint (day) Value: 10
  misc_feature: MA Experiment 20001555 PARAMETER Experiment Name: At_Drought_Soil_Dry_P Parameter: Treatment Value: Drought vs. No Drought
  misc_feature: MA Experiment ID: 20001559 Result: Down-regulated in Transcription
  misc_feature: MA Experiment 20001559 PARAMETER Experiment Name: At_Drought_Soil_Dry_P Parameter: Age (day) Value: 28
  misc_feature: MA Experiment 20001559 PARAMETER Experiment Name: At_Drought_Soil_Dry_P Parameter: Organism Value: A. thaliana
  misc_feature: MA Experiment 20001559 PARAMETER Experiment Name: At_Drought_Soil_Dry_P Parameter: Plant Line Value: WS
  misc_feature: MA Experiment 20001559 PARAMETER Experiment Name: At_Drought_Soil_Dry_P Parameter: Post Timepoint (hr) Value: 29
  misc_feature: MA Experiment 20001559 PARAMETER Experiment Name: At_Drought_Soil_Dry_P Parameter: Post-Treatment Value: Re-Water vs. No Drought
  misc_feature: MA Experiment 20001559 PARAMETER Experiment Name: At_Drought_Soil_Dry_P Parameter: Timepoint (day) Value: 14
  misc_feature: MA Experiment 20001559 PARAMETER Experiment Name: At_Drought_Soil_Dry_P Parameter: Treatment Value: Drought vs. No Drought
aacgccagttgccatccaggagaggggagaagaagaatttgtattctcaagttgtcgatatgagagagatgaagtcagaaacacgtttgtgagagaacagcttttagatgtgattgtggatcagattctcaaagacttttcgcgaagagtctctgatccttaaatcgcttctctctcgcttgacctcatttcgtcgtcgaaatcagatccttgtgaaaatgccgaaacaggatatggagaagatggagcttcgtaagaacttccgtaatgtttggcataccgatcttacccacagtatccagaacgatactccttattgttgcttcgcgttgtggtgtgccccttgtgcatcatacttgcttcgcaagcgtgcgctttacgatgatatgtcaaggtacgtctgctgtgccggttacatgccttgtagtggtaggtgtggagaagccaaatgtcctcaactttgtcttgccactgaggtcttctgctgctttgcaaactctgtggcctcaactcgctttcttctgcaagatgagttccaaattcaaacgacaaaatgtgacaactgcatcattggtttcatggtttgcctcagccaagtggcttgcatattctccatagttgcatgtattgtcggtatggatgagctttcagaagcttctcagatactcacatgttgctctgacatggtgtactgcacggtttgcgcatgtatgcagacacaacacaagatggaaatggacaagagggacggtaagttcgggccacagccaatggcagtgcctccggctcagcaaatgtcacggtttgatcaagccaccccacccgcagtcggttatcctccacaacaaggttatccaccttctggttatcctcaacaccctccacaaggttatccaccttctggctatcctcaaaaccctcctccctcagcttattctcaataccctcctggggcttatcctcctcctcccgcttacccaaagtgatcactctttgcctgttttctctcccgattggaaaattttatttcatctttttttaatgctgtcttgttacgggtcaagaattgaacgttcgctgattgttttgaggtcgttgtttgtatgagattttgacctcgcatgttgttgttgttttctgaaacgtccctcttggactaagagatttcatgactttttcctttccttttaaattctctctttttc

SEQ ID NO: 35963 - protein, 255 aa, Arabidopsis thaliana
  peptide (1)..(255): Ceres Seq. ID no. 12334501
  misc_feature (179)..(253): Pfam Name: Extensin-like region Pfam Description: Extensin-like region
  misc_feature (169)..(254): Homolog of NCBI NO: 6469591 NR Description: unknown [Eufolliculina uhligi]
  misc_feature (193)..(254): Homolog of NCBI NO: 15227350 NR Description: unknown protein; protein id: At2g41420.1
  misc_feature (62)..(254): Homolog of NCBI NO: 25446695 NR Description: Unknown protein [Oryza sativa (japonica
  misc_feature (171)..(255): Homolog of NCBI NO: 7485554 NR Description: hypothetical protein F16G20.180 - Arabidopsis
  misc_feature (1)..(160): Homolog of NCBI NO: 7485553 NR Description: hypothetical protein F16G20.170 - Arabidopsis
  misc_feature (4)..(207): Homolog of NCBI NO: 15238071 NR Description: putative protein; protein id: At5g41390.1
  misc_feature (6)..(209): Homolog of NCBI NO: 37536436 NR Description: hypothetical protein [Oryza sativa (japonica
  misc_feature (4)..(233): Homolog of NCBI NO: 15222552 NR Description: unknown protein
  misc_feature (9)..(255): Homolog of NCBI NO: 21554542 NR Description: unknown [Arabidopsis thaliana]
  misc_feature (1)..(255): Homolog of NCBI NO: 22328885 NR Description: expressed protein
MPKQDMEKMELRKNFRNVWHTDLTHSIQNDTPYCCFALWCAPCASYLLRKRALYDDMSRYVCCAGYMPCSGRCGEAKCPQLCLATEVFCCFANSVASTRFLLQDEFQIQTTKCDNCIIGFMVCLSQVACIFSIVACIVGMDELSEASQILTCCSDMVYCTVCACMQTQHKMEMDKRDGKFGPQPMAVPPAQQMSRFDQATPPAVGYPPQQGYPPSGYPQHPPQGYPPSGYPQNPPPSAYSQYPPGAYPPPPAYPK

SEQ ID NO: 35964 - protein, 250 aa, Arabidopsis thaliana
  peptide (1)..(250): Ceres Seq. ID no. 12334502
  misc_feature (174)..(248): Pfam Name: Extensin-like region Pfam Description: Extensin-like region
  misc_feature (164)..(249): Homolog of NCBI NO: 6469591 NR Description: unknown [Eufolliculina uhligi]
  misc_feature (188)..(249): Homolog of NCBI NO: 15227350 NR Description: unknown protein; protein id: At2g41420.1
  misc_feature (57)..(249): Homolog of NCBI NO: 25446695 NR Description: Unknown protein [Oryza sativa (japonica
  misc_feature (166)..(250): Homolog of NCBI NO: 7485554 NR Description: hypothetical protein F16G20.180 - Arabidopsis
  misc_feature (1)..(155): Homolog of NCBI NO: 7485553 NR Description: hypothetical protein F16G20.170 - Arabidopsis
  misc_feature (1)..(202): Homolog of NCBI NO: 15238071 NR Description: putative protein; protein id: At5g41390.1
  misc_feature (1)..(204): Homolog of NCBI NO: 37536436 NR Description: hypothetical protein [Oryza sativa (japonica
  misc_feature (1)..(228): Homolog of NCBI NO: 15222552 NR Description: unknown protein
  misc_feature (4)..(250): Homolog of NCBI NO: 21554542 NR Description: unknown [Arabidopsis thaliana]
  misc_feature (1)..(250): Homolog of NCBI NO: 22328885 NR Description: expressed protein
MEKMELRKNFRNVWHTDLTHSIQNDTPYCCFALWCAPCASYLLRKRALYDDMSRYVCCAGYMPCSGRCGEAKCPQLCLATEVFCCFANSVASTRFLLQDEFQIQTTKCDNCIIGFMVCLSQVACIFSIVACIVGMDELSEASQILTCCSDMVYCTVCACMQTQHKMEMDKRDGKFGPQPMAVPPAQQMSRFDQATPPAVGYPPQQGYPPSGYPQHPPQGYPPSGYPQNPPPSAYSQYPPGAYPPPPAYPK

SEQ ID NO: 35965 - protein, 247 aa, Arabidopsis thaliana
  peptide (1)..(247): Ceres Seq. ID no. 12334503
  misc_feature (171)..(245): Pfam Name: Extensin-like region Pfam Description: Extensin-like region
  misc_feature (161)..(246): Homolog of NCBI NO: 6469591 NR Description: unknown [Eufolliculina uhligi]
  misc_feature (185)..(246): Homolog of NCBI NO: 15227350 NR Description: unknown protein; protein id: At2g41420.1
  misc_feature (54)..(246): Homolog of NCBI NO: 25446695 NR Description: Unknown protein [Oryza sativa (japonica
  misc_feature (163)..(247): Homolog of NCBI NO: 7485554 NR Description: hypothetical protein F16G20.180 - Arabidopsis
  misc_feature (1)..(152): Homolog of NCBI NO: 7485553 NR Description: hypothetical protein F16G20.170 - Arabidopsis
  misc_feature (1)..(199): Homolog of NCBI NO: 15238071 NR Description: putative protein; protein id: At5g41390.1
  misc_feature (1)..(201): Homolog of NCBI NO: 37536436 NR Description: hypothetical protein [Oryza sativa (japonica
  misc_feature (1)..(225): Homolog of NCBI NO: 15222552 NR Description: unknown protein
  misc_feature (1)..(247): Homolog of NCBI NO: 21554542 NR Description: unknown [Arabidopsis thaliana]
  misc_feature (1)..(247): Homolog of NCBI NO: 22328885 NR Description: expressed protein
MELRKNFRNVWHTDLTHSIQNDTPYCCFALWCAPCASYLLRKRALYDDMSRYVCCAGYMPCSGRCGEAKCPQLCLATEVFCCFANSVASTRFLLQDEFQIQTTKCDNCIIGFMVCLSQVACIFSIVACIVGMDELSEASQILTCCSDMVYCTVCACMQTQHKMEMDKRDGKFGPQPMAVPPAQQMSRFDQATPPAVGYPPQQGYPPSGYPQHPPQGYPPSGYPQNPPPSAYSQYPPGAYPPPPAYPK

SEQ ID NO: 35966 - DNA, 1722 bp, Arabidopsis thaliana
  misc_feature (1)..(1722): Ceres Seq. ID no. 12327448
  misc_feature: MA Experiment ID: 108434 Result: Up-regulated in Transcription
  misc_feature: MA Experiment 108434 PARAMETER Experiment Name: At_Root_Tips_cDNA_P Parameter: Tissue Value: Root Tips
  misc_feature: MA Experiment ID: 108461 Result: Down-regulated in Transcription
  misc_feature: MA Experiment 108461 PARAMETER Experiment Name: At_Germinating_Seeds_cDNA_P Parameter: Age (day) Value: 1 vs. 0
  misc_feature: MA Experiment 108461 PARAMETER Experiment Name: At_Germinating_Seeds_cDNA_P Parameter: Tissue Value: Germinating Seeds
  misc_feature: MA Experiment ID: 108462 Result: Down-regulated in Transcription
  misc_feature: MA Experiment 108462 PARAMETER Experiment Name: At_Germinating_Seeds_cDNA_P Parameter: Age (day) Value: 2 vs. 0
  misc_feature: MA Experiment 108462 PARAMETER Experiment Name: At_Germinating_Seeds_cDNA_P Parameter: Tissue Value: Germinating Seeds
  misc_feature: MA Experiment ID: 108463 Result: Down-regulated in Transcription
  misc_feature: MA Experiment 108463 PARAMETER Experiment Name: At_Germinating_Seeds_cDNA_P Parameter: Age (day) Value: 3 vs. 0
  misc_feature: MA Experiment 108463 PARAMETER Experiment Name: At_Germinating_Seeds_cDNA_P Parameter: Tissue Value: Germinating Seeds
  misc_feature: MA Experiment ID: 108464 Result: Down-regulated in Transcription
  misc_feature: MA Experiment 108464 PARAMETER Experiment Name: At_Germinating_Seeds_cDNA_P Parameter: Age (day) Value: 4 vs. 0
  misc_feature: MA Experiment 108464 PARAMETER Experiment Name: At_Germinating_Seeds_cDNA_P Parameter: Tissue Value: Germinating Seeds
agagctggatgttttttcctctataaacctcttttgctttctctcttcgtctctgaccactttggctccggcgttagttttttccctctctgctactgctgcggctccggctcctgctacggtatttgacaagtgtgttgacattctctcataacaattcaaatgggtgactcggaaaacgttcagcaaccttcaaaaaagagaggtgccttgaagcagctgtctcgtgataatccaggtcttgatgatgatgatgattcagctgaacttgagagtggaactttcaagaaggccagtgatgaggttttggctagtagaagaattgtcagagttaagcgcaaagagccatctgctgctccagttgcagcatccaatccatttgctggaattcagttggtccctacgactgcacctgcttcaacccctgtgggaacaaatgcacctctggctgagtcaaaattggctccagctgaagcagtagttgaggacaatcaaaaagcaagtgatattgaggagggcgatgaagttgacagtaagaaggttgatgtcaaagatgctgttggggaagagactgaaaagactaaagataaggatgataatcattgtggaaagagtgctgatgtccaagttgcggctacagaagtagctcagatggtctcatgtgacacaaacgtttgcaacaacgctgttgaaggaacagaccaaactgattttcctcttgagaaggattcaggaggtgatcaggctgagaaaaaagaaaaagaaggcaacggaattgaggaagcagataagaatggcgataatggtgctttcagctcattccaacagcattcaagtaacaaaaacgcattcaccggacttgccagtacagaggcttcagggtcttcgttctcatttggtttggtttctcaggatggttcaactggtactgggtctctctttggctttggccttccaagcagcaatagctcttctatattcggtgcaactggatcgtccattatcaagaagagtgaaggtagtgggtttccgccaaagcaagaggtttccacagaaacaggtgaagagaatgagaaagttgccttctcagctgactcgatcatgttcgaatatcttgatggaggatggaaagagcgtggaaaaggagaactcaaggtaaacgtctccagtaatgatggtaaagcaagattagttatgagagctaaaggaaactacagattgatcttaaacgcgagtctttacccagagatgaaacttgcaaacatggataaaaagggaatcacattcgcttgtgtgaatagtgtaagcgaaggcaaagaaggtctctctacatttgcactgaagttcaaagacccgacaattgttgaagagtttcgtgtagccattgacaaacacaaagatagtaaaccaatggagaaagcagcagaaaaatcagctcttcctctgaagacacctgagaactctccaacagctacagatacttgaagaaaaggtaaaaagaaaaaaagaaaaaacatgtagaaacacttctctcgtctctctcgtctctcttgtcttttgtcttgtcttgttacttccaagtagttgaattttgaggcagaggaaaactaaaatatttggagaagtttgttgttttttttacacagttgttgagactttttggttacatgtttctgtttgtagaaggaaaccatatatgacttaaatctgcatccttgattt

SEQ ID NO: 35967 - protein, 440 aa, Arabidopsis thaliana
  peptide (1)..(440): Ceres Seq. ID no. 12327449
  misc_feature (294)..(414): Pfam Name: RanBP1 domain Pfam Description: RanBP1 domain
  misc_feature (13)..(87): Homolog of NCBI NO: 19075437 NR Description: putative nucleoporin; nuclear pore protein; RanBp
  misc_feature (224)..(415): Homolog of NCBI NO: 19075437 NR Description: putative nucleoporin; nuclear pore protein; RanBp
  misc_feature (283)..(434): Homolog of NCBI NO: 32403832 NR Description: hypothetical protein [Neurospora crassa]
  misc_feature (368)..(439): Homolog of NCBI NO: 26451646 NR Description: unknown protein [Arabidopsis thaliana]
  misc_feature (1)..(279): Homolog of NCBI NO: 21536684 NR Description: unknown [Arabidopsis thaliana]
  misc_feature (1)..(279): Homolog of NCBI NO: 18400970 NR Description: expressed protein
  misc_feature (38)..(439): Homolog of NCBI NO: 21536684 NR Description: unknown [Arabidopsis thaliana]
  misc_feature (38)..(439): Homolog of NCBI NO: 18400970 NR Description: expressed protein
  misc_feature (164)..(440): Homolog of NCBI NO: 22655290 NR Description: unknown protein [Arabidopsis thaliana]
  misc_feature (1)..(440): Homolog of NCBI NO: 18403992 NR Description: expressed protein
MGDSENVQQPSKKRGALKQLSRDNPGLDDDDDSAELESGTFKKASDEVLASRRIVRVKRKEPSAAPVAASNPFAGIQLVPTTAPASTPVGTNAPLAESKLAPAEAVVEDNQKASDIEEGDEVDSKKVDVKDAVGEETEKTKDKDDNHCGKSADVQVAATEVAQMVSCDTNVCNNAVEGTDQTDFPLEKDSGGDQAEKKEKEGNGIEEADKNGDNGAFSSFQQHSSNKNAFTGLASTEASGSSFSFGLVSQDGSTGTGSLFGFGLPSSNSSSIFGATGSSIIKKSEGSGFPPKQEVSTETGEENEKVAFSADSIMFEYLDGGWKERGKGELKVNVSSNDGKARLVMRAKGNYRLILNASLYPEMKLANMDKKGITFACVNSVSEGKEGLSTFALKFKDPTIVEEFRVAIDKHKDSKPMEKAAEKSALPLKTPENSPTATDT

SEQ ID NO: 35968 - protein, 277 aa, Arabidopsis thaliana
  peptide (1)..(277): Ceres Seq. ID no. 12327450
  misc_feature (131)..(251): Pfam Name: RanBP1 domain Pfam Description: RanBP1 domain
  misc_feature (21)..(277): Homolog of NCBI NO: 31205915 NR Description: ENSANGP00000010912 [Anopheles gambiae]
  misc_feature (61)..(252): Homolog of NCBI NO: 19075437 NR Description: putative nucleoporin; nuclear pore protein; RanBp
  misc_feature (120)..(271): Homolog of NCBI NO: 32403832 NR Description: hypothetical protein [Neurospora crassa]
  misc_feature (205)..(276): Homolog of NCBI NO: 26451646 NR Description: unknown protein [Arabidopsis thaliana]
  misc_feature (1)..(116): Homolog of NCBI NO: 21536684 NR Description: unknown [Arabidopsis thaliana]
  misc_feature (1)..(116): Homolog of NCBI NO: 18400970 NR Description: expressed protein
  misc_feature (1)..(276): Homolog of NCBI NO: 21536684 NR Description: unknown [Arabidopsis thaliana]
  misc_feature (1)..(276): Homolog of NCBI NO: 18400970 NR Description: expressed protein
  misc_feature (1)..(277): Homolog of NCBI NO: 22655290 NR Description: unknown protein [Arabidopsis thaliana]
  misc_feature (1)..(277): Homolog of NCBI NO: 18403992 NR Description: expressed protein
MVSCDTNVCNNAVEGTDQTDFPLEKDSGGDQAEKKEKEGNGIEEADKNGDNGAFSSFQQHSSNKNAFTGLASTEASGSSFSFGLVSQDGSTGTGSLFGFGLPSSNSSSIFGATGSSIIKKSEGSGFPPKQEVSTETGEENEKVAFSADSIMFEYLDGGWKERGKGELKVNVSSNDGKARLVMRAKGNYRLILNASLYPEMKLANMDKKGITFACVNSVSEGKEGLSTFALKFKDPTIVEEFRVAIDKHKDSKPMEKAAEKSALPLKTPENSPTATDT

SEQ ID NO: 35969 - DNA, 544 bp, Arabidopsis thaliana
  misc_feature (1)..(544): Ceres Seq. ID no. 13497719
  misc_feature: MA Experiment ID: 108434 Result: Down-regulated in Transcription
  misc_feature: MA Experiment 108434 PARAMETER Experiment Name: At_Root_Tips_cDNA_P Parameter: Tissue Value: Root Tips
  misc_feature: MA Experiment ID: 108573 Result: Down-regulated in Transcription
  misc_feature: MA Experiment 108573 PARAMETER Experiment Name: At_Drought_cDNA_P Parameter: Timepoint (hr) Value: 6
  misc_feature: MA Experiment 108573 PARAMETER Experiment Name: At_Drought_cDNA_P Parameter: Tissue Value: Aerial
  misc_feature: MA Experiment 108573 PARAMETER Experiment Name: At_Drought_cDNA_P Parameter: Treatment Value: Drought vs. No Drought
  misc_feature: MA Experiment ID: 20000071 Result: Down-regulated in Transcription
  misc_feature: MA Experiment 20000071 PARAMETER Experiment Name: At_100uM_ABA_Mutants_cDNA_P Parameter: Plant Line Value: CS8104
  misc_feature: MA Experiment 20000071 PARAMETER Experiment Name: At_100uM_ABA_Mutants_cDNA_P Parameter: Timepoint (hr) Value: 6
  misc_feature: MA Experiment 20000071 PARAMETER Experiment Name: At_100uM_ABA_Mutants_cDNA_P Parameter: Tissue Value: Aerial
  misc_feature: MA Experiment 20000071 PARAMETER Experiment Name: At_100uM_ABA_Mutants_cDNA_P Parameter: Treatment Value: 100uM ABA vs. No Treatment
  misc_feature: MA Experiment ID: 20000072 Result: Down-regulated in Transcription
  misc_feature: MA Experiment 20000072 PARAMETER Experiment Name: At_100uM_ABA_Mutants_cDNA_P Parameter: Plant Line Value: CS8105
  misc_feature: MA Experiment 20000072 PARAMETER Experiment Name: At_100uM_ABA_Mutants_cDNA_P Parameter: Timepoint (hr) Value: 6
  misc_feature: MA Experiment 20000072 PARAMETER Experiment Name: At_100uM_ABA_Mutants_cDNA_P Parameter: Tissue Value: Aerial
  misc_feature: MA Experiment 20000072 PARAMETER Experiment Name: At_100uM_ABA_Mutants_cDNA_P Parameter: Treatment Value: 100uM ABA vs. No Treatment
  misc_feature: MA Experiment ID: 20000314 Result: Up-regulated in Transcription
  misc_feature: MA Experiment 20000314 PARAMETER Experiment Name: At_14day_Shoots-Roots_Sub_P Parameter: Age (day) Value: 14
  misc_feature: MA Experiment 20000314 PARAMETER Experiment Name: At_14day_Shoots-Roots_Sub_P Parameter: Organism Value: A. thaliana
  misc_feature: MA Experiment 20000314 PARAMETER Experiment Name: At_14day_Shoots-Roots_Sub_P Parameter: Plant Line Value: WS
  misc_feature: MA Experiment 20000314 PARAMETER Experiment Name: At_14day_Shoots-Roots_Sub_P Parameter: Tissue Value: Roots vs. Whole Plant
  misc_feature: MA Experiment ID: 20000315 Result: Down-regulated in Transcription
  misc_feature: MA Experiment 20000315 PARAMETER Experiment Name: At_14day_Shoots-Roots_Sub_P Parameter: Age (day) Value: 14
  misc_feature: MA Experiment 20000315 PARAMETER Experiment Name: At_14day_Shoots-Roots_Sub_P Parameter: Organism Value: A. thaliana
  misc_feature: MA Experiment 20000315 PARAMETER Experiment Name: At_14day_Shoots-Roots_Sub_P Parameter: Plant Line Value: WS
  misc_feature: MA Experiment 20000315 PARAMETER Experiment Name: At_14day_Shoots-Roots_Sub_P Parameter: Tissue Value: Shoots vs. Whole Plant
actatattataatttttgctttataaaaaaaaatatcaaactctatattttctcgatctcttctcttcctcttatttctccaagatcccagacgaaatggctcagaaagtggtgctgaaggttttaaccatgactgatgataagacgaagcagaaagccatagaagctgcagctgatatcttcggagttgattccatagcagcggatatgaaggatcaaaaattgacggtgatcggtttgatggatgcggctgcggtggtgaagaagttgaagaaggttggtaaagtcgatttgatatcggttggaccggcaaaagaagagaagaaagaagagaagaaggaagagaagaaagaggaaaagaaagaggagaagaaggaagagcagaaagaagaagaacctaagaaataagtgactcgaattgctattaaaaccctaaatttttgtcatattgatttcacaattagaacgctgaatcattgaataatttaagatgtaaaattaattgttcaatacagattgtaataaaagcgaagtatttgaaact

SEQ ID NO: 35970 - protein, 103 aa, Arabidopsis thaliana
  peptide (1)..(103): Ceres Seq. ID no. 13497720
  misc_feature (14)..(99): Pfam Name: 60s Acidic ribosomal protein Pfam Description: 60s Acidic ribosomal protein
  misc_feature (3)..(103): Homolog of NCBI NO: 15223416 NR Description: heavy-metal-associated domain-containing protein
  misc_feature (3)..(103): Homolog of NCBI NO: 13543783 NR Description: Unknown (protein for MGC:7642) [Mus musculus]
  misc_feature (38)..(103): Homolog of NCBI NO: 10176843 NR Description: gene_id:MRO11.20~unknown protein [Arabidopsis
  misc_feature (1)..(103): Homolog of NCBI NO: 37535864 NR Description: hypothetical protein [Oryza sativa (japonica
  misc_feature (1)..(103): Homolog of NCBI NO: 21554550 NR Description: unknown [Arabidopsis thaliana]
  misc_feature (1)..(103): Homolog of NCBI NO: 18420713 NR Description: heavy-metal-associated domain-containing protein
  misc_feature (1)..(103): Homolog of NCBI NO: 26452654 NR Description: unknown protein [Arabidopsis thaliana]
MAQKVVLKVLTMTDDKTKQKAIEAAADIFGVDSIAADMKDQKLTVIGLMDAAAVVKKLKKVGKVDLISVGPAKEEKKEEKKEEKKEEKKEEKKEEQKEEEPKK

SEQ ID NO: 35971 - protein, 92 aa, Arabidopsis thaliana
  peptide (1)..(92): Ceres Seq. ID no. 13497721
  misc_feature (3)..(88): Pfam Name: 60s Acidic ribosomal protein Pfam Description: 60s Acidic ribosomal protein
  misc_feature (1)..(92): Homolog of NCBI NO: 15223416 NR Description: heavy-metal-associated domain-containing protein
  misc_feature (1)..(92): Homolog of NCBI NO: 13543783 NR Description: Unknown (protein for MGC:7642) [Mus musculus]
  misc_feature (27)..(92): Homolog of NCBI NO: 10176843 NR Description: gene_id:MRO11.20~unknown protein [Arabidopsis
  misc_feature (1)..(92): Homolog of NCBI NO: 37535864 NR Description: hypothetical protein [Oryza sativa (japonica
  misc_feature (1)..(92): Homolog of NCBI NO: 21554550 NR Description: unknown [Arabidopsis thaliana]
  misc_feature (1)..(92): Homolog of NCBI NO: 18420713 NR Description: heavy-metal-associated domain-containing protein
  misc_feature (1)..(92): Homolog of NCBI NO: 26452654 NR Description: unknown protein [Arabidopsis thaliana]
MTDDKTKQKAIEAAADIFGVDSIAADMKDQKLTVIGLMDAAAVVKKLKKVGKVDLISVGPAKEEKKEEKKEEKKEEKKEEKKEEQKEEEPKK

SEQ ID NO: 35972 - protein, 66 aa, Arabidopsis thaliana
  peptide (1)..(66): Ceres Seq. ID no. 13497722
  misc_feature (1)..(62): Pfam Name: 60s Acidic ribosomal protein Pfam Description: 60s Acidic ribosomal protein
  misc_feature (1)..(66): Homolog of NCBI NO: 15223416 NR Description: heavy-metal-associated domain-containing protein
  misc_feature (1)..(66): Homolog of NCBI NO: 13543783 NR Description: Unknown (protein for MGC:7642) [Mus musculus]
  misc_feature (1)..(66): Homolog of NCBI NO: 10176843 NR Description: gene_id:MRO11.20~unknown protein [Arabidopsis
  misc_feature (1)..(66): Homolog of NCBI NO: 37535864 NR Description: hypothetical protein [Oryza sativa (japonica
  misc_feature (1)..(66): Homolog of NCBI NO: 21554550 NR Description: unknown [Arabidopsis thaliana]
  misc_feature (1)..(66): Homolog of NCBI NO: 18420713 NR Description: heavy-metal-associated domain-containing protein
  misc_feature (1)..(66): Homolog of NCBI NO: 26452654 NR Description: unknown protein [Arabidopsis thaliana]
MKDQKLTVIGLMDAAAVVKKLKKVGKVDLISVGPAKEEKKEEKKEEKKEEKKEEKKEEQKEEEPKK

SEQ ID NO: 35973 - DNA, 543 bp, Arabidopsis thaliana
  misc_feature (1)..(543): Ceres Seq. ID no. 13490582
  misc_feature: MA Experiment ID: 108434 Result: Up-regulated in Transcription
  misc_feature: MA Experiment 108434 PARAMETER Experiment Name: At_Root_Tips_cDNA_P Parameter: Tissue Value: Root Tips
  misc_feature: MA Experiment ID: 108462 Result: Down-regulated in Transcription
  misc_feature: MA Experiment 108462 PARAMETER Experiment Name: At_Germinating_Seeds_cDNA_P Parameter: Age (day) Value: 2 vs. 0
  misc_feature: MA Experiment 108462 PARAMETER Experiment Name: At_Germinating_Seeds_cDNA_P Parameter: Tissue Value: Germinating Seeds
  misc_feature: MA Experiment ID: 108463 Result: Down-regulated in Transcription
  misc_feature: MA Experiment 108463 PARAMETER Experiment Name: At_Germinating_Seeds_cDNA_P Parameter: Age (day) Value: 3 vs. 0
  misc_feature: MA Experiment 108463 PARAMETER Experiment Name: At_Germinating_Seeds_cDNA_P Parameter: Tissue Value: Germinating Seeds
  misc_feature: MA Experiment ID: 108464 Result: Down-regulated in Transcription
  misc_feature: MA Experiment 108464 PARAMETER Experiment Name: At_Germinating_Seeds_cDNA_P Parameter: Age (day) Value: 4 vs. 0
  misc_feature: MA Experiment 108464 PARAMETER Experiment Name: At_Germinating_Seeds_cDNA_P Parameter: Tissue Value: Germinating Seeds
  misc_feature: MA Experiment ID: 108569 Result: Down-regulated in Transcription
  misc_feature: MA Experiment 108569 PARAMETER Experiment Name: At_0.001%_MeJA__cDNA_P Parameter: Timepoint (hr) Value: 6
  misc_feature: MA Experiment 108569 PARAMETER Experiment Name: At_0.001%_MeJA__cDNA_P Parameter: Tissue Value: Aerial
  misc_feature: MA Experiment 108569 PARAMETER Experiment Name: At_0.001%_MeJA__cDNA_P Parameter: Treatment Value: 0.001% MeJA vs. No Treatment
  misc_feature: MA Experiment ID: 108573 Result: Down-regulated in Transcription
  misc_feature: MA Experiment 108573 PARAMETER Experiment Name: At_Drought_cDNA_P Parameter: Timepoint (hr) Value: 6
  misc_feature: MA Experiment 108573 PARAMETER Experiment Name: At_Drought_cDNA_P Parameter: Tissue Value: Aerial
  misc_feature: MA Experiment 108573 PARAMETER Experiment Name: At_Drought_cDNA_P Parameter: Treatment Value: Drought vs. No Drought
  misc_feature: MA Experiment ID: 20000087 Result: Up-regulated in Transcription
  misc_feature: MA Experiment 20000087 PARAMETER Experiment Name: At_100uM_ABA_Mutants_cDNA_P Parameter: Plant Line Value: WS
  misc_feature: MA Experiment 20000087 PARAMETER Experiment Name: At_100uM_ABA_Mutants_cDNA_P Parameter: Timepoint (hr) Value: 6
  misc_feature: MA Experiment 20000087 PARAMETER Experiment Name: At_100uM_ABA_Mutants_cDNA_P Parameter: Tissue Value: Aerial
  misc_feature: MA Experiment 20000087 PARAMETER Experiment Name: At_100uM_ABA_Mutants_cDNA_P Parameter: Treatment Value: 100uM ABA vs. No Treatment
  misc_feature: MA Experiment ID: 20000180 Result: Down-regulated in Transcription
  misc_feature: MA Experiment 20000180 PARAMETER Experiment Name: At_Germinating_Seeds_P Parameter: Age (hr) Value: 24 vs. 0
  misc_feature: MA Experiment 20000180 PARAMETER Experiment Name: At_Germinating_Seeds_P Parameter: Tissue Value: Germinating Seeds
  misc_feature: MA Experiment ID: 20000184 Result: Down-regulated in Transcription
  misc_feature: MA Experiment 20000184 PARAMETER Experiment Name: At_Shoots__P Parameter: Age (day) Value: 7
  misc_feature: MA Experiment 20000184 PARAMETER Experiment Name: At_Shoots__P Parameter: Tissue Value: Shoots vs. Whole Plant
  misc_feature: MA Experiment ID: 20000227 Result: Up-regulated in Transcription
  misc_feature: MA Experiment 20000227 PARAMETER Experiment Name: At_Root-Tips-vs-Tops_P Parameter: Tissue Value: Root Tips vs. Root Tops
  misc_feature: MA Experiment ID: 20000495 Result: Up-regulated in Transcription
  misc_feature: MA Experiment 20000495 PARAMETER Experiment Name: At_Guard_Cells_P Parameter: Harvest Date Value: 8/2/2002
  misc_feature: MA Experiment 20000495 PARAMETER Experiment Name: At_Guard_Cells_P Parameter: Organism Value: A. thaliana
  misc_feature: MA Experiment 20000495 PARAMETER Experiment Name: At_Guard_Cells_P Parameter: Tissue Value: Guard Cells vs. Leaves
  misc_feature: MA Experiment ID: 20000496 Result: Up-regulated in Transcription
  misc_feature: MA Experiment 20000496 PARAMETER Experiment Name: At_Guard_Cells_P Parameter: Harvest Date Value: 7/19/2002
  misc_feature: MA Experiment 20000496 PARAMETER Experiment Name: At_Guard_Cells_P Parameter: Organism Value: Canola
  misc_feature: MA Experiment 20000496 PARAMETER Experiment Name: At_Guard_Cells_P Parameter: Tissue Value: Guard Cells vs. Leaves
  misc_feature: MA Experiment ID: 20001558 Result: Up-regulated in Transcription
  misc_feature: MA Experiment 20001558 PARAMETER Experiment Name: At_Drought_Soil_Dry_P Parameter: Age (day) Value: 27
  misc_feature: MA Experiment 20001558 PARAMETER Experiment Name: At_Drought_Soil_Dry_P Parameter: Organism Value: A. thaliana
  misc_feature: MA Experiment 20001558 PARAMETER Experiment Name: At_Drought_Soil_Dry_P Parameter: Plant Line Value: WS
  misc_feature: MA Experiment 20001558 PARAMETER Experiment Name: At_Drought_Soil_Dry_P Parameter: Post Timepoint (hr) Value: 6
  misc_feature: MA Experiment 20001558 PARAMETER Experiment Name: At_Drought_Soil_Dry_P Parameter: Post-Treatment Value: Re-Water vs. No Drought
  misc_feature: MA Experiment 20001558 PARAMETER Experiment Name: At_Drought_Soil_Dry_P Parameter: Timepoint (day) Value: 13
  misc_feature: MA Experiment 20001558 PARAMETER Experiment Name: At_Drought_Soil_Dry_P Parameter: Treatment Value: Drought vs. No Drought
aaggatttatgatcttcaaattcaagtatgaattataaagtttcgatttttacgaatcattaattttgtattcaggtactgctaaaaaaatggcttctcctattcccgtcggcgttactaaggaaaaggcgtttagtatggcacaaacggagatggagtatcgcgtggaactctttaacaagcttgctcaaacatgctttaataaatgtgtggataaaaggtacaaggaagctgagctaaacatgggtgagaatagttgcatcgaccgttgtgtttccaagtactggcaggtaaatggaatggttggacagcttctaagtgctggcaagcctcccgtgtaatccagtttaaaggcaattattacagaccaaaaagctcatggagggaacacaactctgttctttgtttttctaaagtttaaggcaatcttgtttttattgtcaagaaagttgcatcacatttttggcgctgatttggacaaattatgcaattccatgtgaacccattattattacctaaggggtgaaatgaaataacaaatcg

SEQ ID NO: 35974 - protein, 83 aa, Arabidopsis thaliana
  peptide (1)..(83): Ceres Seq. ID no. 13490583
  misc_feature (13)..(79): Pfam Name: Tim10/DDP family zinc finger Pfam Description: Tim10/DDP family zinc finger
  misc_feature (18)..(77): Homolog of NCBI NO: 6912708 NR Description: translocase of inner mitochondrial membrane 10
  misc_feature (1)..(78): Homolog of NCBI NO: 31204893 NR Description: ENSANGP00000016855 [Anopheles gambiae]
  misc_feature (9)..(74): Homolog of NCBI NO: 12230195 NR Description: Mitochondrial import inner membrane translocase
  misc_feature (16)..(74): Homolog of NCBI NO: 19114054 NR Description: putative mitochondrial intermembrane protein
  misc_feature (9)..(74): Homolog of NCBI NO: 6321793 NR Description: May act cooperatively with Mrs5p in mitochondrial
  misc_feature (2)..(69): Homolog of NCBI NO: 34897366 NR Description: putative zinc finger protein [Oryza sativa]
  misc_feature (7)..(82): Homolog of NCBI NO: 38175439 NR Description: small zinc finger-like protein
  misc_feature (5)..(81): Homolog of NCBI NO: 5107180 NR Description: small zinc finger-like protein [Lycopersicon
  misc_feature (1)..(83): Homolog of NCBI NO: 5107088 NR Description: small zinc finger-like protein [Pinus taeda]
  misc_feature (1)..(83): Homolog of NCBI NO: 18402072 NR Description: small zinc finger-related protein (TIM10)
MASPIPVGVTKEKAFSMAQTEMEYRVELFNKLAQTCFNKCVDKRYKEAELNMGENSCIDRCVSKYWQVNGMVGQLLSAGKPPV

SEQ ID NO: 35975 - protein, 67 aa, Arabidopsis thaliana; identical to SEQ ID NO: 27031
  peptide (1)..(67): Ceres Seq. ID no. 13490584
  misc_feature (1)..(63): Pfam Name: Tim10/DDP family zinc finger Pfam Description: Tim10/DDP family zinc finger
  misc_feature (2)..(61): Homolog of NCBI NO: 6912708 NR Description: translocase of inner mitochondrial membrane 10
  misc_feature (1)..(62): Homolog of NCBI NO: 31204893 NR Description: ENSANGP00000016855 [Anopheles gambiae]
  misc_feature (1)..(58): Homolog of NCBI NO: 12230195 NR Description: Mitochondrial import inner membrane translocase
  misc_feature (1)..(58): Homolog of NCBI NO: 19114054 NR Description: putative mitochondrial intermembrane protein
  misc_feature (1)..(58): Homolog of NCBI NO: 6321793 NR Description: May act cooperatively with Mrs5p in mitochondrial
  misc_feature (1)..(53): Homolog of NCBI NO: 34897366 NR Description: putative zinc finger protein [Oryza sativa]
  misc_feature (1)..(66): Homolog of NCBI NO: 38175439 NR Description: small zinc finger-like protein
  misc_feature (1)..(65): Homolog of NCBI NO: 5107180 NR Description: small zinc finger-like protein [Lycopersicon
  misc_feature (1)..(67): Homolog of NCBI NO: 5107088 NR Description: small zinc finger-like protein [Pinus taeda]
  misc_feature (1)..(67): Homolog of NCBI NO: 18402072 NR Description: small zinc finger-related protein (TIM10)

SEQ ID NO: 35976 - protein, 62 aa, Arabidopsis thaliana
  peptide (1)..(62): Ceres Seq. ID no. 13490585
  misc_feature (1)..(58): Pfam Name: Tim10/DDP family zinc finger Pfam Description: Tim10/DDP family zinc finger
  misc_feature (1)..(56): Homolog of NCBI NO: 6912708 NR Description: translocase of inner mitochondrial membrane 10
  misc_feature (1)..(57): Homolog of NCBI NO: 31204893 NR Description: ENSANGP00000016855 [Anopheles gambiae]
  misc_feature (1)..(53): Homolog of NCBI NO: 12230195 NR Description: Mitochondrial import inner membrane translocase
  misc_feature (1)..(53): Homolog of NCBI NO: 19114054 NR Description: putative mitochondrial intermembrane protein
  misc_feature (1)..(53): Homolog of NCBI NO: 6321793 NR Description: May act cooperatively with Mrs5p in mitochondrial
  misc_feature (1)..(48): Homolog of NCBI NO: 34897366 NR Description: putative zinc finger protein [Oryza sativa]
  misc_feature (1)..(61): Homolog of NCBI NO: 38175439 NR Description: small zinc finger-like protein
  misc_feature (1)..(60): Homolog of NCBI NO: 5107180 NR Description: small zinc finger-like protein [Lycopersicon
  misc_feature (1)..(62): Homolog of NCBI NO: 5107088 NR Description: small zinc finger-like protein [Pinus taeda]
  misc_feature (1)..(62): Homolog of NCBI NO: 18402072 NR Description: small zinc finger-related protein (TIM10)
MEYRVELFNKLAQTCFNKCVDKRYKEAELNMGENSCIDRCVSKYWQVNGMVGQLLSAGKPPV

SEQ ID NO: 35977 - DNA, 1221 bp, Arabidopsis thaliana
  misc_feature (1)..(1221): Ceres Seq. ID no. 12327375
  misc_feature: MA Experiment ID: 108579 Result: Down-regulated in Transcription
  misc_feature: MA Experiment 108579 PARAMETER Experiment Name: At_4deg_Cold_cDNA_P Parameter: Temperature (deg C) Value: 4 vs. 22
  misc_feature: MA Experiment 108579 PARAMETER Experiment Name: At_4deg_Cold_cDNA_P Parameter: Timepoint (hr) Value: 6
  misc_feature: MA Experiment 108579 PARAMETER Experiment Name: At_4deg_Cold_cDNA_P Parameter: Tissue Value: Aerial
  misc_feature: MA Experiment ID: 20001451 Result: Up-regulated in Transcription
  misc_feature: MA Experiment 20001451 PARAMETER Experiment Name: At_Far-red-induction_P Parameter: Age (day) Value: 7
  misc_feature: MA Experiment 20001451 PARAMETER Experiment Name: At_Far-red-induction_P Parameter: Light Value: Far-red vs. White
  misc_feature: MA Experiment 20001451 PARAMETER Experiment Name: At_Far-red-induction_P Parameter: Organism Value: A. thaliana
  misc_feature: MA Experiment 20001451 PARAMETER Experiment Name: At_Far-red-induction_P Parameter: Plant Line Value: Columbia
  misc_feature: MA Experiment 20001451 PARAMETER Experiment Name: At_Far-red-induction_P Parameter: Timepoint (hr) Value: 24
  misc_feature: MA Experiment 20001451 PARAMETER Experiment Name: At_Far-red-induction_P Parameter: Tissue Value: Whole Plant
aacatattttgcccactatttgggtaagaagacttggtctctcgctggttgcttcaatccgagaaaatgctgactctactcttcttctctctcggagcgcttcttcttatcgttctgctcttcaaatttgcattcgccgatggagattttaccttgatttcgaagaagcatgtgaagcgtgaggccatacaaggcaaggtcgtctggatcacaggggctagccgtggaattggtgaaattcttgctaaacagtttgcaagtttagatgccaagcttattctctctgctaggaataaagctgaactggatcgggttaagagtgagcttaaaggtaaatttgcaccagaagatgtcaaggttttgcctttagatttagctagcggcgaagagtcactcaaacatgttgtagagcaagcagtgtcgcttttccctggagctggtgttgattatttggttcacaatgctgcctttgagcgtccgaaatccaaggcatcggatgcaagtgaggaaactctcaagactacattcgatgttaatgtctttgggacgatatctctgacaaagttggtagctcctcatatgctaaaacaaggagggggtcattttgttgtgataagcagtgctgcaggaaaggtaccatcacctggacaggctatatattctgcttcaaaacatgctcttcatggctacttccacagcttgcgttctgagttctgtcagaagggaatcaaggttaccgtcgtttgtcctggtccaatagaaacctggaatggtacaggaacatcaacttcggaagacagcaagtctcctgagaaacgtgtgtcatctgaacgatgtgcagagctgactataatcgctgcatctcataacttgaaggaagcttggatttcatatcagccagtactactcgtgatgtatctagtgcagtacatgccttcccttggcttctggctcatggacaaggttggaggaaagcgtgtggaggtcgcggaaaagaaaggcaacacatactcgtgggatttactgttcgggaagaagactaaaacaaactgaagctgattctctagaagatacacatagatgtggttggttgagccttagtccgtagatgtggttggtgtttgtttgctagtttgattgttaaataactaccaaagcgtcgaaaaatgttttgttgccttgtgaggtgctcaataagtaagaaaagatgtgatcttctgc

SEQ ID NO: 35978 - protein, 328 aa, Arabidopsis thaliana
  peptide (1)..(328): Ceres Seq. ID no. 12327376
  misc_feature (45)..(306): Homolog of NCBI NO: 21313492 NR Description: RIKEN cDNA 2310016E22 [Mus musculus]
  misc_feature (2)..(306): Homolog of NCBI NO: 34865424 NR Description: similar to retinal short-chain
  misc_feature (2)..(306): Homolog of NCBI NO: 34395851 NR Description: Retinal short-chain dehydrogenase/reductase 4
  misc_feature (8)..(308): Homolog of NCBI NO: 34865689 NR Description: similar to CGI-86 protein [Rattus norvegicus]
  misc_feature (45)..(306): Homolog of NCBI NO: 6318548 NR Description: retinal short-chain dehydrogenase/reductase
  misc_feature (139)..(249): Homolog of NCBI NO: 22330816 NR Description: unknown protein; protein id: At3g03350.1
  misc_feature (1)..(306): Homolog of NCBI NO: 7706318 NR Description: CGI-86 protein [Homo sapiens]
  misc_feature (249)..(328): Homolog of NCBI NO: 6017123 NR Description: unknown protein [Arabidopsis thaliana]
  misc_feature (1)..(249): Homolog of NCBI NO: 6017123 NR Description: unknown protein [Arabidopsis thaliana]
  misc_feature (1)..(328): Homolog of NCBI NO: 30678824 NR Description: short-chain dehydrogenase/reductase family
MLTLLFFSLGALLLIVLLFKFAFADGDFTLISKKHVKREAIQGKVVWITGASRGIGEILAKQFASLDAKLILSARNKAELDRVKSELKGKFAPEDVKVLPLDLASGEESLKHVVEQAVSLFPGAGVDYLVHNAAFERPKSKASDASEETLKTTFDVNVFGTISLTKLVAPHMLKQGGGHFVVISSAAGKVPSPGQAIYSASKHALHGYFHSLRSEFCQKGIKVTVVCPGPIETWNGTGTSTSEDSKSPEKRVSSERCAELTIIAASHNLKEAWISYQPVLLVMYLVQYMPSLGFWLMDKVGGKRVEVAEKKGNTYSWDLLFGKKTKTN

SEQ ID NO: 35979 - DNA, 1121 bp, Arabidopsis thaliana
  misc_feature (1)..(1121): Ceres Seq. ID no. 12324170
  misc_feature: MA Experiment ID: 108474 Result: Down-regulated in Transcription
  misc_feature: MA Experiment 108474 PARAMETER Experiment Name: At_Drought_Flowers_cDNA_P Parameter: Timepoint (hr) Value: null
  misc_feature: MA Experiment 108474 PARAMETER Experiment Name: At_Drought_Flowers_cDNA_P Parameter: Treatment Value: Drought vs. No Drought
  misc_feature: MA Experiment ID: 108501 Result: Down-regulated in Transcription
  misc_feature: MA Experiment 108501 PARAMETER Experiment Name: At_ap2_floral_buds_cDNA_P Parameter: Plant Line Value: ap2 (Ler.)
  misc_feature: MA Experiment 108501 PARAMETER Experiment Name: At_ap2_floral_buds_cDNA_P Parameter: Tissue Value: Closed Flower
  misc_feature: MA Experiment ID: 20000111 Result: Up-regulated in Transcription
  misc_feature: MA Experiment 20000111 PARAMETER Experiment Name: At_42deg_Heat_cDNA_P Parameter: Temperature (deg C) Value: 42 vs. 22
  misc_feature: MA Experiment 20000111 PARAMETER Experiment Name: At_42deg_Heat_cDNA_P Parameter: Timepoint (hr) Value: 6
  misc_feature: MA Experiment 20000111 PARAMETER Experiment Name: At_42deg_Heat_cDNA_P Parameter: Tissue Value: Aerial
  misc_feature: MA Experiment ID: 20000306 Result: Down-regulated in Transcription
  misc_feature: MA Experiment 20000306 PARAMETER Experiment Name: At_Germinating_Seeds_Sub_P Parameter: Age (hr) Value: 6 vs. 0
  misc_feature: MA Experiment 20000306 PARAMETER Experiment Name: At_Germinating_Seeds_Sub_P Parameter: Organism Value: A. thaliana
  misc_feature: MA Experiment 20000306 PARAMETER Experiment Name: At_Germinating_Seeds_Sub_P Parameter: Plant Line Value: WS
  misc_feature: MA Experiment 20000306 PARAMETER Experiment Name: At_Germinating_Seeds_Sub_P Parameter: Tissue Value: Germinating Seeds
  misc_feature: MA Experiment ID: 20000307 Result: Down-regulated in Transcription
  misc_feature: MA Experiment 20000307 PARAMETER Experiment Name: At_Germinating_Seeds_Sub_P Parameter: Age (hr) Value: 24 vs. 0
  misc_feature: MA Experiment 20000307 PARAMETER Experiment Name: At_Germinating_Seeds_Sub_P Parameter: Organism Value: A. thaliana
  misc_feature: MA Experiment 20000307 PARAMETER Experiment Name: At_Germinating_Seeds_Sub_P Parameter: Plant Line Value: WS
  misc_feature: MA Experiment 20000307 PARAMETER Experiment Name: At_Germinating_Seeds_Sub_P Parameter: Tissue Value: Germinating Seeds
  misc_feature: MA Experiment ID: 20000314 Result: Down-regulated in Transcription
  misc_feature: MA Experiment 20000314 PARAMETER Experiment Name: At_14day_Shoots-Roots_Sub_P Parameter: Age (day) Value: 14
  misc_feature: MA Experiment 20000314 PARAMETER Experiment Name: At_14day_Shoots-Roots_Sub_P Parameter: Organism Value: A. thaliana
  misc_feature: MA Experiment 20000314 PARAMETER Experiment Name: At_14day_Shoots-Roots_Sub_P Parameter: Plant Line Value: WS
  misc_feature: MA Experiment 20000314 PARAMETER Experiment Name: At_14day_Shoots-Roots_Sub_P Parameter: Tissue Value: Roots vs. Whole Plant
  misc_feature: MA Experiment ID: 20000355 Result: Down-regulated in Transcription
  misc_feature: MA Experiment 20000355 PARAMETER Experiment Name: At_Siliques_Sub_P Parameter: Age (day) Value: 21
  misc_feature: MA Experiment 20000355 PARAMETER Experiment Name: At_Siliques_Sub_P Parameter: Organism Value: A. thaliana
  misc_feature: MA Experiment 20000355 PARAMETER Experiment Name: At_Siliques_Sub_P Parameter: Plant Line Value: WS
  misc_feature: MA Experiment 20000355 PARAMETER Experiment Name: At_Siliques_Sub_P Parameter: Tissue Value: Less Than 5mm Siliques vs. Whole Plant
  misc_feature: MA Experiment ID: 20000440 Result: Up-regulated in Transcription
  misc_feature: MA Experiment 20000440 PARAMETER Experiment Name: At_Closed-Flower__Sub_P Parameter: Tissue Value: Closed Flower vs. Whole Plant
aatcgaattttgttgtgtgtgacctcaaactgacaacttccagtaattgtaatattaccaattttttttataaaaaagatgaacttcactttagagcaatagcaatccctcgagtctcccctatataaagattccaactccttaacgattcatctaatgaaaaaacacacacaccaaaaatatcagatatctcaaacaatgtcttcagtttttggatctgtccatatcttggccatgatagccatacaactcctccttacacacagtgtttcatctctgaaccttaccaatgcgtatctgcaccacaaatgcagcaacactcaaggaaaatataagcaggggagcgcgttcgagaaaaatctcaacttagtcctcagtaccatcacctcgattggaaattttcgtgacggtttccgctacaccgaagaaggtgaggatcccaataacgtctttgtcatgttccagtgtcgcggcgactcctactggtccaagtgccccccttgcattagcaccgccgtctctgggcttcgtaggagatgtccaagaaataagggagcaataatatggtatgaccaatgtcttttaaagatatcttcagttgcctccttcaataagatagattatgagaacgatttctatttgtccaacccaaacaacatgagtgatcgggggttgttcaacaaggagacgtcggctctcctggagaagctggcatataaagcctccgatagaaacaacttggatggtaaacaattggtgttgtacgcagcaggggagaagagaattgggacaaagaaggtgtatgcaatggtgcagtgtacgaaagacttaatatttacaaagtgctttgagtgtttggaagggattttgaggaagtttccacagtgttgtgacggtaaacgaggagggagagttttcggtacgagctgtaactttaggtatgagttatatccttttcttagaaactaacagcaacagtacaatgagagctccatattaaatgaaagggttctagagataaacagtcttataatatacactgtgttgcattttagtacgtgaacttgagcgaataaatgtactttcctctttgttttttgtgaacttgagttattaagagg

SEQ ID NO: 35980 - protein, 270 aa, Arabidopsis thaliana
  peptide (1)..(270): Ceres Seq. ID no. 12324171
  misc_feature (215)..(269): Pfam Name: Domain of unknown function DUF26 Pfam Description: Domain of unknown function DUF26
  misc_feature (6)..(269): Homolog of NCBI NO: 15233238 NR Description: hypothetical protein; protein id: At3g22010.1
  misc_feature (25)..(269): Homolog of NCBI NO: 15233236 NR Description: hypothetical protein; protein id: At3g22000.1
  misc_feature (25)..(269): Homolog of NCBI NO: 15233368 NR Description: putative protein; protein id: At4g20680.1
  misc_feature (15)..(253): Homolog of NCBI NO: 9279755 NR Description: emb|CAB45833.1~gene_id:MZN24.16~similar to
  misc_feature (15)..(124): Homolog of NCBI NO: 15233231 NR Description: hypothetical protein; protein id: At3g21980.1
  misc_feature (149)..(270): Homolog of NCBI NO: 15233231 NR Description: hypothetical protein; protein id: At3g21980.1
  misc_feature (15)..(261): Homolog of NCBI NO: 18415518 NR Description: putative protein; protein id: At4g20530.1
  misc_feature (15)..(261): Homolog of NCBI NO: 15233364 NR Description: receptor kinase common family, 3' partial,
  misc_feature (15)..(270): Homolog of NCBI NO: 15233235 NR Description: receptor kinase common family, putative; protein
  misc_feature (15)..(270): Homolog of NCBI NO: 15233366 NR Description: pollen coat receptor kinase, putative; protein
MKKHTHQKYQISQTMSSVFGSVHILAMIAIQLLLTHSVSSLNLTNAYLHHKCSNTQGKYKQGSAFEKNLNLVLSTITSIGNFRDGFRYTEEGEDPNNVFVMFQCRGDSYWSKCPPCISTAVSGLRRRCPRNKGAIIWYDQCLLKISSVASFNKIDYENDFYLSNPNNMSDRGLFNKETSALLEKLAYKASDRNNLDGKQLVLYAAGEKRIGTKKVYAMVQCTKDLIFTKCFECLEGILRKFPQCCDGKRGGRVFGTSCNFRYELYPFLRN

SEQ ID NO: 35981 - protein, 256 aa, Arabidopsis thaliana
  peptide (1)..(256): Ceres Seq. ID no. 12324172
  misc_feature (201)..(255): Pfam Name: Domain of unknown function DUF26 Pfam Description: Domain of unknown function DUF26
  misc_feature (1)..(255): Homolog of NCBI NO: 15233238 NR Description: hypothetical protein; protein id: At3g22010.1
  misc_feature (11)..(255): Homolog of NCBI NO: 15233236 NR Description: hypothetical protein; protein id: At3g22000.1
  misc_feature (11)..(255): Homolog of NCBI NO: 15233368 NR Description: putative protein; protein id: At4g20680.1
  misc_feature (1)..(239): Homolog of NCBI NO: 9279755 NR Description: emb|CAB45833.1~gene_id:MZN24.16~similar to
  misc_feature (1)..(110): Homolog of NCBI NO: 15233231 NR Description: hypothetical protein; protein id: At3g21980.1
  misc_feature (135)..(256): Homolog of NCBI NO: 15233231 NR Description: hypothetical protein; protein id: At3g21980.1
  misc_feature (1)..(247): Homolog of NCBI NO: 18415518 NR Description: putative protein; protein id: At4g20530.1
  misc_feature (1)..(247): Homolog of NCBI NO: 15233364 NR Description: receptor kinase common family, 3' partial,
  misc_feature (1)..(256): Homolog of NCBI NO: 15233235 NR Description: receptor kinase common family, putative; protein
  misc_feature (1)..(256): Homolog of NCBI NO: 15233366 NR Description: pollen coat receptor kinase, putative; protein
MSSVFGSVHILAMIAIQLLLTHSVSSLNLTNAYLHHKCSNTQGKYKQGSAFEKNLNLVLSTITSIGNFRDGFRYTEEGEDPNNVFVMFQCRGDSYWSKCPPCISTAVSGLRRRCPRNKGAIIWYDQCLLKISSVASFNKIDYENDFYLSNPNNMSDRGLFNKETSALLEKLAYKASDRNNLDGKQLVLYAAGEKRIGTKKVYAMVQCTKDLIFTKCFECLEGILRKFPQCCDGKRGGRVFGTSCNFRYELYPFLRN

SEQ ID NO: 35982 - protein, 244 aa, Arabidopsis thaliana
  peptide (1)..(244): Ceres Seq. ID no. 12324173
  misc_feature (189)..(243): Pfam Name: Domain of unknown function DUF26 Pfam Description: Domain of unknown function DUF26
  misc_feature (1)..(243): Homolog of NCBI NO: 15233238 NR Description: hypothetical protein; protein id: At3g22010.1
  misc_feature (1)..(243): Homolog of NCBI NO: 15233236 NR Description: hypothetical protein; protein id: At3g22000.1
  misc_feature (1)..(243): Homolog of NCBI NO: 15233368 NR Description: putative protein; protein id: At4g20680.1
  misc_feature (1)..(227): Homolog of NCBI NO: 9279755 NR Description: emb|CAB45833.1~gene_id:MZN24.16~similar to
  misc_feature (1)..(98): Homolog of NCBI NO: 15233231 NR Description: hypothetical protein; protein id: At3g21980.1
  misc_feature (123)..(244): Homolog of NCBI NO: 15233231 NR Description: hypothetical protein; protein id: At3g21980.1
  misc_feature (1)..(235): Homolog of NCBI NO: 18415518 NR Description: putative protein; protein id: At4g20530.1
  misc_feature (1)..(235): Homolog of NCBI NO: 15233364 NR Description: receptor kinase common family, 3' partial,
  misc_feature (1)..(244): Homolog of NCBI NO: 15233235 NR Description: receptor kinase common family, putative; protein
  misc_feature (1)..(244): Homolog of NCBI NO: 15233366 NR Description: pollen coat receptor kinase, putative; protein
MIAIQLLLTHSVSSLNLTNAYLHHKCSNTQGKYKQGSAFEKNLNLVLSTITSIGNFRDGFRYTEEGEDPNNVFVMFQCRGDSYWSKCPPCISTAVSGLRRRCPRNKGAIIWYDQCLLKISSVASFNKIDYENDFYLSNPNNMSDRGLFNKETSALLEKLAYKASDRNNLDGKQLVLYAAGEKRIGTKKVYAMVQCTKDLIFTKCFECLEGILRKFPQCCDGKRGGRVFGTSCNFRYELYPFLRN

SEQ ID NO: 35983 - DNA, 1308 bp, Arabidopsis thaliana
  misc_feature (1)..(1308): Ceres Seq. ID no. 12335159
  misc_feature: MA Experiment ID: 108434 Result: Up-regulated in Transcription
  misc_feature: MA Experiment 108434 PARAMETER Experiment Name: At_Root_Tips_cDNA_P Parameter: Tissue Value: Root Tips
  misc_feature: MA Experiment ID: 108462 Result: Down-regulated in Transcription
  misc_feature: MA Experiment 108462 PARAMETER Experiment Name: At_Germinating_Seeds_cDNA_P Parameter: Age (day) Value: 2 vs. 0
  misc_feature: MA Experiment 108462 PARAMETER Experiment Name: At_Germinating_Seeds_cDNA_P Parameter: Tissue Value: Germinating Seeds
  misc_feature: MA Experiment ID: 108463 Result: Down-regulated in Transcription
  misc_feature: MA Experiment 108463 PARAMETER Experiment Name: At_Germinating_Seeds_cDNA_P Parameter: Age (day) Value: 3 vs. 0
  misc_feature: MA Experiment 108463 PARAMETER Experiment Name: At_Germinating_Seeds_cDNA_P Parameter: Tissue Value: Germinating Seeds
  misc_feature: MA Experiment ID: 108464 Result: Down-regulated in Transcription
  misc_feature: MA Experiment 108464 PARAMETER Experiment Name: At_Germinating_Seeds_cDNA_P Parameter: Age (day) Value: 4 vs. 0
  misc_feature: MA Experiment 108464 PARAMETER Experiment Name: At_Germinating_Seeds_cDNA_P Parameter: Tissue Value: Germinating Seeds
  misc_feature: MA Experiment ID: 108488 Result: Up-regulated in Transcription
  misc_feature: MA Experiment ID: 108573 Result: Down-regulated in Transcription
  misc_feature: MA Experiment 108573 PARAMETER Experiment Name: At_Drought_cDNA_P Parameter: Timepoint (hr) Value: 6
  misc_feature: MA Experiment 108573 PARAMETER Experiment Name: At_Drought_cDNA_P Parameter: Tissue Value: Aerial
  misc_feature: MA Experiment 108573 PARAMETER Experiment Name: At_Drought_cDNA_P Parameter: Treatment Value: Drought vs. No Drought
  misc_feature: MA Experiment ID: 108579 Result: Up-regulated in Transcription
  misc_feature: MA Experiment 108579 PARAMETER Experiment Name: At_4deg_Cold_cDNA_P Parameter: Temperature (deg C) Value: 4 vs. 22
  misc_feature: MA Experiment 108579 PARAMETER Experiment Name: At_4deg_Cold_cDNA_P Parameter: Timepoint (hr) Value: 6
  misc_feature: MA Experiment 108579 PARAMETER Experiment Name: At_4deg_Cold_cDNA_P Parameter: Tissue Value: Aerial
  misc_feature: MA Experiment ID: 20000180 Result: Down-regulated in Transcription
  misc_feature: MA Experiment 20000180 PARAMETER Experiment Name: At_Germinating_Seeds_P Parameter: Age (hr) Value: 24 vs. 0
  misc_feature: MA Experiment 20000180 PARAMETER Experiment Name: At_Germinating_Seeds_P Parameter: Tissue Value: Germinating Seeds
  misc_feature: MA Experiment ID: 20001458 Result: Up-regulated in Transcription
  misc_feature: MA Experiment 20001458 PARAMETER Experiment Name: At_50mM_NH4NO3_L-to-H_P Parameter: Age (day) Value: Undefined
  misc_feature: MA Experiment 20001458 PARAMETER Experiment Name: At_50mM_NH4NO3_L-to-H_P Parameter: Organism Value: Undefined
  misc_feature: MA Experiment 20001458 PARAMETER Experiment Name: At_50mM_NH4NO3_L-to-H_P Parameter: Plant Line Value: Undefined
  misc_feature: MA Experiment 20001458 PARAMETER Experiment Name: At_50mM_NH4NO3_L-to-H_P Parameter: Timepoint (hr) Value: 2
  misc_feature: MA Experiment 20001458 PARAMETER Experiment Name: At_50mM_NH4NO3_L-to-H_P Parameter: Tissue Value: Siliques
  misc_feature: MA Experiment 20001458 PARAMETER Experiment Name: At_50mM_NH4NO3_L-to-H_P Parameter: Treatment Value: 50mM NH4NO3 vs. 100mM Manitol
  misc_feature: MA Experiment ID: 20001557 Result: Up-regulated in Transcription
  misc_feature: MA Experiment 20001557 PARAMETER Experiment Name: At_Drought_Soil_Dry_P Parameter: Age (day) Value: 27
  misc_feature: MA Experiment 20001557 PARAMETER Experiment Name: At_Drought_Soil_Dry_P Parameter: Organism Value: A. thaliana
  misc_feature: MA Experiment 20001557 PARAMETER Experiment Name: At_Drought_Soil_Dry_P Parameter: Plant Line Value: WS
  misc_feature: MA Experiment 20001557 PARAMETER Experiment Name: At_Drought_Soil_Dry_P Parameter: Post Timepoint (hr) Value: 3
  misc_feature: MA Experiment 20001557 PARAMETER Experiment Name: At_Drought_Soil_Dry_P Parameter: Post-Treatment Value: Re-Water vs. No Drought
  misc_feature: MA Experiment 20001557 PARAMETER Experiment Name: At_Drought_Soil_Dry_P Parameter: Timepoint (day) Value: 13
  misc_feature: MA Experiment 20001557 PARAMETER Experiment Name: At_Drought_Soil_Dry_P Parameter: Treatment Value: Drought vs. No Drought
  misc_feature: MA Experiment ID: 20001558 Result: Up-regulated in Transcription
  misc_feature: MA Experiment 20001558 PARAMETER Experiment Name: At_Drought_Soil_Dry_P Parameter: Age (day) Value: 27
  misc_feature: MA Experiment 20001558 PARAMETER Experiment Name: At_Drought_Soil_Dry_P Parameter: Organism Value: A. thaliana
  misc_feature: MA Experiment 20001558 PARAMETER Experiment Name: At_Drought_Soil_Dry_P Parameter: Plant Line Value: WS
  misc_feature: MA Experiment 20001558 PARAMETER Experiment Name: At_Drought_Soil_Dry_P Parameter: Post Timepoint (hr) Value: 6
  misc_feature: MA Experiment 20001558 PARAMETER Experiment Name: At_Drought_Soil_Dry_P Parameter: Post-Treatment Value: Re-Water vs. No Drought
  misc_feature: MA Experiment 20001558 PARAMETER Experiment Name: At_Drought_Soil_Dry_P Parameter: Timepoint (day) Value: 13
  misc_feature: MA Experiment 20001558 PARAMETER Experiment Name: At_Drought_Soil_Dry_P Parameter: Treatment Value: Drought vs. No Drought
  misc_feature: MA Experiment ID: 20001757 Result: Up-regulated in Transcription
  misc_feature: MA Experiment 20001757 PARAMETER Experiment Name: At_50mM_NH4NO3_L-to-H_P Parameter: Timepoint (hr) Value: 6
  misc_feature: MA Experiment 20001757 PARAMETER Experiment Name: At_50mM_NH4NO3_L-to-H_P Parameter: Tissue Value: Leaf
  misc_feature: MA Experiment 20001757 PARAMETER Experiment Name: At_50mM_NH4NO3_L-to-H_P Parameter: Treatment Value: 50mM NH4NO3 vs 100mM Mannitol
  misc_feature: Phenotype: WHOLE PLANT Color-Dark Green
  misc_feature: Phenotype: INFLORESCENCE Height-Short
  misc_feature: Phenotype: INFLORESCENCE Internode Length-Short Internode
  misc_feature: Phenotype: INFLORESCENCE Other
  misc_feature: Phenotype: WHOLE PLANT Color-Dark Green
  misc_feature: Phenotype: INFLORESCENCE Height-Short
  misc_feature: Phenotype: INFLORESCENCE Internode Length-Short Internode
  misc_feature: Phenotype: INFLORESCENCE Other
  misc_feature: Phenotype: INFLORESCENCE Height-Short
  misc_feature: Phenotype: INFLORESCENCE Internode Length-Short Internode
  misc_feature: Phenotype: INFLORESCENCE Other
  misc_feature: Phenotype: WHOLE PLANT Color-Dark Green
  misc_feature: Phenotype: INFLORESCENCE Height-Short
  misc_feature: Phenotype: INFLORESCENCE Internode Length-Short Internode
  misc_feature: Phenotype: INFLORESCENCE Other
  misc_feature: Phenotype: INFLORESCENCE Height-Short
  misc_feature: Phenotype: INFLORESCENCE Internode Length-Short Internode
  misc_feature: Phenotype: INFLORESCENCE Other
atatcaatcaatcgaaaaacctttctctcttctttcggagccgtcgcttgtgaaactttccggcgatttaacagagtcatgatggaaatacgaactccgaagactggcaaagccaagcgtgttctcgaaagccgagctcctaagttggttgaaactgggaagaagacgttgatacttcatggaacaaagacgagtgctacacttagctctgtaatgacggaactctaccgtttgaagaagggaggtgccatcagatattcaaggaggaatgagaatattaggcctttcgagagtggaggtgaaacttcattagagttcttctctcagaaaacagattgtagcatttttgtgtatggttctcacacgaagaaacgacctgacaatcttgtacttgggagaatgtatgatcaccaagtctatgatcttatagaagttgggattgagaactttaaatccttgcgggcgttttcgtatgacaagaaattcgcacctcatgaaggaacaaagcctttcatttgctttattggtgaaggttttgagaatgtatcagagcttaagcatctcaaagaagtcctcactgatctttttcgtggcgaggttgtggataatctaaatcttactggtttagaccgcgcttacgtatgttcagctatatccccaacaaaggttttccttactcattgcgcattgaagcttaaaaagtcaggatccattgttccgagaatggagcttgttgaagtcggtccatccatggacttggttatcaggcgtaatcgtcttcctaacgatagcttaatgaaagaagcaatgagaacatccaaggataagcctaagaagaaggagaaaaacgttgatcaagatgcagtactagggaagactgggaagatttatatgcctgatcagaagctgaaagaaatgaaactgttcgataaatctaagggatcgaagagagagcggaaagacgctaagcttaagcataaggaagagactgttgccaaaaagatgaaggtgtcttctgagtgactcaacagaccactcttggctctgcatcaacagctttcaatatgtggaagatgaaatgattttgtagtgtaatgagcttgacttttatttttccattagaatctataactgaatgttttctatacgctaatattttattaaggtgattttgttttgttaaaactctgcagcaacagaaactggatatgataaaaacacatttttgtctatctctgtttcctactgcagtacatgcgtaagacagcaacttttttcccgtgttgaatgagaccacaatttttgccc

SEQ ID NO: 35984 - protein, 340 aa, Arabidopsis thaliana
  peptide (1)..(340): Ceres Seq. ID no. 12335160
  misc_feature (33)..(336): Homolog of NCBI NO: 28461332 NR Description: Similar to RIKEN cDNA 2810470K21 gene [Xenopus
  misc_feature (29)..(317): Homolog of NCBI NO: 12850727 NR Description: unnamed protein product [Mus musculus]
  misc_feature (29)..(317): Homolog of NCBI NO: 31982662 NR Description: RIKEN cDNA 2810470K21 [Mus musculus]
  misc_feature (29)..(338): Homolog of NCBI NO: 27705690 NR Description: similar to RIKEN cDNA 2810470K21 gene
  misc_feature (29)..(317): Homolog of NCBI NO: 18203123 NR Description: Brix domain containing protein 1
  misc_feature (29)..(317): Homolog of NCBI NO: 7670547 NR Description: unnamed protein product [Mus musculus]
  misc_feature (33)..(336): Homolog of NCBI NO: 39930469 NR Description: brix domain containing 1 [Homo sapiens]
  misc_feature (30)..(340): Homolog of NCBI NO: 34914658 NR Description: P0504D03.20 [Oryza sativa (japonica
  misc_feature (28)..(340): Homolog of NCBI NO: 21554561 NR Description: unknown [Arabidopsis thaliana]
  misc_feature (27)..(340): Homolog of NCBI NO: 18403828 NR Description: expressed protein
ISINRKTFLSSFGAVACETFRRFNRVMMEIRTPKTGKAKRVLESRAPKLVETGKKTLILHGTKTSATLSSVMTELYRLKKGGAIRYSRRNENIRPFESGGETSLEFFSQKTDCSIFVYGSHTKKRPDNLVLGRMYDHQVYDLIEVGIENFKSLRAFSYDKKFAPHEGTKPFICFIGEGFENVSELKHLKEVLTDLFRGEVVDNLNLTGLDRAYVCSAISPTKVFLTHCALKLKKSGSIVPRMELVEVGPSMDLVIRRNRLPNDSLMKEAMRTSKDKPKKKEKNVDQDAVLGKTGKIYMPDQKLKEMKLFDKSKGSKRERKDAKLKHKEETVAKKMKVSSE

SEQ ID NO: 35985 - protein, 314 aa, Arabidopsis thaliana
  peptide (1)..(314): Ceres Seq. ID no. 12335161
  misc_feature (7)..(310): Homolog of NCBI NO: 28461332 NR Description: Similar to RIKEN cDNA 2810470K21 gene [Xenopus
  misc_feature (3)..(291): Homolog of NCBI NO: 12850727 NR Description: unnamed protein product [Mus musculus]
  misc_feature (3)..(291): Homolog of NCBI NO: 31982662 NR Description: RIKEN cDNA 2810470K21 [Mus musculus]
  misc_feature (3)..(312): Homolog of NCBI NO: 27705690 NR Description: similar to RIKEN cDNA 2810470K21 gene
  misc_feature (3)..(291): Homolog of NCBI NO: 18203123 NR Description: Brix domain containing protein 1
  misc_feature (3)..(291): Homolog of NCBI NO: 7670547 NR Description: unnamed protein product [Mus musculus]
  misc_feature (7)..(310): Homolog of NCBI NO: 39930469 NR Description: brix domain containing 1 [Homo sapiens]
  misc_feature (4)..(314): Homolog of NCBI NO: 34914658 NR Description: P0504D03.20 [Oryza sativa (japonica
  misc_feature (2)..(314): Homolog of NCBI NO: 21554561 NR Description: unknown [Arabidopsis thaliana]
  misc_feature (1)..(314): Homolog of NCBI NO: 18403828 NR Description: expressed protein
MMEIRTPKTGKAKRVLESRAPKLVETGKKTLILHGTKTSATLSSVMTELYRLKKGGAIRYSRRNENIRPFESGGETSLEFFSQKTDCSIFVYGSHTKKRPDNLVLGRMYDHQVYDLIEVGIENFKSLRAFSYDKKFAPHEGTKPFICFIGEGFENVSELKHLKEVLTDLFRGEVVDNLNLTGLDRAYVCSAISPTKVFLTHCALKLKKSGSIVPRMELVEVGPSMDLVIRRNRLPNDSLMKEAMRTSKDKPKKKEKNVDQDAVLGKTGKIYMPDQKLKEMKLFDKSKGSKRERKDAKLKHKEETVAKKMKVSSE

SEQ ID NO: 35986 - protein, 313 aa, Arabidopsis thaliana
  peptide (1)..(313): Ceres Seq. ID no. 12335162
  misc_feature (6)..(309): Homolog of NCBI NO: 28461332 NR Description: Similar to RIKEN cDNA 2810470K21 gene [Xenopus
  misc_feature (2)..(290): Homolog of NCBI NO: 12850727 NR Description: unnamed protein product [Mus musculus]
  misc_feature (2)..(290): Homolog of NCBI NO: 31982662 NR Description: RIKEN cDNA 2810470K21 [Mus musculus]
  misc_feature (2)..(311): Homolog of NCBI NO: 27705690 NR Description: similar to RIKEN cDNA 2810470K21 gene
  misc_feature (2)..(290): Homolog of NCBI NO: 18203123 NR Description: Brix domain containing protein 1
  misc_feature (2)..(290): Homolog of NCBI NO: 7670547 NR Description: unnamed protein product [Mus musculus]
  misc_feature (6)..(309): Homolog of NCBI NO: 39930469 NR Description: brix domain containing 1 [Homo sapiens]
  misc_feature (3)..(313): Homolog of NCBI NO: 34914658 NR Description: P0504D03.20 [Oryza sativa (japonica
  misc_feature (1)..(313): Homolog of NCBI NO: 21554561 NR Description: unknown [Arabidopsis thaliana]
  misc_feature (1)..(313): Homolog of NCBI NO: 18403828 NR Description: expressed protein
MEIRTPKTGKAKRVLESRAPKLVETGKKTLILHGTKTSATLSSVMTELYRLKKGGAIRYSRRNENIRPFESGGETSLEFFSQKTDCSIFVYGSHTKKRPDNLVLGRMYDHQVYDLIEVGIENFKSLRAFSYDKKFAPHEGTKPFICFIGEGFENVSELKHLKEVLTDLFRGEVVDNLNLTGLDRAYVCSAISPTKVFLTHCALKLKKSGSIVPRMELVEVGPSMDLVIRRNRLPNDSLMKEAMRTSKDKPKKKEKNVDQDAVLGKTGKIYMPDQKLKEMKLFDKSKGSKRERKDAKLKHKEETVAKKMKVSSE

SEQ ID NO: 35987 - DNA, 1585 bp, Arabidopsis thaliana
  misc_feature (1)..(1585): Ceres Seq. ID no. 12327645
  misc_feature: MA Experiment ID: 108595 Result: Up-regulated in Transcription
  misc_feature: MA Experiment 108595 PARAMETER Experiment Name: At_Ler-pi_Ovule_cDNA_P Parameter: Plant Line Value: null
  misc_feature: MA Experiment ID: 20000234 Result: Up-regulated in Transcription
  misc_feature: MA Experiment 20000234 PARAMETER Experiment Name: At_Siliques_P Parameter: Age (day) Value: 21
  misc_feature: MA Experiment 20000234 PARAMETER Experiment Name: At_Siliques_P Parameter: Organism Value: A. thaliana
  misc_feature: MA Experiment 20000234 PARAMETER Experiment Name: At_Siliques_P Parameter: Plant Line Value: WS
  misc_feature: MA Experiment 20000234 PARAMETER Experiment Name: At_Siliques_P Parameter: Tissue Value: Less Than 5mm Siliques vs. Whole Plant
  misc_feature: MA Experiment ID: 20000264 Result: Up-regulated in Transcription
  misc_feature: MA Experiment 20000264 PARAMETER Experiment Name: At_Open_Flower_P Parameter: Age (day) Value: 21
  misc_feature: MA Experiment 20000264 PARAMETER Experiment Name: At_Open_Flower_P Parameter: Plant Line Value: WS
  misc_feature: MA Experiment 20000264 PARAMETER Experiment Name: At_Open_Flower_P Parameter: Tissue Value: Open Flower vs. Whole Plant
  misc_feature: MA Experiment ID: 20000265 Result: Up-regulated in Transcription
  misc_feature: MA Experiment 20000265 PARAMETER Experiment Name: At_Open_Flower_P Parameter: Age (day) Value: 21
  misc_feature: MA Experiment 20000265 PARAMETER Experiment Name: At_Open_Flower_P Parameter: Plant Line Value: WS
  misc_feature: MA Experiment 20000265 PARAMETER Experiment Name: At_Open_Flower_P Parameter: Tissue Value: Closed Flower vs. Whole Plant
  misc_feature: MA Experiment ID: 20000286 Result: Up-regulated in Transcription
  misc_feature: MA Experiment 20000286 PARAMETER Experiment Name: At_Open_Flower_P Parameter: Age (day) Value: 21
  misc_feature: MA Experiment 20000286 PARAMETER Experiment Name: At_Open_Flower_P Parameter: Plant Line Value: WS
  misc_feature: MA Experiment 20000286 PARAMETER Experiment Name: At_Open_Flower_P Parameter: Tissue Value: Half Open vs. Whole Plant
accaaaatcagattagagtttcagagacatctctcgaatacgatcatcagacaagacttaacctccatttgcacgtcttcctgctcacgacagacaaatcatgaacgaatccgacagctgaacgaattgcgtgtctgagaagatccaaatcctaattttctaccttttttttttgggaactaaggttagaatttggagcttctcgtacgtttttgcttgcctacgtttccggacaaaaaactatttgcatataaacagaacaggttctgttcatcaagacactgaagcctgatggggatggaggaagggattaaagataatgctgcatcagctcccaattcaagacctacaaaccaacttaaagctcttttaccgatgcgggtgcttcaagttttcttgttgttctttgttttggttcttggaatctcagtcattagtatgcacatgatcaagtacttaaagattcaaactttagctccatcgacattgatctctacttatgatgagagaattacgttagagagccttatcaagcctccattgaatggttggcattccatgaatgacagtgagcttctttggcgtgcttcgatggagcctcggatacttgactatccatttaaaagagttcctaaaatggcattcatgtttctcaccaaaggacctttgccatttgctccactttgggaaaggtttttcaaagggcatgagggcttttactcaatctatgttcatactttgccaaattatagatcagatttcccaagctcatctgtgttttacagaagacagatcccaagtcagcatgtagcttggggagagatgagtatgtgtgatgctgaaaggaggcttttggctaacgcgttgctcgatatctctaacgaatggtttgttttactatctgaagcgtgtattcctcttcgcggtttcaactttgtctaccgttatgtctctagatcaagatatagtttcatgggttctgttgacgaggacgggccttacgggagaggcagatatagctatgcaatgggaccagaagtaagtctaaacgagtggagaaaagggtctcagtggtttgaaataaacagagcacttgctgttgatattgttgaagacatggtttactataacaaattcaaagagttttgtagacctccttgttatgtagatgaacattacttcccaacaatgctctctattggatatccggattttctcgctaatcggacattgacttggacagattggtcaaggggtggtgctcatccagctacttttggcaaggctgatataacagagaagttcatcaagaagctgtcaagaggtaaagcttgcttctacaatgatcagccatctcaagtttgttatctttttgcaagaaagtttgctccaagcgcattgaagcctttacttaaacttgcaccaaaggttcttgggttctaattaatggatctcttgtcttctttttgttcttggtttttgttctgaaatgttcttgaacttgagtgtagcttcgtatagcatggacacaactctgatccttattgtctccttccacattgataatatagatacttcaatggcc

SEQ ID NO: 35988 - protein, 383 aa, Arabidopsis thaliana
  peptide (1)..(383): Ceres Seq. ID no. 12327646
  misc_feature (151)..(262): Pfam Name: Arabidopsis protein of unknown function, DUF266 Pfam Description: Arabidopsis protein of unknown function, DUF266
  misc_feature (83)..(381): Homolog of NCBI NO: 34907318 NR Description: contains ESTs
  misc_feature (72)..(383): Homolog of NCBI NO: 15221386 NR Description: hypothetical protein; protein id: At1g68390.1
  misc_feature (74)..(383): Homolog of NCBI NO: 38344090 NR Description: OSJNBb0056F09.13 [Oryza sativa (japonica
  misc_feature (75)..(383): Homolog of NCBI NO: 15218485 NR Description: unknown protein; protein id: At1g10280.1
  misc_feature (1)..(381): Homolog of NCBI NO: 15239557 NR Description: putative protein; protein id: At5g25970.1
  misc_feature (1)..(383): Homolog of NCBI NO: 15239155 NR Description: putative protein
  misc_feature (3)..(383): Homolog of NCBI NO: 15218028 NR Description: hypothetical protein; protein id: At1g51770.1
  misc_feature (1)..(344): Homolog of NCBI NO: 9280235 NR Description: gb|AAD40142.1~gene_id:MXL8.19~strong similarity
  misc_feature (3)..(383): Homolog of NCBI NO: 21554566 NR Description: unknown [Arabidopsis thaliana]
  misc_feature (1)..(383): Homolog of NCBI NO: 18402952 NR Description: expressed protein
MGMEEGIKDNAASAPNSRPTNQLKALLPMRVLQVFLLFFVLVLGISVISMHMIKYLKIQTLAPSTLISTYDERITLESLIKPPLNGWHSMNDSELLWRASMEPRILDYPFKRVPKMAFMFLTKGPLPFAPLWERFFKGHEGFYSIYVHTLPNYRSDFPSSSVFYRRQIPSQHVAWGEMSMCDAERRLLANALLDISNEWFVLLSEACIPLRGFNFVYRYVSRSRYSFMGSVDEDGPYGRGRYSYAMGPEVSLNEWRKGSQWFEINRALAVDIVEDMVYYNKFKEFCRPPCYVDEHYFPTMLSIGYPDFLANRTLTWTDWSRGGAHPATFGKADITEKFIKKLSRGKACFYNDQPSQVCYLFARKFAPSALKPLLKLAPKVLGF

SEQ ID NO: 35989 - protein, 381 aa, Arabidopsis thaliana
  peptide (1)..(381): Ceres Seq. ID no. 12327647
  misc_feature (149)..(260): Pfam Name: Arabidopsis protein of unknown function, DUF266 Pfam Description: Arabidopsis protein of unknown function, DUF266
  misc_feature (81)..(379): Homolog of NCBI NO: 34907318 NR Description: contains ESTs
  misc_feature (70)..(381): Homolog of NCBI NO: 15221386 NR Description: hypothetical protein; protein id: At1g68390.1
  misc_feature (72)..(381): Homolog of NCBI NO: 38344090 NR Description: OSJNBb0056F09.13 [Oryza sativa (japonica
  misc_feature (73)..(381): Homolog of NCBI NO: 15218485 NR Description: unknown protein; protein id: At1g10280.1
  misc_feature (1)..(379): Homolog of NCBI NO: 15239557 NR Description: putative protein; protein id: At5g25970.1
  misc_feature (1)..(381): Homolog of NCBI NO: 15239155 NR Description: putative protein
  misc_feature (1)..(381): Homolog of NCBI NO: 15218028 NR Description: hypothetical protein; protein id: At1g51770.1
  misc_feature (1)..(342): Homolog of NCBI NO: 9280235 NR Description: gb|AAD40142.1~gene_id:MXL8.19~strong similarity
  misc_feature (1)..(381): Homolog of NCBI NO: 21554566 NR Description: unknown [Arabidopsis thaliana]
  misc_feature (1)..(381): Homolog of NCBI NO: 18402952 NR Description: expressed protein
MEEGIKDNAASAPNSRPTNQLKALLPMRVLQVFLLFFVLVLGISVISMHMIKYLKIQTLAPSTLISTYDERITLESLIKPPLNGWHSMNDSELLWRASMEPRILDYPFKRVPKMAFMFLTKGPLPFAPLWERFFKGHEGFYSIYVHTLPNYRSDFPSSSVFYRRQIPSQHVAWGEMSMCDAERRLLANALLDISNEWFVLLSEACIPLRGFNFVYRYVSRSRYSFMGSVDEDGPYGRGRYSYAMGPEVSLNEWRKGSQWFEINRALAVDIVEDMVYYNKFKEFCRPPCYVDEHYFPTMLSIGYPDFLANRTLTWTDWSRGGAHPATFGKADITEKFIKKLSRGKACFYNDQPSQVCYLFARKFAPSALKPLLKLAPKVLGF

SEQ ID NO: 35990 - protein, 355 aa, Arabidopsis thaliana
  peptide (1)..(355): Ceres Seq. ID no. 12327648
  misc_feature (123)..(234): Pfam Name: Arabidopsis protein of unknown function, DUF266 Pfam Description: Arabidopsis protein of unknown function, DUF266
  misc_feature (55)..(353): Homolog of NCBI NO: 34907318 NR Description: contains ESTs
  misc_feature (44)..(355): Homolog of NCBI NO: 15221386 NR Description: hypothetical protein; protein id: At1g68390.1
  misc_feature (46)..(355): Homolog of NCBI NO: 38344090 NR Description: OSJNBb0056F09.13 [Oryza sativa (japonica
  misc_feature (47)..(355): Homolog of NCBI NO: 15218485 NR Description: unknown protein; protein id: At1g10280.1
  misc_feature (1)..(353): Homolog of NCBI NO: 15239557 NR Description: putative protein; protein id: At5g25970.1
  misc_feature (1)..(355): Homolog of NCBI NO: 15239155 NR Description: putative protein
  misc_feature (1)..(355): Homolog of NCBI NO: 15218028 NR Description: hypothetical protein; protein id: At1g51770.1
  misc_feature (1)..(316): Homolog of NCBI NO: 9280235 NR Description: gb|AAD40142.1~gene_id:MXL8.19~strong similarity
  misc_feature (1)..(355): Homolog of NCBI NO: 21554566 NR Description: unknown [Arabidopsis thaliana]
  misc_feature (1)..(355): Homolog of NCBI NO: 18402952 NR Description: expressed protein
MRVLQVFLLFFVLVLGISVISMHMIKYLKIQTLAPSTLISTYDERITLESLIKPPLNGWHSMNDSELLWRASMEPRILDYPFKRVPKMAFMFLTKGPLPFAPLWERFFKGHEGFYSIYVHTLPNYRSDFPSSSVFYRRQIPSQHVAWGEMSMCDAERRLLANALLDISNEWFVLLSEACIPLRGFNFVYRYVSRSRYSFMGSVDEDGPYGRGRYSYAMGPEVSLNEWRKGSQWFEINRALAVDIVEDMVYYNKFKEFCRPPCYVDEHYFPTMLSIGYPDFLANRTLTWTDWSRGGAHPATFGKADITEKFIKKLSRGKACFYNDQPSQVCYLFARKFAPSALKPLLKLAPKVLGF

SEQ ID NO: 35991 - DNA, 1420 bp, Arabidopsis thaliana
  misc_feature (1)..(1420): Ceres Seq. ID no. 12324182
  misc_feature: MA Experiment ID: 108434 Result: Up-regulated in Transcription
  misc_feature: MA Experiment 108434 PARAMETER Experiment Name: At_Root_Tips_cDNA_P Parameter: Tissue Value: Root Tips
  misc_feature: MA Experiment ID: 108462 Result: Down-regulated in Transcription
  misc_feature: MA Experiment 108462 PARAMETER Experiment Name: At_Germinating_Seeds_cDNA_P Parameter: Age (day) Value: 2 vs. 0
  misc_feature: MA Experiment 108462 PARAMETER Experiment Name: At_Germinating_Seeds_cDNA_P Parameter: Tissue Value: Germinating Seeds
  misc_feature: MA Experiment ID: 108463 Result: Down-regulated in Transcription
  misc_feature: MA Experiment 108463 PARAMETER Experiment Name: At_Germinating_Seeds_cDNA_P Parameter: Age (day) Value: 3 vs. 0
  misc_feature: MA Experiment 108463 PARAMETER Experiment Name: At_Germinating_Seeds_cDNA_P Parameter: Tissue Value: Germinating Seeds
  misc_feature: MA Experiment ID: 108464 Result: Down-regulated in Transcription
  misc_feature: MA Experiment 108464 PARAMETER Experiment Name: At_Germinating_Seeds_cDNA_P Parameter: Age (day) Value: 4 vs. 0
  misc_feature: MA Experiment 108464 PARAMETER Experiment Name: At_Germinating_Seeds_cDNA_P Parameter: Tissue Value: Germinating Seeds
  misc_feature: MA Experiment ID: 108488 Result: Up-regulated in Transcription
  misc_feature: MA Experiment ID: 108595 Result: Down-regulated in Transcription
  misc_feature: MA Experiment 108595 PARAMETER Experiment Name: At_Ler-pi_Ovule_cDNA_P Parameter: Plant Line Value: null
  misc_feature: MA Experiment ID: 20000069 Result: Down-regulated in Transcription
  misc_feature: MA Experiment 20000069 PARAMETER Experiment Name: At_100uM_ABA_Mutants_cDNA_P Parameter: Plant Line Value: CS23
  misc_feature: MA Experiment 20000069 PARAMETER Experiment Name: At_100uM_ABA_Mutants_cDNA_P Parameter: Timepoint (hr) Value: 6
  misc_feature: MA Experiment 20000069 PARAMETER Experiment Name: At_100uM_ABA_Mutants_cDNA_P Parameter: Tissue Value: Aerial
  misc_feature: MA Experiment 20000069 PARAMETER Experiment Name: At_100uM_ABA_Mutants_cDNA_P Parameter: Treatment Value: 100uM ABA vs. No Treatment
  misc_feature: MA Experiment ID: 20000072 Result: Down-regulated in Transcription
  misc_feature: MA Experiment 20000072 PARAMETER Experiment Name: At_100uM_ABA_Mutants_cDNA_P Parameter: Plant Line Value: CS8105
  misc_feature: MA Experiment 20000072 PARAMETER Experiment Name: At_100uM_ABA_Mutants_cDNA_P Parameter: Timepoint (hr) Value: 6
  misc_feature: MA Experiment 20000072 PARAMETER Experiment Name: At_100uM_ABA_Mutants_cDNA_P Parameter: Tissue Value: Aerial
  misc_feature: MA Experiment 20000072 PARAMETER Experiment Name: At_100uM_ABA_Mutants_cDNA_P Parameter: Treatment Value: 100uM ABA vs. No Treatment
  misc_feature: MA Experiment ID: 20000087 Result: Down-regulated in Transcription
  misc_feature: MA Experiment 20000087 PARAMETER Experiment Name: At_100uM_ABA_Mutants_cDNA_P Parameter: Plant Line Value: WS
  misc_feature: MA Experiment 20000087 PARAMETER Experiment Name: At_100uM_ABA_Mutants_cDNA_P Parameter: Timepoint (hr) Value: 6
  misc_feature: MA Experiment 20000087 PARAMETER Experiment Name: At_100uM_ABA_Mutants_cDNA_P Parameter: Tissue Value: Aerial
  misc_feature: MA Experiment 20000087 PARAMETER Experiment Name: At_100uM_ABA_Mutants_cDNA_P Parameter: Treatment Value: 100uM ABA vs. No Treatment
  misc_feature: MA Experiment ID: 20000794 Result: Down-regulated in Transcription
  misc_feature: MA Experiment 20000794 PARAMETER Experiment Name: At_Petals_P Parameter: Age (day) Value: 23-25 days
  misc_feature: MA Experiment 20000794 PARAMETER Experiment Name: At_Petals_P Parameter: Plant Line Value: WS
  misc_feature: MA Experiment 20000794 PARAMETER Experiment Name: At_Petals_P Parameter: Tissue Value: Petals vs. Whole plant
  misc_feature: MA Experiment ID: 20001558 Result: Up-regulated in Transcription
  misc_feature: MA Experiment 20001558 PARAMETER Experiment Name: At_Drought_Soil_Dry_P Parameter: Age (day) Value: 27
  misc_feature: MA Experiment 20001558 PARAMETER Experiment Name: At_Drought_Soil_Dry_P Parameter: Organism Value: A. thaliana
  misc_feature: MA Experiment 20001558 PARAMETER Experiment Name: At_Drought_Soil_Dry_P Parameter: Plant Line Value: WS
  misc_feature: MA Experiment 20001558 PARAMETER Experiment Name: At_Drought_Soil_Dry_P Parameter: Post Timepoint (hr) Value: 6
  misc_feature: MA Experiment 20001558 PARAMETER Experiment Name: At_Drought_Soil_Dry_P Parameter: Post-Treatment Value: Re-Water vs. No Drought
  misc_feature: MA Experiment 20001558 PARAMETER Experiment Name: At_Drought_Soil_Dry_P Parameter: Timepoint (day) Value: 13
  misc_feature: MA Experiment 20001558 PARAMETER Experiment Name: At_Drought_Soil_Dry_P Parameter: Treatment Value: Drought vs. No Drought
  misc_feature: MA Experiment ID: 20001905 Result: Down-regulated in Transcription
  misc_feature: MA Experiment 20001905 PARAMETER Experiment Name: At_Drought_Reproduction_P Parameter: Age (day) Value: 40
  misc_feature: MA Experiment 20001905 PARAMETER Experiment Name: At_Drought_Reproduction_P Parameter: Organism Value: A. thaliana
  misc_feature: MA Experiment 20001905 PARAMETER Experiment Name: At_Drought_Reproduction_P Parameter: Plant Line Value: WS
  misc_feature: MA Experiment 20001905 PARAMETER Experiment Name: At_Drought_Reproduction_P Parameter: Timepoint (day) Value: 10
  misc_feature: MA Experiment 20001905 PARAMETER Experiment Name: At_Drought_Reproduction_P Parameter: Tissue Value: Rosettes
  misc_feature: MA Experiment 20001905 PARAMETER Experiment Name: At_Drought_Reproduction_P Parameter: Treatment Value: Drought vs. No Drought
accagagccaccttcattcacttcacaaaccgctcggcgacaaagacgaagaagccgaggaagcaccgatacgacgattgagacttagttttgctcagattcatttaaccaccggcgccaagtgacgacgacgacggagggagcagattcgaattgtgtgaagacagcaatggagtctactgagtcatatgcggcaggttcaccggaagagctggctaagagatcccctgaaccgcatgattcttccgaagctgattctgctgagaagccaacacacattcggtttcttgtatccaatgcggcagctggttccgtcattgggaaaggtggctcgaccatcactgaatttcaggcaaagtctggggcaaggattcagctttcacgtaatcaagagtttttcccggggacgactgacagaattattatgatatcgggatcaatcaaagaagttgtcaatggactggaacttatccttgataaattgcacagtgagcttcatgctgaagatggtaatgaggttgagcctaggagaagaattagacttgtggttcctaacagttcttgtggaggtataatcggaaaaggaggggccaccatcaagtcattcattgaggaatctaaagctggtattaagatatcccctctggataataccttttatgggttgagcgataggttagtgacattatctgggaccttcgaggagcagatgcgggcaatcgatttgattttggctaagcttactgaggacgatcattactcccagaatgtgcattccccatattcatatgcagcgggatacaattcggttaactacgcacccaacggttctggaggcaagtatcaaaaccacaaggaagaagctagtaccacggtgacaattggtgttgcggatgagcatataggattggtgcttggacgtggaggaagaaacatcatggaaatcactcagatgactggtgcccgaattaaaatatcagaccgaggtgattttatgtctggaaccactgataggaaagtgagtatcacagggccacagagagcaatccaacaagctgagacaatgataaaacagaaagttgattcagccacagagagaaccaccgattgaaaccgttaagagaatccatctcggttcctatctttggtctgttgacttcatttgtggaggcttaagctatcggatggggatcattaatcatctttgagtgaggcagagatttctctctaggagctctctttcgttttatttatatgtcgacattatataatgtgtttttctctgggagagaagcagatttggagttagagaagtactattttcatttgttcttttaataactttgttgcaatttgttgaagttttgtttcccttgagttctttctgttgtaacaatttacaataaccagccattacatt

SEQ ID NO: 35992 - protein, 313 aa, Arabidopsis thaliana
  peptide (1)..(313): Ceres Seq. ID no. 12324183
  misc_feature (124)..(175): Pfam Name: KH domain Pfam Description: KH domain
  misc_feature (238)..(310): Homolog of NCBI NO: 19527741 NR Description: AT03366p [Drosophila melanogaster]
  misc_feature (3)..(256): Homolog of NCBI NO: 19527741 NR Description: AT03366p [Drosophila melanogaster]
  misc_feature (238)..(310): Homolog of NCBI NO: 24645364 NR Description: pasilla CG8144-PA [Drosophila melanogaster]
  misc_feature (1)..(256): Homolog of NCBI NO: 24645364 NR Description: pasilla CG8144-PA [Drosophila melanogaster]
  misc_feature (27)..(110): Homolog of NCBI NO: 542190 NR Description: hypothetical protein 1087 - maize
  misc_feature (115)..(208): Homolog of NCBI NO: 542190 NR Description: hypothetical protein 1087 - maize
  misc_feature (204)..(310): Homolog of NCBI NO: 542190 NR Description: hypothetical protein 1087 - maize
  misc_feature (204)..(313): Homolog of NCBI NO: 30680512 NR Description: KH domain protein Nova, putative [Arabidopsis
  misc_feature (1)..(218): Homolog of NCBI NO: 30680512 NR Description: KH domain protein Nova, putative [Arabidopsis
  misc_feature (1)..(313): Homolog of NCBI NO: 15237716 NR Description: KH domain protein Nova, putative
MESTESYAAGSPEELAKRSPEPHDSSEADSAEKPTHIRFLVSNAAAGSVIGKGGSTITEFQAKSGARIQLSRNQEFFPGTTDRIIMISGSIKEVVNGLELILDKLHSELHAEDGNEVEPRRRIRLVVPNSSCGGIIGKGGATIKSFIEESKAGIKISPLDNTFYGLSDRLVTLSGTFEEQMRAIDLILAKLTEDDHYSQNVHSPYSYAAGYNSVNYAPNGSGGKYQNHKEEASTTVTIGVADEHIGLVLGRGGRNIMEITQMTGARIKISDRGDFMSGTTDRKVSITGPQRAIQQAETMIKQKVDSATERTTD

SEQ ID NO: 35993 - protein, 228 aa, Arabidopsis thaliana
  peptide (1)..(228): Ceres Seq. ID no. 12324184
  misc_feature (39)..(90): Pfam Name: KH domain Pfam Description: KH domain
  misc_feature (153)..(225): Homolog of NCBI NO: 19527741 NR Description: AT03366p [Drosophila melanogaster]
  misc_feature (1)..(171): Homolog of NCBI NO: 19527741 NR Description: AT03366p [Drosophila melanogaster]
  misc_feature (153)..(225): Homolog of NCBI NO: 24645364 NR Description: pasilla CG8144-PA [Drosophila melanogaster]
  misc_feature (1)..(171): Homolog of NCBI NO: 24645364 NR Description: pasilla CG8144-PA [Drosophila melanogaster]
  misc_feature (1)..(25): Homolog of NCBI NO: 542190 NR Description: hypothetical protein 1087 - maize
  misc_feature (30)..(123): Homolog of NCBI NO: 542190 NR Description: hypothetical protein 1087 - maize
  misc_feature (119)..(225): Homolog of NCBI NO: 542190 NR Description: hypothetical protein 1087 - maize
  misc_feature (119)..(228): Homolog of NCBI NO: 30680512 NR Description: KH domain protein Nova, putative [Arabidopsis
  misc_feature (1)..(133): Homolog of NCBI NO: 30680512 NR Description: KH domain protein Nova, putative [Arabidopsis
  misc_feature (1)..(228): Homolog of NCBI NO: 15237716 NR Description: KH domain protein Nova, putative
MISGSIKEVVNGLELILDKLHSELHAEDGNEVEPRRRIRLVVPNSSCGGIIGKGGATIKSFIEESKAGIKISPLDNTFYGLSDRLVTLSGTFEEQMRAIDLILAKLTEDDHYSQNVHSPYSYAAGYNSVNYAPNGSGGKYQNHKEEASTTVTIGVADEHIGLVLGRGGRNIMEITQMTGARIKISDRGDFMSGTTDRKVSITGPQRAIQQAETMIKQKVDSATERTTD

SEQ ID NO: 35994 - DNA, 2020 bp, Arabidopsis thaliana
  misc_feature (1)..(2020): Ceres Seq. ID no. 13497076
  misc_feature: MA Experiment ID: 108434 Result: Up-regulated in Transcription
  misc_feature: MA Experiment 108434 PARAMETER Experiment Name: At_Root_Tips_cDNA_P Parameter: Tissue Value: Root Tips
  misc_feature: MA Experiment ID: 108462 Result: Down-regulated in Transcription
  misc_feature: MA Experiment 108462 PARAMETER Experiment Name: At_Germinating_Seeds_cDNA_P Parameter: Age (day) Value: 2 vs. 0
  misc_feature: MA Experiment 108462 PARAMETER Experiment Name: At_Germinating_Seeds_cDNA_P Parameter: Tissue Value: Germinating Seeds
  misc_feature: MA Experiment ID: 108463 Result: Down-regulated in Transcription
  misc_feature: MA Experiment 108463 PARAMETER Experiment Name: At_Germinating_Seeds_cDNA_P Parameter: Age (day) Value: 3 vs. 0
  misc_feature: MA Experiment 108463 PARAMETER Experiment Name: At_Germinating_Seeds_cDNA_P Parameter: Tissue Value: Germinating Seeds
  misc_feature: MA Experiment ID: 108464 Result: Down-regulated in Transcription
  misc_feature: MA Experiment 108464 PARAMETER Experiment Name: At_Germinating_Seeds_cDNA_P Parameter: Age (day) Value: 4 vs. 0
  misc_feature: MA Experiment 108464 PARAMETER Experiment Name: At_Germinating_Seeds_cDNA_P Parameter: Tissue Value: Germinating Seeds
  misc_feature: MA Experiment ID: 108488 Result: Up-regulated in Transcription
  misc_feature: MA Experiment ID: 108605 Result: Down-regulated in Transcription
  misc_feature: MA Experiment 108605 PARAMETER Experiment Name: At_100uM_ABA_cDNA_P Parameter: Timepoint (hr) Value: 6
  misc_feature: MA Experiment 108605 PARAMETER Experiment Name: At_100uM_ABA_cDNA_P Parameter: Tissue Value: Aerial
  misc_feature: MA Experiment 108605 PARAMETER Experiment Name: At_100uM_ABA_cDNA_P Parameter: Treatment Value: 100uM ABA vs. No Treatment
  misc_feature: MA Experiment ID: 108607 Result: Down-regulated in Transcription
  misc_feature: MA Experiment 108607 PARAMETER Experiment Name: At_100uM_ABA_cDNA_P Parameter: Timepoint (hr) Value: 4
  misc_feature: MA Experiment 108607 PARAMETER Experiment Name: At_100uM_ABA_cDNA_P Parameter: Tissue Value: Aerial
  misc_feature: MA Experiment 108607 PARAMETER Experiment Name: At_100uM_ABA_cDNA_P Parameter: Treatment Value: 100uM ABA vs. No Treatment
  misc_feature: MA Experiment ID: 108609 Result: Down-regulated in Transcription
  misc_feature: MA Experiment 108609 PARAMETER Experiment Name: At_100uM_ABA_cDNA_P Parameter: Timepoint (hr) Value: 24
  misc_feature: MA Experiment 108609 PARAMETER Experiment Name: At_100uM_ABA_cDNA_P Parameter: Tissue Value: Aerial
  misc_feature: MA Experiment 108609 PARAMETER Experiment Name: At_100uM_ABA_cDNA_P Parameter: Treatment Value: 100uM ABA vs. No Treatment
  misc_feature: MA Experiment ID: 20000069 Result: Down-regulated in Transcription
  misc_feature: MA Experiment 20000069 PARAMETER Experiment Name: At_100uM_ABA_Mutants_cDNA_P Parameter: Plant Line Value: CS23
  misc_feature: MA Experiment 20000069 PARAMETER Experiment Name: At_100uM_ABA_Mutants_cDNA_P Parameter: Timepoint (hr) Value: 6
  misc_feature: MA Experiment 20000069 PARAMETER Experiment Name: At_100uM_ABA_Mutants_cDNA_P Parameter: Tissue Value: Aerial
  misc_feature: MA Experiment 20000069 PARAMETER Experiment Name: At_100uM_ABA_Mutants_cDNA_P Parameter: Treatment Value: 100uM ABA vs. No Treatment
  misc_feature: MA Experiment ID: 20000070 Result: Down-regulated in Transcription
  misc_feature: MA Experiment 20000070 PARAMETER Experiment Name: At_100uM_ABA_Mutants_cDNA_P Parameter: Plant Line Value: CS24
  misc_feature: MA Experiment 20000070 PARAMETER Experiment Name: At_100uM_ABA_Mutants_cDNA_P Parameter: Timepoint (hr) Value: 6
  misc_feature: MA Experiment 20000070 PARAMETER Experiment Name: At_100uM_ABA_Mutants_cDNA_P Parameter: Tissue Value: Aerial
  misc_feature: MA Experiment 20000070 PARAMETER Experiment Name: At_100uM_ABA_Mutants_cDNA_P Parameter: Treatment Value: 100uM ABA vs. No Treatment
  misc_feature: MA Experiment ID: 20000071 Result: Down-regulated in Transcription
  misc_feature: MA Experiment 20000071 PARAMETER Experiment Name: At_100uM_ABA_Mutants_cDNA_P Parameter: Plant Line Value: CS8104
  misc_feature: MA Experiment 20000071 PARAMETER Experiment Name: At_100uM_ABA_Mutants_cDNA_P Parameter: Timepoint (hr) Value: 6
  misc_feature: MA Experiment 20000071 PARAMETER Experiment Name: At_100uM_ABA_Mutants_cDNA_P Parameter: Tissue Value: Aerial
  misc_feature: MA Experiment 20000071 PARAMETER Experiment Name: At_100uM_ABA_Mutants_cDNA_P Parameter: Treatment Value: 100uM ABA vs. No Treatment
  misc_feature: MA Experiment ID: 20000072 Result: Down-regulated in Transcription
  misc_feature: MA Experiment 20000072 PARAMETER Experiment Name: At_100uM_ABA_Mutants_cDNA_P Parameter: Plant Line Value: CS8105
  misc_feature: MA Experiment 20000072 PARAMETER Experiment Name: At_100uM_ABA_Mutants_cDNA_P Parameter: Timepoint (hr) Value: 6
  misc_feature: MA Experiment 20000072 PARAMETER Experiment Name: At_100uM_ABA_Mutants_cDNA_P Parameter: Tissue Value: Aerial
  misc_feature: MA Experiment 20000072 PARAMETER Experiment Name: At_100uM_ABA_Mutants_cDNA_P Parameter: Treatment Value: 100uM ABA vs. No Treatment
  misc_feature: MA Experiment ID: 20000086 Result: Down-regulated in Transcription
  misc_feature: MA Experiment 20000086 PARAMETER Experiment Name: At_100uM_ABA_Mutants_cDNA_P Parameter: Plant Line Value: CS22
  misc_feature: MA Experiment 20000086 PARAMETER Experiment Name: At_100uM_ABA_Mutants_cDNA_P Parameter: Timepoint (hr) Value: 6
  misc_feature: MA Experiment 20000086 PARAMETER Experiment Name: At_100uM_ABA_Mutants_cDNA_P Parameter: Tissue Value: Aerial
  misc_feature: MA Experiment 20000086 PARAMETER Experiment Name: At_100uM_ABA_Mutants_cDNA_P Parameter: Treatment Value: 100uM ABA vs. No Treatment
  misc_feature: MA Experiment ID: 20000087 Result: Down-regulated in Transcription
  misc_feature: MA Experiment 20000087 PARAMETER Experiment Name: At_100uM_ABA_Mutants_cDNA_P Parameter: Plant Line Value: WS
  misc_feature: MA Experiment 20000087 PARAMETER Experiment Name: At_100uM_ABA_Mutants_cDNA_P Parameter: Timepoint (hr) Value: 6
  misc_feature: MA Experiment 20000087 PARAMETER Experiment Name: At_100uM_ABA_Mutants_cDNA_P Parameter: Tissue Value: Aerial
  misc_feature: MA Experiment 20000087 PARAMETER Experiment Name: At_100uM_ABA_Mutants_cDNA_P Parameter: Treatment Value: 100uM ABA vs. No Treatment
  misc_feature: MA Experiment ID: 20000093 Result: Up-regulated in Transcription
  misc_feature: MA Experiment 20000093 PARAMETER Experiment Name: At_42deg_Heat_cDNA_P Parameter: Temperature (deg C) Value: 42 vs. 22
  misc_feature: MA Experiment 20000093 PARAMETER Experiment Name: At_42deg_Heat_cDNA_P Parameter: Timepoint (hr) Value: 0.5
  misc_feature: MA Experiment 20000093 PARAMETER Experiment Name: At_42deg_Heat_cDNA_P Parameter: Tissue Value: Aerial
  misc_feature: MA Experiment ID: 20000111 Result: Up-regulated in Transcription
  misc_feature: MA Experiment 20000111 PARAMETER Experiment Name: At_42deg_Heat_cDNA_P Parameter: Temperature (deg C) Value: 42 vs. 22
  misc_feature: MA Experiment 20000111 PARAMETER Experiment Name: At_42deg_Heat_cDNA_P Parameter: Timepoint (hr) Value: 6
  misc_feature: MA Experiment 20000111 PARAMETER Experiment Name: At_42deg_Heat_cDNA_P Parameter: Tissue Value: Aerial
  misc_feature: MA Experiment ID: 20000112 Result: Up-regulated in Transcription
  misc_feature: MA Experiment 20000112 PARAMETER Experiment Name: At_42deg_Heat_cDNA_P Parameter: Temperature (deg C) Value: 42 vs. 22
  misc_feature: MA Experiment 20000112 PARAMETER Experiment Name: At_42deg_Heat_cDNA_P Parameter: Timepoint (hr) Value: 2
  misc_feature: MA Experiment 20000112 PARAMETER Experiment Name: At_42deg_Heat_cDNA_P Parameter: Tissue Value: Aerial
  misc_feature: MA Experiment ID: 20000113 Result: Up-regulated in Transcription
  misc_feature: MA Experiment 20000113 PARAMETER Experiment Name: At_42deg_Heat_cDNA_P Parameter: Temperature (deg C) Value: 42 vs. 22
  misc_feature: MA Experiment 20000113 PARAMETER Experiment Name: At_42deg_Heat_cDNA_P Parameter: Timepoint (hr) Value: 8
  misc_feature: MA Experiment 20000113 PARAMETER Experiment Name: At_42deg_Heat_cDNA_P Parameter: Tissue Value: Aerial
  misc_feature: MA Experiment ID: 20000117 Result: Down-regulated in Transcription
  misc_feature: MA Experiment 20000117 PARAMETER Experiment Name: At_100uM_ABA_Mutants_cDNA_P Parameter: Plant Line Value: Columbia
  misc_feature: MA Experiment 20000117 PARAMETER Experiment Name: At_100uM_ABA_Mutants_cDNA_P Parameter: Timepoint (hr) Value: 6
  misc_feature: MA Experiment 20000117 PARAMETER Experiment Name: At_100uM_ABA_Mutants_cDNA_P Parameter: Tissue Value: Aerial
  misc_feature: MA Experiment 20000117 PARAMETER Experiment Name: At_100uM_ABA_Mutants_cDNA_P Parameter: Treatment Value: 100uM ABA vs. No Treatment
  misc_feature: MA Experiment ID: 20000144 Result: Up-regulated in Transcription
  misc_feature: MA Experiment 20000144 PARAMETER Experiment Name: At_42deg_Heat_cDNA_P Parameter: Temperature (deg C) Value: 42 vs. 22
  misc_feature: MA Experiment 20000144 PARAMETER Experiment Name: At_42deg_Heat_cDNA_P Parameter: Timepoint (hr) Value: 1
  misc_feature: MA Experiment 20000144 PARAMETER Experiment Name: At_42deg_Heat_cDNA_P Parameter: Tissue Value: Aerial
  misc_feature: MA Experiment ID: 20000315 Result: Up-regulated in Transcription
  misc_feature: MA Experiment 20000315 PARAMETER Experiment Name: At_14day_Shoots-Roots_Sub_P Parameter: Age (day) Value: 14
  misc_feature: MA Experiment 20000315 PARAMETER Experiment Name: At_14day_Shoots-Roots_Sub_P Parameter: Organism Value: A. thaliana
  misc_feature: MA Experiment 20000315 PARAMETER Experiment Name: At_14day_Shoots-Roots_Sub_P Parameter: Plant Line Value: WS
  misc_feature: MA Experiment 20000315 PARAMETER Experiment Name: At_14day_Shoots-Roots_Sub_P Parameter: Tissue Value: Shoots vs. Whole Plant
  misc_feature: MA Experiment ID: 20000327 Result: Up-regulated in Transcription
  misc_feature: MA Experiment 20000327 PARAMETER Experiment Name: At_42deg_Heat_Sub_P Parameter: Age (day) Value: 14
  misc_feature: MA Experiment 20000327 PARAMETER Experiment Name: At_42deg_Heat_Sub_P Parameter: Organism Value: A. thaliana
  misc_feature: MA Experiment 20000327 PARAMETER Experiment Name: At_42deg_Heat_Sub_P Parameter: Plant Line Value: WS
  misc_feature: MA Experiment 20000327 PARAMETER Experiment Name: At_42deg_Heat_Sub_P Parameter: Temperature (deg C) Value: 42 vs. 22
  misc_feature: MA Experiment 20000327 PARAMETER Experiment Name: At_42deg_Heat_Sub_P Parameter: Timepoint (hr) Value: 1
  misc_feature: MA Experiment 20000327 PARAMETER Experiment Name: At_42deg_Heat_Sub_P Parameter: Tissue Value: Aerial
  misc_feature: MA Experiment ID: 20000328 Result: Up-regulated in Transcription
  misc_feature: MA Experiment 20000328 PARAMETER Experiment Name: At_42deg_Heat_Sub_P Parameter: Age (day) Value: 14
  misc_feature: MA Experiment 20000328 PARAMETER Experiment Name: At_42deg_Heat_Sub_P Parameter: Organism Value: A. thaliana
  misc_feature: MA Experiment 20000328 PARAMETER Experiment Name: At_42deg_Heat_Sub_P Parameter: Plant Line Value: WS
  misc_feature: MA Experiment 20000328 PARAMETER Experiment Name: At_42deg_Heat_Sub_P Parameter: Temperature (deg C) Value: 42 vs. 22
  misc_feature: MA Experiment 20000328 PARAMETER Experiment Name: At_42deg_Heat_Sub_P Parameter: Timepoint (hr) Value: 6
  misc_feature: MA Experiment 20000328 PARAMETER Experiment Name: At_42deg_Heat_Sub_P Parameter: Tissue Value: Aerial
  misc_feature: MA Experiment ID: 20000347 Result: Down-regulated in Transcription
  misc_feature: MA Experiment 20000347 PARAMETER Experiment Name: At_2mM_SA_Sub_P Parameter: Age (day) Value: 14
  misc_feature: MA Experiment 20000347 PARAMETER Experiment Name: At_2mM_SA_Sub_P Parameter: Organism Value: A. thaliana
  misc_feature: MA Experiment 20000347 PARAMETER Experiment Name: At_2mM_SA_Sub_P Parameter: Plant Line Value: WS
  misc_feature: MA Experiment 20000347 PARAMETER Experiment Name: At_2mM_SA_Sub_P Parameter: Timepoint (hr) Value: 6
  misc_feature: MA Experiment 20000347 PARAMETER Experiment Name: At_2mM_SA_Sub_P Parameter: Tissue Value: Aerial
  misc_feature: MA Experiment 20000347 PARAMETER Experiment Name: At_2mM_SA_Sub_P Parameter: Treatment Value: 2mM SA vs. No Treatment
  misc_feature: MA Experiment ID: 20000349 Result: Down-regulated in Transcription
  misc_feature: MA Experiment 20000349 PARAMETER Experiment Name: At_100uM_ABA_Sub_P Parameter: Age (day) Value: 14
  misc_feature: MA Experiment 20000349 PARAMETER Experiment Name: At_100uM_ABA_Sub_P Parameter: Organism Value: A. thaliana
  misc_feature: MA Experiment 20000349 PARAMETER Experiment Name: At_100uM_ABA_Sub_P Parameter: Plant Line Value: WS
  misc_feature: MA Experiment 20000349 PARAMETER Experiment Name: At_100uM_ABA_Sub_P Parameter: Timepoint (hr) Value: 6
  misc_feature: MA Experiment 20000349 PARAMETER Experiment Name: At_100uM_ABA_Sub_P Parameter: Tissue Value: Aerial
  misc_feature: MA Experiment 20000349 PARAMETER Experiment Name: At_100uM_ABA_Sub_P Parameter: Treatment Value: 100uM ABA vs. No Treatment
  misc_feature: MA Experiment ID: 20000355 Result: Up-regulated in Transcription
  misc_feature: MA Experiment 20000355 PARAMETER Experiment Name: At_Siliques_Sub_P Parameter: Age (day) Value: 21
  misc_feature: MA Experiment 20000355 PARAMETER Experiment Name: At_Siliques_Sub_P Parameter: Organism Value: A. thaliana
  misc_feature: MA Experiment 20000355 PARAMETER Experiment Name: At_Siliques_Sub_P Parameter: Plant Line Value: WS
  misc_feature: MA Experiment 20000355 PARAMETER Experiment Name: At_Siliques_Sub_P Parameter: Tissue Value: Less Than 5mm Siliques vs. Whole Plant
  misc_feature: MA Experiment ID: 20001807 Result: Up-regulated in Transcription
  misc_feature: MA Experiment 20001807 PARAMETER Experiment Name: At_50mM_NH4NO3_L-to-H_Sub_P Parameter: Timepoint (hr) Value: 6
  misc_feature: MA Experiment 20001807 PARAMETER Experiment Name: At_50mM_NH4NO3_L-to-H_Sub_P Parameter: Tissue Value: Leaf
  misc_feature: MA Experiment 20001807 PARAMETER Experiment Name: At_50mM_NH4NO3_L-to-H_Sub_P Parameter: Treatment Value: 50mM NH4NO3 vs 100mM Mannitol
acactattcgtttacactaaccacttccttatccacaccaatccagaacgttcctcaaaaagctccctccttttctctcaaaatggcgtctgcaaacgctctctcttccgcctccgtcctctgttcttcccgtcagagtaagttgggaggaggaaatcagcagcaaggtcagagagttagctacaacaagaggacaatcagacgttttagtgttagagctaatgtaaaggaaatagcttttgaccagcactctagagctgctctacaagctggtattgataagcttgctgattgtgttggtctcactcttggccctagagggaggaatgttgtgttggatgaatttggaagtcctaaggttgtgaatgatggagtcaccattgctagagctattgagttacctaatgccatggaaaatgctggtgcagcgcttattcgtgaggttgcgagtaagactaatgactctgctggtgatgggacaaccactgcgtctatccttgctcgggagataatcaaacatggattgttgagcgtcacttctggtgcgaatcccgtttcactcaagaggggaattgataagactgttcaaggtctgatcgaagagcttcagaagaaagctaggcccgtgaaaggtcgtgatgacatcagagctgtggcttctatctctgctggaaatgatgaccttatagggtcaatgattgctgatgccatcgacaaagttggacctgatggtgttttgtccattgaatcttcatcttcttttgagaccacggtcgaagttgaagaagggatggagattgacagaggttacatctcgcctcagtttgttacaaaccctgagaaactactagctgagtttgagaatgctagggtattgatcactgatcagaagatcactgcgatcaaagacatcatccctattttggagaagaccactcagcttcgtgctccgttgttgattattgcagaggatgttactggtgaagccttagctacccttgtcgtgaacaagcttcgtggtgtcctcaatgttgttgccgttaaagcgccaggatttggagaaagaagaaaagccatgcttcaagatattgcaatcttgacaggagctgagtacctagccatggacatgagcttactggttgaaaacgcaaccatagatcaattgggtattgcccgaaaagtcacgattagcaaagattcgactaccctcattgcagatgcagcttccaaggacgaattacaagctcggattgctcagctgaagaaagaactattcgagactgattctgtgtatgactcagagaagctcgctgagagaattgcgaagctatctggaggtgttgctgtcattaaagtcggagcagcaactgaaactgagcttgaggaccgtaagcttcgtatcgaggatgcaaagaacgcaacatttgctgctatcgaggaaggcatagttccaggtggtggtgctgctttggtgcatctctccactgttattcccgccattaaggagacttttgaggatgctgatgaacgtttgggagctgacatagtacaaaaggcattgctgtcaccagctgctcttattgctcagaacgctggagttgaaggagaagttgttgtggaaaagattatgttcagcgattgggagaatgggtacaacgcaatgactgatacatatgagaatctgttcgaagctggagtgattgatccggctaaagtgacaagatgtgcgctacagaacgctgcttccgtagcaggaatggtactgaccactcaggccattgttgttgacaaaccgaaacccaaggctcctgctgctgctgctcctgagggtctcatggtgtaatcaaaacacaacatcttatcatcacaatggcatctttgtctttttgcacatttgtcatccccatttatctgcaatgtttttcttttttgggggaatatgagtagtttgttaacagtatcgagaaataattatcatcttttttgtccaatggaaattgcagaaaatggttatgtatga

SEQ ID NO: 35995 - protein, 613 aa, Arabidopsis thaliana
  peptide (1)..(613): Ceres Seq. ID no. 13497077
  misc_feature (95)..(598): Pfam Name: TCP-1/cpn60 chaperonin family Pfam Description: TCP-1/cpn60 chaperonin family
  misc_feature (85)..(579): Homolog of NCBI NO: 134101 NR Description: RUBISCO SUBUNIT BINDING-PROTEIN ALPHA SUBUNIT (60
  misc_feature (85)..(580): Homolog of NCBI NO: 5650721 NR Description: rubisco subunit binding-protein alpha subunit (
  misc_feature (73)..(610): Homolog of NCBI NO: 134102 NR Description: RuBisCO subunit binding-protein alpha subunit,
  misc_feature (28)..(613): Homolog of NCBI NO: 3790441 NR Description: chaperonin 60 alpha subunit [Canavalia lineata]
  misc_feature (28)..(613): Homolog of NCBI NO: 1710807 NR Description: RuBisCO subunit binding-protein alpha subunit,
  misc_feature (67)..(613): Homolog of NCBI NO: 99801 NR Description: chaperonine 60K alpha chain - rape (fragment)
  misc_feature (68)..(613): Homolog of NCBI NO: 1351030 NR Description: RuBisCO subunit binding-protein alpha subunit,
  misc_feature (28)..(613): Homolog of NCBI NO: 464727 NR Description: RuBisCO subunit binding-protein alpha subunit,
  misc_feature (28)..(613): Homolog of NCBI NO: 21554572 NR Description: putative rubisco subunit binding-protein alpha
  misc_feature (28)..(613): Homolog of NCBI NO: 15226314 NR Description: RuBisCO subunit binding-protein alpha subunit/60
HYSFTLTTSLSTPIQNVPQKAPSFSLKMASANALSSASVLCSSRQSKLGGGNQQQGQRVSYNKRTIRRFSVRANVKEIAFDQHSRAALQAGIDKLADCVGLTLGPRGRNVVLDEFGSPKVVNDGVTIARAIELPNAMENAGAALIREVASKTNDSAGDGTTTASILAREIIKHGLLSVTSGANPVSLKRGIDKTVQGLIEELQKKARPVKGRDDIRAVASISAGNDDLIGSMIADAIDKVGPDGVLSIESSSSFETTVEVEEGMEIDRGYISPQFVTNPEKLLAEFENARVLITDQKITAIKDIIPILEKTTQLRAPLLIIAEDVTGEALATLVVNKLRGVLNVVAVKAPGFGERRKAMLQDIAILTGAEYLAMDMSLLVENATIDQLGIARKVTISKDSTTLIADAASKDELQARIAQLKKELFETDSVYDSEKLAERIAKLSGGVAVIKVGAATETELEDRKLRIEDAKNATFAAIEEGIVPGGGAALVHLSTVIPAIKETFEDADERLGADIVQKALLSPAALIAQNAGVEGEVVVEKIMFSDWENGYNAMTDTYENLFEAGVIDPAKVTRCALQNAASVAGMVLTTQAIVVDKPKPKAPAAAAPEGLMV

SEQ ID NO: 35996 - protein, 586 aa, Arabidopsis thaliana; identical to SEQ ID NO: 22383
  peptide (1)..(586): Ceres Seq. ID no. 13497078
  misc_feature (68)..(571): Pfam Name: TCP-1/cpn60 chaperonin family Pfam Description: TCP-1/cpn60 chaperonin family
  misc_feature (58)..(552): Homolog of NCBI NO: 134101 NR Description: RUBISCO SUBUNIT BINDING-PROTEIN ALPHA SUBUNIT (60
  misc_feature (58)..(553): Homolog of NCBI NO: 5650721 NR Description: rubisco subunit binding-protein alpha subunit (
  misc_feature (46)..(583): Homolog of NCBI NO: 134102 NR Description: RuBisCO subunit binding-protein alpha subunit,
  misc_feature (1)..(586): Homolog of NCBI NO: 3790441 NR Description: chaperonin 60 alpha subunit [Canavalia lineata]
  misc_feature (1)..(586): Homolog of NCBI NO: 1710807 NR Description: RuBisCO subunit binding-protein alpha subunit,
  misc_feature (40)..(586): Homolog of NCBI NO: 99801 NR Description: chaperonine 60K alpha chain - rape (fragment)
  misc_feature (41)..(586): Homolog of NCBI NO: 1351030 NR Description: RuBisCO subunit binding-protein alpha subunit,
  misc_feature (1)..(586): Homolog of NCBI NO: 464727 NR Description: RuBisCO subunit binding-protein alpha subunit,
  misc_feature (1)..(586): Homolog of NCBI NO: 21554572 NR Description: putative rubisco subunit binding-protein alpha
  misc_feature (1)..(586): Homolog of NCBI NO: 15226314 NR Description: RuBisCO subunit binding-protein alpha subunit/60

SEQ ID NO: 35997 - protein, 477 aa, Arabidopsis thaliana; identical to SEQ ID NO: 22384
  peptide (1)..(477): Ceres Seq. ID no. 13497079
  misc_feature (1)..(462): Pfam Name: TCP-1/cpn60 chaperonin family Pfam Description: TCP-1/cpn60 chaperonin family
  misc_feature (1)..(443): Homolog of NCBI NO: 134101 NR Description: RUBISCO SUBUNIT BINDING-PROTEIN ALPHA SUBUNIT (60
  misc_feature (1)..(444): Homolog of NCBI NO: 5650721 NR Description: rubisco subunit binding-protein alpha subunit (
  misc_feature (1)..(474): Homolog of NCBI NO: 134102 NR Description: RuBisCO subunit binding-protein alpha subunit,
  misc_feature (1)..(477): Homolog of NCBI NO: 3790441 NR Description: chaperonin 60 alpha subunit [Canavalia lineata]
  misc_feature (1)..(477): Homolog of NCBI NO: 1710807 NR Description: RuBisCO subunit binding-protein alpha subunit,
  misc_feature (1)..(477): Homolog of NCBI NO: 99801 NR Description: chaperonine 60K alpha chain - rape (fragment)
  misc_feature (1)..(477): Homolog of NCBI NO: 1351030 NR Description: RuBisCO subunit binding-protein alpha subunit,
  misc_feature (1)..(477): Homolog of NCBI NO: 464727 NR Description: RuBisCO subunit binding-protein alpha subunit,
  misc_feature (1)..(477): Homolog of NCBI NO: 21554572 NR Description: putative rubisco subunit binding-protein alpha
  misc_feature (1)..(477): Homolog of NCBI NO: 15226314 NR Description: RuBisCO subunit binding-protein alpha subunit/60

SEQ ID NO: 35998 - DNA, 1416 bp, Arabidopsis thaliana
  misc_feature (1)..(1416): Ceres Seq. ID no. 12602627
  misc_feature: MA Experiment ID: 20000307 Result: Up-regulated in Transcription
  misc_feature: MA Experiment 20000307 PARAMETER Experiment Name: At_Germinating_Seeds_Sub_P Parameter: Age (hr) Value: 24 vs. 0
  misc_feature: MA Experiment 20000307 PARAMETER Experiment Name: At_Germinating_Seeds_Sub_P Parameter: Organism Value: A. thaliana
  misc_feature: MA Experiment 20000307 PARAMETER Experiment Name: At_Germinating_Seeds_Sub_P Parameter: Plant Line Value: WS
  misc_feature: MA Experiment 20000307 PARAMETER Experiment Name: At_Germinating_Seeds_Sub_P Parameter: Tissue Value: Germinating Seeds
  misc_feature: MA Experiment ID: 20000314 Result: Down-regulated in Transcription
  misc_feature: MA Experiment 20000314 PARAMETER Experiment Name: At_14day_Shoots-Roots_Sub_P Parameter: Age (day) Value: 14
  misc_feature: MA Experiment 20000314 PARAMETER Experiment Name: At_14day_Shoots-Roots_Sub_P Parameter: Organism Value: A. thaliana
  misc_feature: MA Experiment 20000314 PARAMETER Experiment Name: At_14day_Shoots-Roots_Sub_P Parameter: Plant Line Value: WS
  misc_feature: MA Experiment 20000314 PARAMETER Experiment Name: At_14day_Shoots-Roots_Sub_P Parameter: Tissue Value: Roots vs. Whole Plant
  misc_feature: MA Experiment ID: 20000315 Result: Down-regulated in Transcription
  misc_feature: MA Experiment 20000315 PARAMETER Experiment Name: At_14day_Shoots-Roots_Sub_P Parameter: Age (day) Value: 14
  misc_feature: MA Experiment 20000315 PARAMETER Experiment Name: At_14day_Shoots-Roots_Sub_P Parameter: Organism Value: A. thaliana
  misc_feature: MA Experiment 20000315 PARAMETER Experiment Name: At_14day_Shoots-Roots_Sub_P Parameter: Plant Line Value: WS
  misc_feature: MA Experiment 20000315 PARAMETER Experiment Name: At_14day_Shoots-Roots_Sub_P Parameter: Tissue Value: Shoots vs. Whole Plant
  misc_feature: MA Experiment ID: 20000329 Result: Up-regulated in Transcription
  misc_feature: MA Experiment 20000329 PARAMETER Experiment Name: At_4deg_Cold_Sub_P Parameter: Age (day) Value: 14
  misc_feature: MA Experiment 20000329 PARAMETER Experiment Name: At_4deg_Cold_Sub_P Parameter: Organism Value: A. thaliana
  misc_feature: MA Experiment 20000329 PARAMETER Experiment Name: At_4deg_Cold_Sub_P Parameter: Plant Line Value: WS
  misc_feature: MA Experiment 20000329 PARAMETER Experiment Name: At_4deg_Cold_Sub_P Parameter: Temperature (deg C) Value: 4 vs. 22
  misc_feature: MA Experiment 20000329 PARAMETER Experiment Name: At_4deg_Cold_Sub_P Parameter: Timepoint (hr) Value: 6
  misc_feature: MA Experiment 20000329 PARAMETER Experiment Name: At_4deg_Cold_Sub_P Parameter: Tissue Value: Aerial
  misc_feature: MA Experiment ID: 20000332 Result: Up-regulated in Transcription
  misc_feature: MA Experiment 20000332 PARAMETER Experiment Name: At_4deg_Cold_Sub_P Parameter: Age (day) Value: 14
  misc_feature: MA Experiment 20000332 PARAMETER Experiment Name: At_4deg_Cold_Sub_P Parameter: Organism Value: A. thaliana
  misc_feature: MA Experiment 20000332 PARAMETER Experiment Name: At_4deg_Cold_Sub_P Parameter: Plant Line Value: WS
  misc_feature: MA Experiment 20000332 PARAMETER Experiment Name: At_4deg_Cold_Sub_P Parameter: Temperature (deg C) Value: 4 vs. 22
  misc_feature: MA Experiment 20000332 PARAMETER Experiment Name: At_4deg_Cold_Sub_P Parameter: Timepoint (hr) Value: 2
  misc_feature: MA Experiment 20000332 PARAMETER Experiment Name: At_4deg_Cold_Sub_P Parameter: Tissue Value: Aerial
  misc_feature: MA Experiment ID: 20000346 Result: Up-regulated in Transcription
  misc_feature: MA Experiment 20000346 PARAMETER Experiment Name: At_2mM_SA_Sub_P Parameter: Age (day) Value: 14
  misc_feature: MA Experiment 20000346 PARAMETER Experiment Name: At_2mM_SA_Sub_P Parameter: Organism Value: A. thaliana
  misc_feature: MA Experiment 20000346 PARAMETER Experiment Name: At_2mM_SA_Sub_P Parameter: Plant Line Value: WS
  misc_feature: MA Experiment 20000346 PARAMETER Experiment Name: At_2mM_SA_Sub_P Parameter: Timepoint (hr) Value: 1
  misc_feature: MA Experiment 20000346 PARAMETER Experiment Name: At_2mM_SA_Sub_P Parameter: Tissue Value: Aerial
  misc_feature: MA Experiment 20000346 PARAMETER Experiment Name: At_2mM_SA_Sub_P Parameter: Treatment Value: 2mM SA vs. No Treatment
  misc_feature: MA Experiment ID: 20000355 Result: Down-regulated in Transcription
  misc_feature: MA Experiment 20000355 PARAMETER Experiment Name: At_Siliques_Sub_P Parameter: Age (day) Value: 21
  misc_feature: MA Experiment 20000355 PARAMETER Experiment Name: At_Siliques_Sub_P Parameter: Organism Value: A. thaliana
  misc_feature: MA Experiment 20000355 PARAMETER Experiment Name: At_Siliques_Sub_P Parameter: Plant Line Value: WS
  misc_feature: MA Experiment 20000355 PARAMETER Experiment Name: At_Siliques_Sub_P Parameter: Tissue Value: Less Than 5mm Siliques vs. Whole Plant
  misc_feature: MA Experiment ID: 20000440 Result: Down-regulated in Transcription
  misc_feature: MA Experiment 20000440 PARAMETER Experiment Name: At_Closed-Flower__Sub_P Parameter: Tissue Value: Closed Flower vs. Whole Plant
  misc_feature: MA Experiment ID: 20000634 Result: Up-regulated in Transcription
  misc_feature: MA Experiment 20000634 PARAMETER Experiment Name: At_10percent_PEG_Sub_P Parameter: Age (day) Value: 12
  misc_feature: MA Experiment 20000634 PARAMETER Experiment Name: At_10percent_PEG_Sub_P Parameter: Organism Value: A. thaliana
  misc_feature: MA Experiment 20000634 PARAMETER Experiment Name: At_10percent_PEG_Sub_P Parameter: Plant Line Value: WS
  misc_feature: MA Experiment 20000634 PARAMETER Experiment Name: At_10percent_PEG_Sub_P Parameter: Timepoint (day) Value: 12
  misc_feature: MA Experiment 20000634 PARAMETER Experiment Name: At_10percent_PEG_Sub_P Parameter: Tissue Value: Whole Plant
  misc_feature: MA Experiment 20000634 PARAMETER Experiment Name: At_10percent_PEG_Sub_P Parameter: Treatment Value: 10% PEG vs. No Treatment
attttcaaatctttaaaagttgagaccagaagaagaagaaaaaaaatcatggagatgaccgaagcttccaaacagacaacagcagaaggatcagcaaatccagaaccagaccaaatcttgagtccgagaagatcgttggagctaaaacaaaagaaatggtggatctctgtttctttatgtattttcttagtcttgctcggagattctctagtcatgcttctcttgaacttcttctatgttcaagacaatcgagaagatagtgaccaagatctacaataccgaggaacatggttgcaagctctggtccaaaacgctgcgtttccactactcattcctctgtttttcattttcccttcaccaaaacaaaaccaagaaaccaccaatactcgtttcctctcttttcgtctcatcttactttacatctctcttggtgttcttgttgctgctcacagcaaattgtttgcacttgggaaattatacgcaaactttggcgtcttcacgctgatttccgcgactcagttgatatttaccgctattttcgcagccattattaaccgttttaagttcaccagatggattatcttatcgataatcggcagcattttgatttatgttttcggtagtcctgaatttggaggagagcctgatgaaaacgaagaattctacagcatccaagcttggttaactttcgctgcttcagttgctttcgcattatctctctgtttattccaactttgtttcgagaaagtgttggtaaagacaaagagatatggtaacaagaaagtgtttagaatggtcatagagatgcaaatttgtgtctcttttgtcgcaacggttgtttgtctcgtgggtttgtttgcgagtggcgagaataaggaactgcaaggcgatagccacaggtttaagaaaggagaaacgtattacgttttgagtttgatcgggttggcattgtcgtggcaggtttgggcggtcgggctgatgggtttggtgctttatgtttcgggtgtgtttggcgatgttgttcatatgtgtacttcaccacttgtggctttgtttgttgtgttggcatttgatttcatggatgatgagtttagttggcctagaattggtactttgatagcaacagttgtggctttaggatcttacttctacactctgcataagagaaacaagaagaagatggtggagctttaccaaacagagaacaatattgacgtttagtctctcatgtcaaatgtttgtttctgtttcaaaatatgttgttgttcttctgaatgttgtaagtcaatgtctaaaacatgttgtatagatctgaaaactatggaacatatttgttaattattttgatttgattttttttttgtatttatctcttacaatattttgttaatgaggatttgtcactacaatttatct

SEQ ID NO: 35999 - protein, 406 aa, Arabidopsis thaliana
  peptide (1)..(406): Ceres Seq. ID no. 12602628
  misc_feature (210)..(396): Pfam Name: Domain of unknown function, DUF250 Pfam Description: Domain of unknown function, DUF250
  misc_feature (49)..(388): Homolog of NCBI NO: 9369374 NR Description: F10A5.31 [Arabidopsis thaliana]
  misc_feature (179)..(401): Homolog of NCBI NO: 15220261 NR Description: hypothetical protein; protein id: At1g47590.1
  misc_feature (26)..(387): Homolog of NCBI NO: 15219436 NR Description: hypothetical protein
  misc_feature (48)..(391): Homolog of NCBI NO: 15223662 NR Description: unknown protein; protein id: At1g19770.1
  misc_feature (20)..(401): Homolog of NCBI NO: 25405226 NR Description: F16N3.13 [imported] - Arabidopsis thaliana
  misc_feature (20)..(395): Homolog of NCBI NO: 25405230 NR Description: F16N3.10 [imported] - Arabidopsis thaliana
  misc_feature (34)..(403): Homolog of NCBI NO: 15218319 NR Description: unknown protein; protein id: At1g09860.1
  misc_feature (17)..(406): Homolog of NCBI NO: 15217799 NR Description: hypothetical protein; protein id: At1g57943.1
  misc_feature (17)..(406): Homolog of NCBI NO: 15217802 NR Description: hypothetical protein; protein id: At1g57980.1
  misc_feature (17)..(406): Homolog of NCBI NO: 15217805 NR Description: unknown protein
IFKSLKVETRRRRKKIMEMTEASKQTTAEGSANPEPDQILSPRRSLELKQKKWWISVSLCIFLVLLGDSLVMLLLNFFYVQDNREDSDQDLQYRGTWLQALVQNAAFPLLIPLFFIFPSPKQNQETTNTRFLSFRLILLYISLGVLVAAHSKLFALGKLYANFGVFTLISATQLIFTAIFAAIINRFKFTRWIILSIIGSILIYVFGSPEFGGEPDENEEFYSIQAWLTFAASVAFALSLCLFQLCFEKVLVKTKRYGNKKVFRMVIEMQICVSFVATVVCLVGLFASGENKELQGDSHRFKKGETYYVLSLIGLALSWQVWAVGLMGLVLYVSGVFGDVVHMCTSPLVALFVVLAFDFMDDEFSWPRIGTLIATVVALGSYFYTLHKRNKKKMVELYQTENNIDV

SEQ ID NO: 36000 - protein, 390 aa, Arabidopsis thaliana
  peptide (1)..(390): Ceres Seq. ID no. 12602629
  misc_feature (194)..(380): Pfam Name: Domain of unknown function, DUF250 Pfam Description: Domain of unknown function, DUF250
  misc_feature (33)..(372): Homolog of NCBI NO: 9369374 NR Description: F10A5.31 [Arabidopsis thaliana]
  misc_feature (163)..(385): Homolog of NCBI NO: 15220261 NR Description: hypothetical protein; protein id: At1g47590.1
  misc_feature (10)..(371): Homolog of NCBI NO: 15219436 NR Description: hypothetical protein
  misc_feature (32)..(375): Homolog of NCBI NO: 15223662 NR Description: unknown protein; protein id: At1g19770.1
  misc_feature (4)..(385): Homolog of NCBI NO: 25405226 NR Description: F16N3.13 [imported] - Arabidopsis thaliana
  misc_feature (4)..(379): Homolog of NCBI NO: 25405230 NR Description: F16N3.10 [imported] - Arabidopsis thaliana
  misc_feature (18)..(387): Homolog of NCBI NO: 15218319 NR Description: unknown protein; protein id: At1g09860.1
  misc_feature (1)..(390): Homolog of NCBI NO: 15217799 NR Description: hypothetical protein; protein id: At1g57943.1
  misc_feature (1)..(390): Homolog of NCBI NO: 15217802 NR Description: hypothetical protein; protein id: At1g57980.1
  misc_feature (1)..(390): Homolog of NCBI NO: 15217805 NR Description: unknown protein
MEMTEASKQTTAEGSANPEPDQILSPRRSLELKQKKWWISVSLCIFLVLLGDSLVMLLLNFFYVQDNREDSDQDLQYRGTWLQALVQNAAFPLLIPLFFIFPSPKQNQETTNTRFLSFRLILLYISLGVLVAAHSKLFALGKLYANFGVFTLISATQLIFTAIFAAIINRFKFTRWIILSIIGSILIYVFGSPEFGGEPDENEEFYSIQAWLTFAASVAFALSLCLFQLCFEKVLVKTKRYGNKKVFRMVIEMQICVSFVATVVCLVGLFASGENKELQGDSHRFKKGETYYVLSLIGLALSWQVWAVGLMGLVLYVSGVFGDVVHMCTSPLVALFVVLAFDFMDDEFSWPRIGTLIATVVALGSYFYTLHKRNKKKMVELYQTENNIDV

SEQ ID NO: 36001 - protein, 388 aa, Arabidopsis thaliana
  peptide (1)..(388): Ceres Seq. ID no. 12602630
  misc_feature (192)..(378): Pfam Name: Domain of unknown function, DUF250 Pfam Description: Domain of unknown function, DUF250
  misc_feature (31)..(370): Homolog of NCBI NO: 9369374 NR Description: F10A5.31 [Arabidopsis thaliana]
  misc_feature (161)..(383): Homolog of NCBI NO: 15220261 NR Description: hypothetical protein; protein id: At1g47590.1
  misc_feature (8)..(369): Homolog of NCBI NO: 15219436 NR Description: hypothetical protein
  misc_feature (30)..(373): Homolog of NCBI NO: 15223662 NR Description: unknown protein; protein id: At1g19770.1
  misc_feature (2)..(383): Homolog of NCBI NO: 25405226 NR Description: F16N3.13 [imported] - Arabidopsis thaliana
  misc_feature (2)..(377): Homolog of NCBI NO: 25405230 NR Description: F16N3.10 [imported] - Arabidopsis thaliana
  misc_feature (16)..(385): Homolog of NCBI NO: 15218319 NR Description: unknown protein; protein id: At1g09860.1
  misc_feature (1)..(388): Homolog of NCBI NO: 15217799 NR Description: hypothetical protein; protein id: At1g57943.1
  misc_feature (1)..(388): Homolog of NCBI NO: 15217802 NR Description: hypothetical protein; protein id: At1g57980.1
  misc_feature (1)..(388): Homolog of NCBI NO: 15217805 NR Description: unknown protein
MTEASKQTTAEGSANPEPDQILSPRRSLELKQKKWWISVSLCIFLVLLGDSLVMLLLNFFYVQDNREDSDQDLQYRGTWLQALVQNAAFPLLIPLFFIFPSPKQNQETTNTRFLSFRLILLYISLGVLVAAHSKLFALGKLYANFGVFTLISATQLIFTAIFAAIINRFKFTRWIILSIIGSILIYVFGSPEFGGEPDENEEFYSIQAWLTFAASVAFALSLCLFQLCFEKVLVKTKRYGNKKVFRMVIEMQICVSFVATVVCLVGLFASGENKELQGDSHRFKKGETYYVLSLIGLALSWQVWAVGLMGLVLYVSGVFGDVVHMCTSPLVALFVVLAFDFMDDEFSWPRIGTLIATVVALGSYFYTLHKRNKKKMVELYQTENNIDV

SEQ ID NO: 36002 - DNA, 1481 bp, Arabidopsis thaliana
  misc_feature (1)..(1481): Ceres Seq. ID no. 12357762
  misc_feature: MA Experiment ID: 108434 Result: Up-regulated in Transcription
  misc_feature: MA Experiment 108434 PARAMETER Experiment Name: At_Root_Tips_cDNA_P Parameter: Tissue Value: Root Tips
  misc_feature: MA Experiment ID: 108461 Result: Up-regulated in Transcription
  misc_feature: MA Experiment 108461 PARAMETER Experiment Name: At_Germinating_Seeds_cDNA_P Parameter: Age (day) Value: 1 vs. 0
  misc_feature: MA Experiment 108461 PARAMETER Experiment Name: At_Germinating_Seeds_cDNA_P Parameter: Tissue Value: Germinating Seeds
  misc_feature: MA Experiment ID: 108462 Result: Up-regulated in Transcription
  misc_feature: MA Experiment 108462 PARAMETER Experiment Name: At_Germinating_Seeds_cDNA_P Parameter: Age (day) Value: 2 vs. 0
  misc_feature: MA Experiment 108462 PARAMETER Experiment Name: At_Germinating_Seeds_cDNA_P Parameter: Tissue Value: Germinating Seeds
  misc_feature: MA Experiment ID: 108573 Result: Up-regulated in Transcription
  misc_feature: MA Experiment 108573 PARAMETER Experiment Name: At_Drought_cDNA_P Parameter: Timepoint (hr) Value: 6
  misc_feature: MA Experiment 108573 PARAMETER Experiment Name: At_Drought_cDNA_P Parameter: Tissue Value: Aerial
  misc_feature: MA Experiment 108573 PARAMETER Experiment Name: At_Drought_cDNA_P Parameter: Treatment Value: Drought vs. No Drought
  misc_feature: MA Experiment ID: 108595 Result: Down-regulated in Transcription
  misc_feature: MA Experiment 108595 PARAMETER Experiment Name: At_Ler-pi_Ovule_cDNA_P Parameter: Plant Line Value: null
  misc_feature: MA Experiment ID: 20000069 Result: Down-regulated in Transcription
  misc_feature: MA Experiment 20000069 PARAMETER Experiment Name: At_100uM_ABA_Mutants_cDNA_P Parameter: Plant Line Value: CS23
  misc_feature: MA Experiment 20000069 PARAMETER Experiment Name: At_100uM_ABA_Mutants_cDNA_P Parameter: Timepoint (hr) Value: 6
  misc_feature: MA Experiment 20000069 PARAMETER Experiment Name: At_100uM_ABA_Mutants_cDNA_P Parameter: Tissue Value: Aerial
  misc_feature: MA Experiment 20000069 PARAMETER Experiment Name: At_100uM_ABA_Mutants_cDNA_P Parameter: Treatment Value: 100uM ABA vs. No Treatment
  misc_feature: MA Experiment ID: 20000087 Result: Down-regulated in Transcription
  misc_feature: MA Experiment 20000087 PARAMETER Experiment Name: At_100uM_ABA_Mutants_cDNA_P Parameter: Plant Line Value: WS
  misc_feature: MA Experiment 20000087 PARAMETER Experiment Name: At_100uM_ABA_Mutants_cDNA_P Parameter: Timepoint (hr) Value: 6
  misc_feature: MA Experiment 20000087 PARAMETER Experiment Name: At_100uM_ABA_Mutants_cDNA_P Parameter: Tissue Value: Aerial
  misc_feature: MA Experiment 20000087 PARAMETER Experiment Name: At_100uM_ABA_Mutants_cDNA_P Parameter: Treatment Value: 100uM ABA vs. No Treatment
  misc_feature: MA Experiment ID: 20000089 Result: Down-regulated in Transcription
  misc_feature: MA Experiment ID: 20000117 Result: Down-regulated in Transcription
  misc_feature: MA Experiment 20000117 PARAMETER Experiment Name: At_100uM_ABA_Mutants_cDNA_P Parameter: Plant Line Value: Columbia
  misc_feature: MA Experiment 20000117 PARAMETER Experiment Name: At_100uM_ABA_Mutants_cDNA_P Parameter: Timepoint (hr) Value: 6
  misc_feature: MA Experiment 20000117 PARAMETER Experiment Name: At_100uM_ABA_Mutants_cDNA_P Parameter: Tissue Value: Aerial
  misc_feature: MA Experiment 20000117 PARAMETER Experiment Name: At_100uM_ABA_Mutants_cDNA_P Parameter: Treatment Value: 100uM ABA vs. No Treatment
  misc_feature: MA Experiment ID: 20000224 Result: Down-regulated in Transcription
gattacttgtttctttgatttctccttccatagaaccgaattgttttcagtctgagatttctcctgccgagagaacgattttaatctattttcctcgagagtagaaaatggctgatggtgaagatattcaaccccttgtctgtgacaatggaactggaatggttaaggctggttttgctggggatgatgcaccgagggctgtgtttccaagtattgttggccgtcctcgccacactggagtgatggttggaatgggacagaaggatgcatatgttggcgatgaagctcaatccaagcgtggtattcttacccttaaataccctattgagcacggtattgtcaacaattgggatgatatggaaaaaatctggcatcatactttctacaatgagctccgtgttgctcccgaggagcatcctattctgctcactgaagcgcctcttaacccaaaggctaaccgtgagaagatgactcagatcatgtttgaaacctttaacgctccggctatgtatgtcgccattcaagctgtcctgtcgctttatgctagtggtcgtactactggtattgtgcttgactctggagatggtgtgagtcacacggtccctatctatgagggttacgctctcccgcatgcaatcctacgtcttgatcttgcaggtcgtgacctcacagatgctctgatgaagatcctcactgagcgtggttactctttcaccacaacagctgagcgtgaaattgtcagagacatcaaggagaagctttgctacattgctcttgactatgagcaggagcttgagacggctaaaaccagctcttctgtagagaagaactatgagttacctgatgggcaagtgatcaccattggatctgagcgtttccgttgccctgaggttctttaccagccatctatgatcggtatggagaatgctggtatccatgaaaccacctacaactccataatgaaatgtgatgttgacatcagaaaggacttgtatggtaacattgtgctcagtggtggaacaactatgttccctggaattgctgacagaatgagcaaagagatcactgctttggcaccgagcagcatgaagatcaaagtcgttgcacctcctgagaggaaatactctgtctggattggaggatccatcttggcctccctcagtaccttccagcagatgtggatcgcaaaggcagaatatgatgagtcaggcccgtcgattgttcaccggaaatgcttttgagcttgaagttaagtctgcttccggagaagccctgggggttttccagtttgtccttactgggtttttatcttcgttctctgctcttctttgtttttcttcttcaatattttcagattctggcctaagacattttgaagaatttacattatctgtttgtagtgttaaactgttgtcttgttccttttatttattttggatgacacaactgtgtttgagtgaataagaactcctgatttttcc

SEQ ID NO: 36003 - protein, 377 aa, Arabidopsis thaliana
  peptide (1)..(377): Ceres Seq. ID no. 12357763
  misc_feature (1)..(377): Pfam Name: Actin Pfam Description: Actin
  misc_feature (1)..(377): Homolog of NCBI NO: 30268605 NR Description: skeletal alpha-actin type-2b [Coryphaenoides
  misc_feature (1)..(377): Homolog of NCBI NO: 15231447 NR Description: actin 12; protein id: At3g46520.1 [Arabidopsis
  misc_feature (1)..(377): Homolog of NCBI NO: 23092520 NR Description: actin [Phalaenopsis hybrid cultivar]
  misc_feature (1)..(377): Homolog of NCBI NO: 11276978 NR Description: actin ACT2 [imported] - Striga asiatica
  misc_feature (1)..(377): Homolog of NCBI NO: 231503 NR Description: ACTIN 97
  misc_feature (1)..(377): Homolog of NCBI NO: 11276977 NR Description: actin [imported] - Striga asiatica
  misc_feature (1)..(377): Homolog of NCBI NO: 11276975 NR Description: actin [imported] - upland cotton
  misc_feature (1)..(377): Homolog of NCBI NO: 71633 NR Description: actin - Arabidopsis thaliana
  misc_feature (1)..(377): Homolog of NCBI NO: 18409908 NR Description: actin (ACT3)
  misc_feature (1)..(362): Homolog of NCBI NO: 11276980 NR Description: actin (ACT3) - Arabidopsis thaliana
MADGEDIQPLVCDNGTGMVKAGFAGDDAPRAVFPSIVGRPRHTGVMVGMGQKDAYVGDEAQSKRGILTLKYPIEHGIVNNWDDMEKIWHHTFYNELRVAPEEHPILLTEAPLNPKANREKMTQIMFETFNAPAMYVAIQAVLSLYASGRTTGIVLDSGDGVSHTVPIYEGYALPHAILRLDLAGRDLTDALMKILTERGYSFTTTAEREIVRDIKEKLCYIALDYEQELETAKTSSSVEKNYELPDGQVITIGSERFRCPEVLYQPSMIGMENAGIHETTYNSIMKCDVDIRKDLYGNIVLSGGTTMFPGIADRMSKEITALAPSSMKIKVVAPPERKYSVWIGGSILASLSTFQQMWIAKAEYDESGPSIVHRKCF

SEQ ID NO: 36004 - protein, 360 aa, Arabidopsis thaliana
  peptide (1)..(360): Ceres Seq. ID no. 12357764
  misc_feature (1)..(360): Pfam Name: Actin Pfam Description: Actin
  misc_feature (1)..(360): Homolog of NCBI NO: 30268605 NR Description: skeletal alpha-actin type-2b [Coryphaenoides
  misc_feature (1)..(360): Homolog of NCBI NO: 15231447 NR Description: actin 12; protein id: At3g46520.1 [Arabidopsis
  misc_feature (1)..(360): Homolog of NCBI NO: 23092520 NR Description: actin [Phalaenopsis hybrid cultivar]
  misc_feature (1)..(360): Homolog of NCBI NO: 11276978 NR Description: actin ACT2 [imported] - Striga asiatica
  misc_feature (1)..(360): Homolog of NCBI NO: 231503 NR Description: ACTIN 97
  misc_feature (1)..(360): Homolog of NCBI NO: 11276977 NR Description: actin [imported] - Striga asiatica
  misc_feature (1)..(360): Homolog of NCBI NO: 11276975 NR Description: actin [imported] - upland cotton
  misc_feature (1)..(360): Homolog of NCBI NO: 71633 NR Description: actin - Arabidopsis thaliana
  misc_feature (1)..(360): Homolog of NCBI NO: 18409908 NR Description: actin (ACT3)
  misc_feature (1)..(345): Homolog of NCBI NO: 11276980 NR Description: actin (ACT3) - Arabidopsis thaliana
MVKAGFAGDDAPRAVFPSIVGRPRHTGVMVGMGQKDAYVGDEAQSKRGILTLKYPIEHGIVNNWDDMEKIWHHTFYNELRVAPEEHPILLTEAPLNPKANREKMTQIMFETFNAPAMYVAIQAVLSLYASGRTTGIVLDSGDGVSHTVPIYEGYALPHAILRLDLAGRDLTDALMKILTERGYSFTTTAEREIVRDIKEKLCYIALDYEQELETAKTSSSVEKNYELPDGQVITIGSERFRCPEVLYQPSMIGMENAGIHETTYNSIMKCDVDIRKDLYGNIVLSGGTTMFPGIADRMSKEITALAPSSMKIKVVAPPERKYSVWIGGSILASLSTFQQMWIAKAEYDESGPSIVHRKCF

SEQ ID NO: 36005 - protein, 332 aa, Arabidopsis thaliana
  peptide (1)..(332): Ceres Seq. ID no. 12357765
  misc_feature (1)..(332): Pfam Name: Actin Pfam Description: Actin
  misc_feature (1)..(332): Homolog of NCBI NO: 30268605 NR Description: skeletal alpha-actin type-2b [Coryphaenoides
  misc_feature (1)..(332): Homolog of NCBI NO: 15231447 NR Description: actin 12; protein id: At3g46520.1 [Arabidopsis
  misc_feature (1)..(332): Homolog of NCBI NO: 23092520 NR Description: actin [Phalaenopsis hybrid cultivar]
  misc_feature (1)..(332): Homolog of NCBI NO: 11276978 NR Description: actin ACT2 [imported] - Striga asiatica
  misc_feature (1)..(332): Homolog of NCBI NO: 231503 NR Description: ACTIN 97
  misc_feature (1)..(332): Homolog of NCBI NO: 11276977 NR Description: actin [imported] - Striga asiatica
  misc_feature (1)..(332): Homolog of NCBI NO: 11276975 NR Description: actin [imported] - upland cotton
  misc_feature (1)..(332): Homolog of NCBI NO: 71633 NR Description: actin - Arabidopsis thaliana
  misc_feature (1)..(332): Homolog of NCBI NO: 18409908 NR Description: actin (ACT3)
  misc_feature (1)..(317): Homolog of NCBI NO: 11276980 NR Description: actin (ACT3) - Arabidopsis thaliana
MVGMGQKDAYVGDEAQSKRGILTLKYPIEHGIVNNWDDMEKIWHHTFYNELRVAPEEHPILLTEAPLNPKANREKMTQIMFETFNAPAMYVAIQAVLSLYASGRTTGIVLDSGDGVSHTVPIYEGYALPHAILRLDLAGRDLTDALMKILTERGYSFTTTAEREIVRDIKEKLCYIALDYEQELETAKTSSSVEKNYELPDGQVITIGSERFRCPEVLYQPSMIGMENAGIHETTYNSIMKCDVDIRKDLYGNIVLSGGTTMFPGIADRMSKEITALAPSSMKIKVVAPPERKYSVWIGGSILASLSTFQQMWIAKAEYDESGPSIVHRKCF

SEQ ID NO: 36006 - DNA, 1291 bp, Arabidopsis thaliana
  misc_feature (1)..(1291): Ceres Seq. ID no. 12334289
  misc_feature: MA Experiment ID: 108579 Result: Down-regulated in Transcription
  misc_feature: MA Experiment 108579 PARAMETER Experiment Name: At_4deg_Cold_cDNA_P Parameter: Temperature (deg C) Value: 4 vs. 22
  misc_feature: MA Experiment 108579 PARAMETER Experiment Name: At_4deg_Cold_cDNA_P Parameter: Timepoint (hr) Value: 6
  misc_feature: MA Experiment 108579 PARAMETER Experiment Name: At_4deg_Cold_cDNA_P Parameter: Tissue Value: Aerial
  misc_feature: MA Experiment ID: 20000070 Result: Up-regulated in Transcription
  misc_feature: MA Experiment 20000070 PARAMETER Experiment Name: At_100uM_ABA_Mutants_cDNA_P Parameter: Plant Line Value: CS24
  misc_feature: MA Experiment 20000070 PARAMETER Experiment Name: At_100uM_ABA_Mutants_cDNA_P Parameter: Timepoint (hr) Value: 6
  misc_feature: MA Experiment 20000070 PARAMETER Experiment Name: At_100uM_ABA_Mutants_cDNA_P Parameter: Tissue Value: Aerial
  misc_feature: MA Experiment 20000070 PARAMETER Experiment Name: At_100uM_ABA_Mutants_cDNA_P Parameter: Treatment Value: 100uM ABA vs. No Treatment
  misc_feature: MA Experiment ID: 20000071 Result: Up-regulated in Transcription
  misc_feature: MA Experiment 20000071 PARAMETER Experiment Name: At_100uM_ABA_Mutants_cDNA_P Parameter: Plant Line Value: CS8104
  misc_feature: MA Experiment 20000071 PARAMETER Experiment Name: At_100uM_ABA_Mutants_cDNA_P Parameter: Timepoint (hr) Value: 6
  misc_feature: MA Experiment 20000071 PARAMETER Experiment Name: At_100uM_ABA_Mutants_cDNA_P Parameter: Tissue Value: Aerial
  misc_feature: MA Experiment 20000071 PARAMETER Experiment Name: At_100uM_ABA_Mutants_cDNA_P Parameter: Treatment Value: 100uM ABA vs. No Treatment
  misc_feature: MA Experiment ID: 20000089 Result: Up-regulated in Transcription
  misc_feature: MA Experiment ID: 20000090 Result: Up-regulated in Transcription
  misc_feature: MA Experiment ID: 20000111 Result: Down-regulated in Transcription
  misc_feature: MA Experiment 20000111 PARAMETER Experiment Name: At_42deg_Heat_cDNA_P Parameter: Temperature (deg C) Value: 42 vs. 22
  misc_feature: MA Experiment 20000111 PARAMETER Experiment Name: At_42deg_Heat_cDNA_P Parameter: Timepoint (hr) Value: 6
  misc_feature: MA Experiment 20000111 PARAMETER Experiment Name: At_42deg_Heat_cDNA_P Parameter: Tissue Value: Aerial
  misc_feature: MA Experiment ID: 20000117 Result: Up-regulated in Transcription
  misc_feature: MA Experiment 20000117 PARAMETER Experiment Name: At_100uM_ABA_Mutants_cDNA_P Parameter: Plant Line Value: Columbia
  misc_feature: MA Experiment 20000117 PARAMETER Experiment Name: At_100uM_ABA_Mutants_cDNA_P Parameter: Timepoint (hr) Value: 6
  misc_feature: MA Experiment 20000117 PARAMETER Experiment Name: At_100uM_ABA_Mutants_cDNA_P Parameter: Tissue Value: Aerial
  misc_feature: MA Experiment 20000117 PARAMETER Experiment Name: At_100uM_ABA_Mutants_cDNA_P Parameter: Treatment Value: 100uM ABA vs. No Treatment
  misc_feature: MA Experiment ID: 20000451 Result: Down-regulated in Transcription
  misc_feature: MA Experiment 20000451 PARAMETER Experiment Name: At_CS6879_Shoots-Roots_P Parameter: Age (day) Value: 14
  misc_feature: MA Experiment 20000451 PARAMETER Experiment Name: At_CS6879_Shoots-Roots_P Parameter: Organism Value: A. thaliana
  misc_feature: MA Experiment 20000451 PARAMETER Experiment Name: At_CS6879_Shoots-Roots_P Parameter: Plant Line Value: CS6879 vs. WS
  misc_feature: MA Experiment 20000451 PARAMETER Experiment Name: At_CS6879_Shoots-Roots_P Parameter: Tissue Value: Roots
  misc_feature: MA Experiment ID: 20000452 Result: Down-regulated in Transcription
  misc_feature: MA Experiment 20000452 PARAMETER Experiment Name: At_CS6879_Shoots-Roots_P Parameter: Age (day) Value: 14
  misc_feature: MA Experiment 20000452 PARAMETER Experiment Name: At_CS6879_Shoots-Roots_P Parameter: Organism Value: A. thaliana
  misc_feature: MA Experiment 20000452 PARAMETER Experiment Name: At_CS6879_Shoots-Roots_P Parameter: Plant Line Value: CS6879 vs. WS
  misc_feature: MA Experiment 20000452 PARAMETER Experiment Name: At_CS6879_Shoots-Roots_P Parameter: Tissue Value: Shoots
  misc_feature: MA Experiment ID: 20000495 Result: Up-regulated in Transcription
  misc_feature: MA Experiment 20000495 PARAMETER Experiment Name: At_Guard_Cells_P Parameter: Harvest Date Value: 8/2/2002
  misc_feature: MA Experiment 20000495 PARAMETER Experiment Name: At_Guard_Cells_P Parameter: Organism Value: A. thaliana
  misc_feature: MA Experiment 20000495 PARAMETER Experiment Name: At_Guard_Cells_P Parameter: Tissue Value: Guard Cells vs. Leaves
  misc_feature: MA Experiment ID: 20000794 Result: Up-regulated in Transcription
  misc_feature: MA Experiment 20000794 PARAMETER Experiment Name: At_Petals_P Parameter: Age (day) Value: 23-25 days
  misc_feature: MA Experiment 20000794 PARAMETER Experiment Name: At_Petals_P Parameter: Plant Line Value: WS
  misc_feature: MA Experiment 20000794 PARAMETER Experiment Name: At_Petals_P Parameter: Tissue Value: Petals vs. Whole plant
caaaattcggtcaaaaacaaaagaatctaaaaatagcaagttcatcgtttgatattaaagtttaacaagaagaatcttgaaagccgtcacgtacagatctgaagaatattctcaaggatagagagagaaatggcgacggacttcaagtctttaccagtcatcgacatctctcgtttactcctcaagtgtgatgatcccgacatggcagaggatgtcggtgtggccgaggttgtccagcaactggataaagcttgtcgggacgccggattcttctacgtgataggccatggaatatcagaggatgttattaacaaggttagagagatcactcgtgagttctttaagcttccttatgaagagaaacttaaaatcaaaatgactccagctgctggatacagaggatatcagagaattggagaaaatgtaaccaaaggaataccagatattcatgaagccattgattgttacaaagagattaagcaggggaagtatggggatataggcaaagttatggaagggccaaaccagtggccagagaatcctcaagagtttaaagagttgatggaggagtatattaagctatgtacagatctttctagaaagattttgagaggaatctccttagctcttgctggatcaccttatgagttcgagggaaagatggctggtgatcctttttgggtgatgcgtcttattggttatccaggtgctgagttcacaaatggccaacctgaaaatgatattggatgtggagctcacactgactatggcttgttaactcttgtgaatcaagatgatgacaaaactgctctgcaggtgagaaacttgggcggtgagtggatatcagccattccaatccctggatcgtttgtttgcaacatcggcgacatgttaaagatactttcaaacggagtatacgaatccacacttcatagagtgatcaataactctcctcaataccgtgtttgtgtcgcattcttctatgagactaacttcgacgcggtggtggagccattggatatatgtaaacagaagtaccctggaggaagaggaggatgccaagttttcaaaagagctgtgtatggagagcatctcgtaagtaaagtccagaccaactttgctatgtaatggaaggcagatctctctctccttctttgtacacaatacaccaacttcatcttaaagtttgatttgtaataatagtaaggtacttctttacttctgtgttatcaatggatacacatgtatttgcttcaaaaaataaaatgaaaaaggtatttagtttgttggc

SEQ ID NO: 36007 - protein, 332 aa, Arabidopsis thaliana
  peptide (1)..(332): Ceres Seq. ID no. 12334290
  misc_feature (182)..(287): Pfam Name: 2OG-Fe(II) oxygenase superfamily Pfam Description: 2OG-Fe(II) oxygenase superfamily
  misc_feature (1)..(122): Homolog of NCBI NO: 10834554 NR Description: 2-oxoacid-dependent oxidase [Arabidopsis thaliana]
  misc_feature (4)..(298): Homolog of NCBI NO: 23130050 NR Description: hypothetical protein [Nostoc punctiforme]
  misc_feature (1)..(330): Homolog of NCBI NO: 6984228 NR Description: putative flavonol synthase-like protein
  misc_feature (6)..(330): Homolog of NCBI NO: 15229181 NR Description: putative protein; protein id: At3g49630.1
  misc_feature (1)..(331): Homolog of NCBI NO: 11255891 NR Description: hypothetical protein T9C5.210 - Arabidopsis
  misc_feature (1)..(331): Homolog of NCBI NO: 22331716 NR Description: oxidoreductase (din11), putative; protein id:
  misc_feature (1)..(331): Homolog of NCBI NO: 19423910 NR Description: unknown protein [Arabidopsis thaliana]
  misc_feature (1)..(332): Homolog of NCBI NO: 11255902 NR Description: flavonol synthase-like protein - Arabidopsis
  misc_feature (1)..(332): Homolog of NCBI NO: 18409039 NR Description: flavonol synthase - like protein
  misc_feature (1)..(332): Homolog of NCBI NO: 21554579 NR Description: flavonol synthase-like protein [Arabidopsis
MATDFKSLPVIDISRLLLKCDDPDMAEDVGVAEVVQQLDKACRDAGFFYVIGHGISEDVINKVREITREFFKLPYEEKLKIKMTPAAGYRGYQRIGENVTKGIPDIHEAIDCYKEIKQGKYGDIGKVMEGPNQWPENPQEFKELMEEYIKLCTDLSRKILRGISLALAGSPYEFEGKMAGDPFWVMRLIGYPGAEFTNGQPENDIGCGAHTDYGLLTLVNQDDDKTALQVRNLGGEWISAIPIPGSFVCNIGDMLKILSNGVYESTLHRVINNSPQYRVCVAFFYETNFDAVVEPLDICKQKYPGGRGGCQVFKRAVYGEHLVSKVQTNFAM

SEQ ID NO: 36008 - protein, 308 aa, Arabidopsis thaliana
  peptide (1)..(308): Ceres Seq. ID no. 12334291
  misc_feature (158)..(263): Pfam Name: 2OG-Fe(II) oxygenase superfamily Pfam Description: 2OG-Fe(II) oxygenase superfamily
  misc_feature (1)..(98): Homolog of NCBI NO: 10834554 NR Description: 2-oxoacid-dependent oxidase [Arabidopsis thaliana]
  misc_feature (1)..(274): Homolog of NCBI NO: 23130050 NR Description: hypothetical protein [Nostoc punctiforme]
  misc_feature (1)..(306): Homolog of NCBI NO: 6984228 NR Description: putative flavonol synthase-like protein
  misc_feature (1)..(306): Homolog of NCBI NO: 15229181 NR Description: putative protein; protein id: At3g49630.1
  misc_feature (1)..(307): Homolog of NCBI NO: 11255891 NR Description: hypothetical protein T9C5.210 - Arabidopsis
  misc_feature (1)..(307): Homolog of NCBI NO: 22331716 NR Description: oxidoreductase (din11), putative; protein id:
  misc_feature (1)..(307): Homolog of NCBI NO: 19423910 NR Description: unknown protein [Arabidopsis thaliana]
  misc_feature (1)..(308): Homolog of NCBI NO: 11255902 NR Description: flavonol synthase-like protein - Arabidopsis
  misc_feature (1)..(308): Homolog of NCBI NO: 18409039 NR Description: flavonol synthase - like protein
  misc_feature (1)..(308): Homolog of NCBI NO: 21554579 NR Description: flavonol synthase-like protein [Arabidopsis
MAEDVGVAEVVQQLDKACRDAGFFYVIGHGISEDVINKVREITREFFKLPYEEKLKIKMTPAAGYRGYQRIGENVTKGIPDIHEAIDCYKEIKQGKYGDIGKVMEGPNQWPENPQEFKELMEEYIKLCTDLSRKILRGISLALAGSPYEFEGKMAGDPFWVMRLIGYPGAEFTNGQPENDIGCGAHTDYGLLTLVNQDDDKTALQVRNLGGEWISAIPIPGSFVCNIGDMLKILSNGVYESTLHRVINNSPQYRVCVAFFYETNFDAVVEPLDICKQKYPGGRGGCQVFKRAVYGEHLVSKVQTNFAM

SEQ ID NO: 36009 - protein, 250 aa, Arabidopsis thaliana
  peptide (1)..(250): Ceres Seq. ID no. 12334292
  misc_feature (100)..(205): Pfam Name: 2OG-Fe(II) oxygenase superfamily Pfam Description: 2OG-Fe(II) oxygenase superfamily
  misc_feature (1)..(40): Homolog of NCBI NO: 10834554 NR Description: 2-oxoacid-dependent oxidase [Arabidopsis thaliana]
  misc_feature (1)..(216): Homolog of NCBI NO: 23130050 NR Description: hypothetical protein [Nostoc punctiforme]
  misc_feature (1)..(248): Homolog of NCBI NO: 6984228 NR Description: putative flavonol synthase-like protein
  misc_feature (1)..(248): Homolog of NCBI NO: 15229181 NR Description: putative protein; protein id: At3g49630.1
  misc_feature (1)..(249): Homolog of NCBI NO: 11255891 NR Description: hypothetical protein T9C5.210 - Arabidopsis
  misc_feature (1)..(249): Homolog of NCBI NO: 22331716 NR Description: oxidoreductase (din11), putative; protein id:
  misc_feature (1)..(249): Homolog of NCBI NO: 19423910 NR Description: unknown protein [Arabidopsis thaliana]
  misc_feature (1)..(250): Homolog of NCBI NO: 11255902 NR Description: flavonol synthase-like protein - Arabidopsis
  misc_feature (1)..(250): Homolog of NCBI NO: 18409039 NR Description: flavonol synthase - like protein
  misc_feature (1)..(250): Homolog of NCBI NO: 21554579 NR Description: flavonol synthase-like protein [Arabidopsis
MTPAAGYRGYQRIGENVTKGIPDIHEAIDCYKEIKQGKYGDIGKVMEGPNQWPENPQEFKELMEEYIKLCTDLSRKILRGISLALAGSPYEFEGKMAGDPFWVMRLIGYPGAEFTNGQPENDIGCGAHTDYGLLTLVNQDDDKTALQVRNLGGEWISAIPIPGSFVCNIGDMLKILSNGVYESTLHRVINNSPQYRVCVAFFYETNFDAVVEPLDICKQKYPGGRGGCQVFKRAVYGEHLVSKVQTNFAM

SEQ ID NO: 36010 - DNA, 794 bp, Arabidopsis thaliana
  misc_feature (1)..(794): Ceres Seq. ID no. 12393483
  misc_feature: MA Experiment ID: 108434 Result: Up-regulated in Transcription
  misc_feature: MA Experiment 108434 PARAMETER Experiment Name: At_Root_Tips_cDNA_P Parameter: Tissue Value: Root Tips
  misc_feature: MA Experiment ID: 108462 Result: Down-regulated in Transcription
  misc_feature: MA Experiment 108462 PARAMETER Experiment Name: At_Germinating_Seeds_cDNA_P Parameter: Age (day) Value: 2 vs. 0
  misc_feature: MA Experiment 108462 PARAMETER Experiment Name: At_Germinating_Seeds_cDNA_P Parameter: Tissue Value: Germinating Seeds
  misc_feature: MA Experiment ID: 108463 Result: Down-regulated in Transcription
  misc_feature: MA Experiment 108463 PARAMETER Experiment Name: At_Germinating_Seeds_cDNA_P Parameter: Age (day) Value: 3 vs. 0
  misc_feature: MA Experiment 108463 PARAMETER Experiment Name: At_Germinating_Seeds_cDNA_P Parameter: Tissue Value: Germinating Seeds
  misc_feature: MA Experiment ID: 108464 Result: Down-regulated in Transcription
  misc_feature: MA Experiment 108464 PARAMETER Experiment Name: At_Germinating_Seeds_cDNA_P Parameter: Age (day) Value: 4 vs. 0
  misc_feature: MA Experiment 108464 PARAMETER Experiment Name: At_Germinating_Seeds_cDNA_P Parameter: Tissue Value: Germinating Seeds
  misc_feature: MA Experiment ID: 108579 Result: Down-regulated in Transcription
  misc_feature: MA Experiment 108579 PARAMETER Experiment Name: At_4deg_Cold_cDNA_P Parameter: Temperature (deg C) Value: 4 vs. 22
  misc_feature: MA Experiment 108579 PARAMETER Experiment Name: At_4deg_Cold_cDNA_P Parameter: Timepoint (hr) Value: 6
  misc_feature: MA Experiment 108579 PARAMETER Experiment Name: At_4deg_Cold_cDNA_P Parameter: Tissue Value: Aerial
  misc_feature: MA Experiment ID: 20000224 Result: Down-regulated in Transcription
  misc_feature: MA Experiment ID: 20000451 Result: Down-regulated in Transcription
  misc_feature: MA Experiment 20000451 PARAMETER Experiment Name: At_CS6879_Shoots-Roots_P Parameter: Age (day) Value: 14
  misc_feature: MA Experiment 20000451 PARAMETER Experiment Name: At_CS6879_Shoots-Roots_P Parameter: Organism Value: A. thaliana
  misc_feature: MA Experiment 20000451 PARAMETER Experiment Name: At_CS6879_Shoots-Roots_P Parameter: Plant Line Value: CS6879 vs. WS
  misc_feature: MA Experiment 20000451 PARAMETER Experiment Name: At_CS6879_Shoots-Roots_P Parameter: Tissue Value: Roots
  misc_feature: MA Experiment ID: 20000452 Result: Down-regulated in Transcription
  misc_feature: MA Experiment 20000452 PARAMETER Experiment Name: At_CS6879_Shoots-Roots_P Parameter: Age (day) Value: 14
  misc_feature: MA Experiment 20000452 PARAMETER Experiment Name: At_CS6879_Shoots-Roots_P Parameter: Organism Value: A. thaliana
  misc_feature: MA Experiment 20000452 PARAMETER Experiment Name: At_CS6879_Shoots-Roots_P Parameter: Plant Line Value: CS6879 vs. WS
  misc_feature: MA Experiment 20000452 PARAMETER Experiment Name: At_CS6879_Shoots-Roots_P Parameter: Tissue Value: Shoots
gagttggaccagtcggaggattagggtttcaacggagactcactagtcgatctccgatcctttcttctacccgcccgaaatccgtcgaaacttctcttctttaccattgatttgcctcgtctcagctcaattctcttccgttgctgcttcgtttagttgttgcttcgcttcagtactctggtggtgggagagatgaatcacggccaacaatctggtgaggcaaagcatgaagatgatgctgctcttacagagttccttgcttctctgatggattatactcctactattcctgatgatttagtggagcactacttggctaagagtggatttcagtgccccgacgtacgattgataaggctagttgctgtggctacacaaaagtttgttgcagatgttgccagtgacgcccttcagcattgcaaggctagaccagcaccagttgtgaaagacaaaaaacagcaaaaggataagcgtttggtattgacaatggaagatctttcaaaagctttgcgtgagtatggtgtgaacgtgaagcatccagaatattttgctgatagcccttcgactggaatggaccctgcaacaagggacgaatagaaaccaggaattcctcaaaatctttgcctagtaaggacggtcatgtgtctcagatccctgattctctgttgtgtttcagttaaaaacaaaactcacttgtcttgctagtcctcaattactacattacatgtatattcgtttgttgtttgttctctggtgatttttggggttctacatcacttatccaccattcttgc

SEQ ID NO: 36011 - protein, 134 aa, Arabidopsis thaliana
  peptide (1)..(134): Ceres Seq. ID no. 12393484
  misc_feature (30)..(80): Pfam Name: Transcription initiation factor TFIID 23-30kDa subunit Pfam Description: Transcription initiation factor TFIID 23-30kDa
  misc_feature (1)..(118): Homolog of NCBI NO: 17137648 NR Description: TBP-associated factor 10b CG3069-PA [Drosophila
  misc_feature (18)..(119): Homolog of NCBI NO: 2136293 NR Description: transcription factor IID 30k chain - human
  misc_feature (7)..(119): Homolog of NCBI NO: 20863106 NR Description: similar to Transcription initiation factor TFIID
  misc_feature (18)..(119): Homolog of NCBI NO: 5454106 NR Description: TBP-related factor 10
  misc_feature (7)..(119): Homolog of NCBI NO: 34859827 NR Description: similar to Ilk protein [Rattus norvegicus]
  misc_feature (7)..(119): Homolog of NCBI NO: 21619259 NR Description: Similar to TAF10 RNA polymerase II, TATA box
  misc_feature (7)..(119): Homolog of NCBI NO: 26338586 NR Description: unnamed protein product [Mus musculus]
  misc_feature (7)..(119): Homolog of NCBI NO: 9910576 NR Description: TAF10 RNA polymerase II, TATA box binding protein
  misc_feature (1)..(134): Homolog of NCBI NO: 26450720 NR Description: putative transcription factor II [Arabidopsis
  misc_feature (1)..(134): Homolog of NCBI NO: 15236059 NR Description: Transcription factor II homolog
MNHGQQSGEAKHEDDAALTEFLASLMDYTPTIPDDLVEHYLAKSGFQCPDVRLIRLVAVATQKFVADVASDALQHCKARPAPVVKDKKQQKDKRLVLTMEDLSKALREYGVNVKHPEYFADSPSTGMDPATRDE

SEQ ID NO: 36012 - protein, 109 aa, Arabidopsis thaliana
  peptide (1)..(109): Ceres Seq. ID no. 12393485
  misc_feature (5)..(55): Pfam Name: Transcription initiation factor TFIID 23-30kDa subunit Pfam Description: Transcription initiation factor TFIID 23-30kDa
  misc_feature (1)..(93): Homolog of NCBI NO: 17137648 NR Description: TBP-associated factor 10b CG3069-PA [Drosophila
  misc_feature (1)..(94): Homolog of NCBI NO: 2136293 NR Description: transcription factor IID 30k chain - human
  misc_feature (1)..(94): Homolog of NCBI NO: 20863106 NR Description: similar to Transcription initiation factor TFIID
  misc_feature (1)..(94): Homolog of NCBI NO: 5454106 NR Description: TBP-related factor 10
  misc_feature (1)..(94): Homolog of NCBI NO: 34859827 NR Description: similar to Ilk protein [Rattus norvegicus]
  misc_feature (1)..(94): Homolog of NCBI NO: 21619259 NR Description: Similar to TAF10 RNA polymerase II, TATA box
  misc_feature (1)..(94): Homolog of NCBI NO: 26338586 NR Description: unnamed protein product [Mus musculus]
  misc_feature (1)..(94): Homolog of NCBI NO: 9910576 NR Description: TAF10 RNA polymerase II, TATA box binding protein
  misc_feature (1)..(109): Homolog of NCBI NO: 26450720 NR Description: putative transcription factor II [Arabidopsis
  misc_feature (1)..(109): Homolog of NCBI NO: 15236059 NR Description: Transcription factor II homolog
MDYTPTIPDDLVEHYLAKSGFQCPDVRLIRLVAVATQKFVADVASDALQHCKARPAPVVKDKKQQKDKRLVLTMEDLSKALREYGVNVKHPEYFADSPSTGMDPATRDE

SEQ ID NO: 36013 - DNA, 853 bp, Arabidopsis thaliana
  misc_feature (1)..(853): Ceres Seq. ID no. 13493733
  misc_feature: MA Experiment ID: 108434 Result: Down-regulated in Transcription
  misc_feature: MA Experiment 108434 PARAMETER Experiment Name: At_Root_Tips_cDNA_P Parameter: Tissue Value: Root Tips
  misc_feature: MA Experiment ID: 108435 Result: Down-regulated in Transcription
  misc_feature: MA Experiment 108435 PARAMETER Experiment Name: At_stm_Mutants_cDNA_P Parameter: Plant Line Value: wt Landsburg vs stm
  misc_feature: MA Experiment 108435 PARAMETER Experiment Name: At_stm_Mutants_cDNA_P Parameter: Tissue Value: Shoot Apical Meristem Region
  misc_feature: MA Experiment ID: 108462 Result: Down-regulated in Transcription
  misc_feature: MA Experiment 108462 PARAMETER Experiment Name: At_Germinating_Seeds_cDNA_P Parameter: Age (day) Value: 2 vs. 0
  misc_feature: MA Experiment 108462 PARAMETER Experiment Name: At_Germinating_Seeds_cDNA_P Parameter: Tissue Value: Germinating Seeds
  misc_feature: MA Experiment ID: 108463 Result: Down-regulated in Transcription
  misc_feature: MA Experiment 108463 PARAMETER Experiment Name: At_Germinating_Seeds_cDNA_P Parameter: Age (day) Value: 3 vs. 0
  misc_feature: MA Experiment 108463 PARAMETER Experiment Name: At_Germinating_Seeds_cDNA_P Parameter: Tissue Value: Germinating Seeds
  misc_feature: MA Experiment ID: 108464 Result: Down-regulated in Transcription
  misc_feature: MA Experiment 108464 PARAMETER Experiment Name: At_Germinating_Seeds_cDNA_P Parameter: Age (day) Value: 4 vs. 0
  misc_feature: MA Experiment 108464 PARAMETER Experiment Name: At_Germinating_Seeds_cDNA_P Parameter: Tissue Value: Germinating Seeds
  misc_feature: MA Experiment ID: 108488 Result: Down-regulated in Transcription
  misc_feature: MA Experiment ID: 108576 Result: Up-regulated in Transcription
  misc_feature: MA Experiment 108576 PARAMETER Experiment Name: At_42deg_Heat_cDNA_P Parameter: Temperature (deg C) Value: 42 vs. 22
  misc_feature: MA Experiment 108576 PARAMETER Experiment Name: At_42deg_Heat_cDNA_P Parameter: Timepoint (hr) Value: 1
  misc_feature: MA Experiment 108576 PARAMETER Experiment Name: At_42deg_Heat_cDNA_P Parameter: Tissue Value: Aerial
  misc_feature: MA Experiment ID: 108579 Result: Up-regulated in Transcription
  misc_feature: MA Experiment 108579 PARAMETER Experiment Name: At_4deg_Cold_cDNA_P Parameter: Temperature (deg C) Value: 4 vs. 22
  misc_feature: MA Experiment 108579 PARAMETER Experiment Name: At_4deg_Cold_cDNA_P Parameter: Timepoint (hr) Value: 6
  misc_feature: MA Experiment 108579 PARAMETER Experiment Name: At_4deg_Cold_cDNA_P Parameter: Tissue Value: Aerial
  misc_feature: MA Experiment ID: 20000069 Result: Up-regulated in Transcription
  misc_feature: MA Experiment 20000069 PARAMETER Experiment Name: At_100uM_ABA_Mutants_cDNA_P Parameter: Plant Line Value: CS23
  misc_feature: MA Experiment 20000069 PARAMETER Experiment Name: At_100uM_ABA_Mutants_cDNA_P Parameter: Timepoint (hr) Value: 6
  misc_feature: MA Experiment 20000069 PARAMETER Experiment Name: At_100uM_ABA_Mutants_cDNA_P Parameter: Tissue Value: Aerial
  misc_feature: MA Experiment 20000069 PARAMETER Experiment Name: At_100uM_ABA_Mutants_cDNA_P Parameter: Treatment Value: 100uM ABA vs. No Treatment
  misc_feature: MA Experiment ID: 20000070 Result: Up-regulated in Transcription
  misc_feature: MA Experiment 20000070 PARAMETER Experiment Name: At_100uM_ABA_Mutants_cDNA_P Parameter: Plant Line Value: CS24
  misc_feature: MA Experiment 20000070 PARAMETER Experiment Name: At_100uM_ABA_Mutants_cDNA_P Parameter: Timepoint (hr) Value: 6
  misc_feature: MA Experiment 20000070 PARAMETER Experiment Name: At_100uM_ABA_Mutants_cDNA_P Parameter: Tissue Value: Aerial
  misc_feature: MA Experiment 20000070 PARAMETER Experiment Name: At_100uM_ABA_Mutants_cDNA_P Parameter: Treatment Value: 100uM ABA vs. No Treatment
  misc_feature: MA Experiment ID: 20000086 Result: Up-regulated in Transcription
  misc_feature: MA Experiment 20000086 PARAMETER Experiment Name: At_100uM_ABA_Mutants_cDNA_P Parameter: Plant Line Value: CS22
  misc_feature: MA Experiment 20000086 PARAMETER Experiment Name: At_100uM_ABA_Mutants_cDNA_P Parameter: Timepoint (hr) Value: 6
  misc_feature: MA Experiment 20000086 PARAMETER Experiment Name: At_100uM_ABA_Mutants_cDNA_P Parameter: Tissue Value: Aerial
  misc_feature: MA Experiment 20000086 PARAMETER Experiment Name: At_100uM_ABA_Mutants_cDNA_P Parameter: Treatment Value: 100uM ABA vs. No Treatment
  misc_feature: MA Experiment ID: 20000087 Result: Up-regulated in Transcription
  misc_feature: MA Experiment 20000087 PARAMETER Experiment Name: At_100uM_ABA_Mutants_cDNA_P Parameter: Plant Line Value: WS
  misc_feature: MA Experiment 20000087 PARAMETER Experiment Name: At_100uM_ABA_Mutants_cDNA_P Parameter: Timepoint (hr) Value: 6
  misc_feature: MA Experiment 20000087 PARAMETER Experiment Name: At_100uM_ABA_Mutants_cDNA_P Parameter: Tissue Value: Aerial
  misc_feature: MA Experiment 20000087 PARAMETER Experiment Name: At_100uM_ABA_Mutants_cDNA_P Parameter: Treatment Value: 100uM ABA vs. No Treatment
  misc_feature: MA Experiment ID: 20000088 Result: Up-regulated in Transcription
  misc_feature: MA Experiment 20000088 PARAMETER Experiment Name: At_100uM_ABA_Mutants_cDNA_P Parameter: Plant Line Value: Landsberg
  misc_feature: MA Experiment 20000088 PARAMETER Experiment Name: At_100uM_ABA_Mutants_cDNA_P Parameter: Timepoint (hr) Value: 6
  misc_feature: MA Experiment 20000088 PARAMETER Experiment Name: At_100uM_ABA_Mutants_cDNA_P Parameter: Tissue Value: Aerial
  misc_feature: MA Experiment 20000088 PARAMETER Experiment Name: At_100uM_ABA_Mutants_cDNA_P Parameter: Treatment Value: 100uM ABA vs. No Treatment
  misc_feature: MA Experiment ID: 20000090 Result: Up-regulated in Transcription
  misc_feature: MA Experiment ID: 20000093 Result: Up-regulated in Transcription
  misc_feature: MA Experiment 20000093 PARAMETER Experiment Name: At_42deg_Heat_cDNA_P Parameter: Temperature (deg C) Value: 42 vs. 22
  misc_feature: MA Experiment 20000093 PARAMETER Experiment Name: At_42deg_Heat_cDNA_P Parameter: Timepoint (hr) Value: 0.5
  misc_feature: MA Experiment 20000093 PARAMETER Experiment Name: At_42deg_Heat_cDNA_P Parameter: Tissue Value: Aerial
  misc_feature: MA Experiment ID: 20000112 Result: Up-regulated in Transcription
  misc_feature: MA Experiment 20000112 PARAMETER Experiment Name: At_42deg_Heat_cDNA_P Parameter: Temperature (deg C) Value: 42 vs. 22
  misc_feature: MA Experiment 20000112 PARAMETER Experiment Name: At_42deg_Heat_cDNA_P Parameter: Timepoint (hr) Value: 2
  misc_feature: MA Experiment 20000112 PARAMETER Experiment Name: At_42deg_Heat_cDNA_P Parameter: Tissue Value: Aerial
  misc_feature: MA Experiment ID: 20000113 Result: Up-regulated in Transcription
  misc_feature: MA Experiment 20000113 PARAMETER Experiment Name: At_42deg_Heat_cDNA_P Parameter: Temperature (deg C) Value: 42 vs. 22
  misc_feature: MA Experiment 20000113 PARAMETER Experiment Name: At_42deg_Heat_cDNA_P Parameter: Timepoint (hr) Value: 8
  misc_feature: MA Experiment 20000113 PARAMETER Experiment Name: At_42deg_Heat_cDNA_P Parameter: Tissue Value: Aerial
  misc_feature: MA Experiment ID: 20000117 Result: Up-regulated in Transcription
  misc_feature: MA Experiment 20000117 PARAMETER Experiment Name: At_100uM_ABA_Mutants_cDNA_P Parameter: Plant Line Value: Columbia
  misc_feature: MA Experiment 20000117 PARAMETER Experiment Name: At_100uM_ABA_Mutants_cDNA_P Parameter: Timepoint (hr) Value: 6
  misc_feature: MA Experiment 20000117 PARAMETER Experiment Name: At_100uM_ABA_Mutants_cDNA_P Parameter: Tissue Value: Aerial
  misc_feature: MA Experiment 20000117 PARAMETER Experiment Name: At_100uM_ABA_Mutants_cDNA_P Parameter: Treatment Value: 100uM ABA vs. No Treatment
  misc_feature: MA Experiment ID: 20000171 Result: Up-regulated in Transcription
  misc_feature: MA Experiment 20000171 PARAMETER Experiment Name: At_42deg_Heat_P Parameter: Age (day) Value: 14
  misc_feature: MA Experiment 20000171 PARAMETER Experiment Name: At_42deg_Heat_P Parameter: Organism Value: A. thaliana
  misc_feature: MA Experiment 20000171 PARAMETER Experiment Name: At_42deg_Heat_P Parameter: Plant Line Value: WS
  misc_feature: MA Experiment 20000171 PARAMETER Experiment Name: At_42deg_Heat_P Parameter: Temperature (deg C) Value: 42 vs. 22
  misc_feature: MA Experiment 20000171 PARAMETER Experiment Name: At_42deg_Heat_P Parameter: Timepoint (hr) Value: 1
  misc_feature: MA Experiment 20000171 PARAMETER Experiment Name: At_42deg_Heat_P Parameter: Tissue Value: Aerial
  misc_feature: MA Experiment ID: 20000184 Result: Down-regulated in Transcription
  misc_feature: MA Experiment 20000184 PARAMETER Experiment Name: At_Shoots__P Parameter: Age (day) Value: 7
  misc_feature: MA Experiment 20000184 PARAMETER Experiment Name: At_Shoots__P Parameter: Tissue Value: Shoots vs. Whole Plant
  misc_feature: MA Experiment ID: 20000185 Result: Down-regulated in Transcription
  misc_feature: MA Experiment 20000185 PARAMETER Experiment Name: At_Roots__P Parameter: Age (day) Value: 7 vs. 21
  misc_feature: MA Experiment 20000185 PARAMETER Experiment Name: At_Roots__P Parameter: Organism Value: A. thaliana
  misc_feature: MA Experiment 20000185 PARAMETER Experiment Name: At_Roots__P Parameter: Tissue Value: Roots vs. Whole Plant
  misc_feature: MA Experiment ID: 20000234 Result: Down-regulated in Transcription
  misc_feature: MA Experiment 20000234 PARAMETER Experiment Name: At_Siliques_P Parameter: Age (day) Value: 21
  misc_feature: MA Experiment 20000234 PARAMETER Experiment Name: At_Siliques_P Parameter: Organism Value: A. thaliana
  misc_feature: MA Experiment 20000234 PARAMETER Experiment Name: At_Siliques_P Parameter: Plant Line Value: WS
  misc_feature: MA Experiment 20000234 PARAMETER Experiment Name: At_Siliques_P Parameter: Tissue Value: Less Than 5mm Siliques vs. Whole Plant
  misc_feature: MA Experiment ID: 20000437 Result: Up-regulated in Transcription
  misc_feature: MA Experiment 20000437 PARAMETER Experiment Name: At_Drought_P Parameter: Age (day) Value: 8
  misc_feature: MA Experiment 20000437 PARAMETER Experiment Name: At_Drought_P Parameter: Organism Value: A. thaliana
  misc_feature: MA Experiment 20000437 PARAMETER Experiment Name: At_Drought_P Parameter: Plant Line Value: WS
  misc_feature: MA Experiment 20000437 PARAMETER Experiment Name: At_Drought_P Parameter: Timepoint (hr) Value: 24
  misc_feature: MA Experiment 20000437 PARAMETER Experiment Name: At_Drought_P Parameter: Tissue Value: Whole Plant
  misc_feature: MA Experiment 20000437 PARAMETER Experiment Name: At_Drought_P Parameter: Treatment Value: Drought vs. No Drought
  misc_feature: MA Experiment ID: 20000438 Result: Down-regulated in Transcription
  misc_feature: MA Experiment 20000438 PARAMETER Experiment Name: At_Shoots__P Parameter: Age (day) Value: 14
  misc_feature: MA Experiment 20000438 PARAMETER Experiment Name: At_Shoots__P Parameter: Tissue Value: Shoots vs. Whole Plant
  misc_feature: MA Experiment ID: 20000439 Result: Down-regulated in Transcription
  misc_feature: MA Experiment 20000439 PARAMETER Experiment Name: At_Roots__P Parameter: Age (day) Value: 14 vs. 21
  misc_feature: MA Experiment 20000439 PARAMETER Experiment Name: At_Roots__P Parameter: Organism Value: A. thaliana
  misc_feature: MA Experiment 20000439 PARAMETER Experiment Name: At_Roots__P Parameter: Tissue Value: Roots vs. Whole Plant
  misc_feature: MA Experiment ID: 20000495 Result: Down-regulated in Transcription
  misc_feature: MA Experiment 20000495 PARAMETER Experiment Name: At_Guard_Cells_P Parameter: Harvest Date Value: 8/2/2002
  misc_feature: MA Experiment 20000495 PARAMETER Experiment Name: At_Guard_Cells_P Parameter: Organism Value: A. thaliana
  misc_feature: MA Experiment 20000495 PARAMETER Experiment Name: At_Guard_Cells_P Parameter: Tissue Value: Guard Cells vs. Leaves
  misc_feature: MA Experiment ID: 20001247 Result: Down-regulated in Transcription
  misc_feature: MA Experiment 20001247 PARAMETER Experiment Name: At_Far-red-induction_P Parameter: Age (day) Value: 7
  misc_feature: MA Experiment 20001247 PARAMETER Experiment Name: At_Far-red-induction_P Parameter: Light Value: Far-red vs. White
  misc_feature: MA Experiment 20001247 PARAMETER Experiment Name: At_Far-red-induction_P Parameter: Organism Value: A. thaliana
  misc_feature: MA Experiment 20001247 PARAMETER Experiment Name: At_Far-red-induction_P Parameter: Plant Line Value: Columbia
  misc_feature: MA Experiment 20001247 PARAMETER Experiment Name: At_Far-red-induction_P Parameter: Timepoint (hr) Value: 1
  misc_feature: MA Experiment 20001247 PARAMETER Experiment Name: At_Far-red-induction_P Parameter: Tissue Value: Whole Plant
  misc_feature: MA Experiment ID: 20001248 Result: Up-regulated in Transcription
  misc_feature: MA Experiment 20001248 PARAMETER Experiment Name: At_Far-red-induction_P Parameter: Age (day) Value: 7
  misc_feature: MA Experiment 20001248 PARAMETER Experiment Name: At_Far-red-induction_P Parameter: Light Value: Far-red vs. White
  misc_feature: MA Experiment 20001248 PARAMETER Experiment Name: At_Far-red-induction_P Parameter: Organism Value: A. thaliana
  misc_feature: MA Experiment 20001248 PARAMETER Experiment Name: At_Far-red-induction_P Parameter: Plant Line Value: Columbia
  misc_feature: MA Experiment 20001248 PARAMETER Experiment Name: At_Far-red-induction_P Parameter: Timepoint (hr) Value: 4
  misc_feature: MA Experiment 20001248 PARAMETER Experiment Name: At_Far-red-induction_P Parameter: Tissue Value: Whole Plant
  misc_feature: MA Experiment ID: 20001451 Result: Down-regulated in Transcription
  misc_feature: MA Experiment 20001451 PARAMETER Experiment Name: At_Far-red-induction_P Parameter: Age (day) Value: 7
  misc_feature: MA Experiment 20001451 PARAMETER Experiment Name: At_Far-red-induction_P Parameter: Light Value: Far-red vs. White
  misc_feature: MA Experiment 20001451 PARAMETER Experiment Name: At_Far-red-induction_P Parameter: Organism Value: A. thaliana
  misc_feature: MA Experiment 20001451 PARAMETER Experiment Name: At_Far-red-induction_P Parameter: Plant Line Value: Columbia
  misc_feature: MA Experiment 20001451 PARAMETER Experiment Name: At_Far-red-induction_P Parameter: Timepoint (hr) Value: 24
  misc_feature: MA Experiment 20001451 PARAMETER Experiment Name: At_Far-red-induction_P Parameter: Tissue Value: Whole Plant
  misc_feature: MA Experiment ID: 20001459 Result: Down-regulated in Transcription
  misc_feature: MA Experiment 20001459 PARAMETER Experiment Name: At_50mM_NH4NO3_L-to-H_P Parameter: Age (day) Value: Undefined
  misc_feature: MA Experiment 20001459 PARAMETER Experiment Name: At_50mM_NH4NO3_L-to-H_P Parameter: Organism Value: Undefined
  misc_feature: MA Experiment 20001459 PARAMETER Experiment Name: At_50mM_NH4NO3_L-to-H_P Parameter: Plant Line Value: Undefined
  misc_feature: MA Experiment 20001459 PARAMETER Experiment Name: At_50mM_NH4NO3_L-to-H_P Parameter: Timepoint (hr) Value: 4
  misc_feature: MA Experiment 20001459 PARAMETER Experiment Name: At_50mM_NH4NO3_L-to-H_P Parameter: Tissue Value: Siliques
  misc_feature: MA Experiment 20001459 PARAMETER Experiment Name: At_50mM_NH4NO3_L-to-H_P Parameter: Treatment Value: 50mM NH4NO3 vs. 100mM Manitol
  misc_feature: MA Experiment ID: 20001558 Result: Down-regulated in Transcription
  misc_feature: MA Experiment 20001558 PARAMETER Experiment Name: At_Drought_Soil_Dry_P Parameter: Age (day) Value: 27
  misc_feature: MA Experiment 20001558 PARAMETER Experiment Name: At_Drought_Soil_Dry_P Parameter: Organism Value: A. thaliana
  misc_feature: MA Experiment 20001558 PARAMETER Experiment Name: At_Drought_Soil_Dry_P Parameter: Plant Line Value: WS
  misc_feature: MA Experiment 20001558 PARAMETER Experiment Name: At_Drought_Soil_Dry_P Parameter: Post Timepoint (hr) Value: 6
  misc_feature: MA Experiment 20001558 PARAMETER Experiment Name: At_Drought_Soil_Dry_P Parameter: Post-Treatment Value: Re-Water vs. No Drought
  misc_feature: MA Experiment 20001558 PARAMETER Experiment Name: At_Drought_Soil_Dry_P Parameter: Timepoint (day) Value: 13
  misc_feature: MA Experiment 20001558 PARAMETER Experiment Name: At_Drought_Soil_Dry_P Parameter: Treatment Value: Drought vs. No Drought
taatcccccccccccccccgatccacaaaaagccattccctctctcaactctctgaatatttttcttcttacgatttacaaatttccgatgctgtgacattaacgtctgagaacagagaaacacttcaaatctttgaattcgtatgtgcgacggagacggaggagccatcagtttcgaaaatggcgtgcgaaggtggaggatctaacgtcagatctagctactacaccattctcgggattcgtaaagatgcctctgtttccgatatccgcactgcttatcgtaagctagctatgaaatggcatccggatagatatgctcgaaatcctggagtcgccggagaagctaaacgtcggtttcaacaaatccaggaagcctattctgttttgaatgatgagaataagaggtcaatgtacgatgttggactatatgatcctcatgaagatgatgacgatgacttctgtgatttcatgcaagagatgatctcaatgatgaacaatgtcaaagacgcgggagagagcttggaagacttgcaacgaatgttcacggatatggttggtggagatggcgtgagctatgactgtaacaataatccaaagggcaacaaaagaccacgtgtcaatatctcgaggagtagtgctgcgatgcgttaaggcttacttcttttgtgtatgagtgtcgtgttgtatcaaaatttcaattccatgttcaattgtctagaccataaaataaattatctgtgaaaaccaactagaactaggtagaatctttggaatcccacatgccccaatcactaatgtatctctcatgatttggttgattttaaagattcgaaaattattcatgtattgttgc

SEQ ID NO: 36014 - protein, 156 aa, Arabidopsis thaliana
  peptide (1)..(156): Ceres Seq. ID no. 13493734
  misc_feature (13)..(82): Pfam Name: DnaJ domain Pfam Description: DnaJ domain
  misc_feature (1)..(156): Homolog of NCBI NO: 21554587 NR Description: DnaJ protein, putative [Arabidopsis thaliana]
  misc_feature (1)..(156): Homolog of NCBI NO: 18405757 NR Description: DnaJ protein family [Arabidopsis thaliana]
MACEGGGSNVRSSYYTILGIRKDASVSDIRTAYRKLAMKWHPDRYARNPGVAGEAKRRFQQIQEAYSVLNDENKRSMYDVGLYDPHEDDDDDFCDFMQEMISMMNNVKDAGESLEDLQRMFTDMVGGDGVSYDCNNNPKGNKRPRVNISRSSAAMR

SEQ ID NO: 36015 - protein, 119 aa, Arabidopsis thaliana
  peptide (1)..(119): Ceres Seq. ID no. 13493735
  misc_feature (1)..(119): Homolog of NCBI NO: 21554587 NR Description: DnaJ protein, putative [Arabidopsis thaliana]
  misc_feature (1)..(119): Homolog of NCBI NO: 18405757 NR Description: DnaJ protein family [Arabidopsis thaliana]
MKWHPDRYARNPGVAGEAKRRFQQIQEAYSVLNDENKRSMYDVGLYDPHEDDDDDFCDFMQEMISMMNNVKDAGESLEDLQRMFTDMVGGDGVSYDCNNNPKGNKRPRVNISRSSAAMR

SEQ ID NO: 36016 - protein, 80 aa, Arabidopsis thaliana
  peptide (1)..(80): Ceres Seq. ID no. 13493736
  misc_feature (1)..(80): Homolog of NCBI NO: 21554587 NR Description: DnaJ protein, putative [Arabidopsis thaliana]
  misc_feature (1)..(80): Homolog of NCBI NO: 18405757 NR Description: DnaJ protein family [Arabidopsis thaliana]
MYDVGLYDPHEDDDDDFCDFMQEMISMMNNVKDAGESLEDLQRMFTDMVGGDGVSYDCNNNPKGNKRPRVNISRSSAAMR

SEQ ID NO: 36017 - DNA, 771 bp, Arabidopsis thaliana
  misc_feature (1)..(771): Ceres Seq. ID no. 12393376
  misc_feature: MA Experiment ID: 108461 Result: Up-regulated in Transcription
  misc_feature: MA Experiment 108461 PARAMETER Experiment Name: At_Germinating_Seeds_cDNA_P Parameter: Age (day) Value: 1 vs. 0
  misc_feature: MA Experiment 108461 PARAMETER Experiment Name: At_Germinating_Seeds_cDNA_P Parameter: Tissue Value: Germinating Seeds
  misc_feature: MA Experiment ID: 108462 Result: Up-regulated in Transcription
  misc_feature: MA Experiment 108462 PARAMETER Experiment Name: At_Germinating_Seeds_cDNA_P Parameter: Age (day) Value: 2 vs. 0
  misc_feature: MA Experiment 108462 PARAMETER Experiment Name: At_Germinating_Seeds_cDNA_P Parameter: Tissue Value: Germinating Seeds
  misc_feature: MA Experiment ID: 108463 Result: Up-regulated in Transcription
  misc_feature: MA Experiment 108463 PARAMETER Experiment Name: At_Germinating_Seeds_cDNA_P Parameter: Age (day) Value: 3 vs. 0
  misc_feature: MA Experiment 108463 PARAMETER Experiment Name: At_Germinating_Seeds_cDNA_P Parameter: Tissue Value: Germinating Seeds
  misc_feature: MA Experiment ID: 108464 Result: Up-regulated in Transcription
  misc_feature: MA Experiment 108464 PARAMETER Experiment Name: At_Germinating_Seeds_cDNA_P Parameter: Age (day) Value: 4 vs. 0
  misc_feature: MA Experiment 108464 PARAMETER Experiment Name: At_Germinating_Seeds_cDNA_P Parameter: Tissue Value: Germinating Seeds
  misc_feature: MA Experiment ID: 108569 Result: Up-regulated in Transcription
  misc_feature: MA Experiment 108569 PARAMETER Experiment Name: At_0.001%_MeJA__cDNA_P Parameter: Timepoint (hr) Value: 6
  misc_feature: MA Experiment 108569 PARAMETER Experiment Name: At_0.001%_MeJA__cDNA_P Parameter: Tissue Value: Aerial
  misc_feature: MA Experiment 108569 PARAMETER Experiment Name: At_0.001%_MeJA__cDNA_P Parameter: Treatment Value: 0.001% MeJA vs. No Treatment
  misc_feature: MA Experiment ID: 108573 Result: Up-regulated in Transcription
  misc_feature: MA Experiment 108573 PARAMETER Experiment Name: At_Drought_cDNA_P Parameter: Timepoint (hr) Value: 6
  misc_feature: MA Experiment 108573 PARAMETER Experiment Name: At_Drought_cDNA_P Parameter: Tissue Value: Aerial
  misc_feature: MA Experiment 108573 PARAMETER Experiment Name: At_Drought_cDNA_P Parameter: Treatment Value: Drought vs. No Drought
  misc_feature: MA Experiment ID: 108576 Result: Down-regulated in Transcription
  misc_feature: MA Experiment 108576 PARAMETER Experiment Name: At_42deg_Heat_cDNA_P Parameter: Temperature (deg C) Value: 42 vs. 22
  misc_feature: MA Experiment 108576 PARAMETER Experiment Name: At_42deg_Heat_cDNA_P Parameter: Timepoint (hr) Value: 1
  misc_feature: MA Experiment 108576 PARAMETER Experiment Name: At_42deg_Heat_cDNA_P Parameter: Tissue Value: Aerial
  misc_feature: MA Experiment ID: 108579 Result: Down-regulated in Transcription
  misc_feature: MA Experiment 108579 PARAMETER Experiment Name: At_4deg_Cold_cDNA_P Parameter: Temperature (deg C) Value: 4 vs. 22
  misc_feature: MA Experiment 108579 PARAMETER Experiment Name: At_4deg_Cold_cDNA_P Parameter: Timepoint (hr) Value: 6
  misc_feature: MA Experiment 108579 PARAMETER Experiment Name: At_4deg_Cold_cDNA_P Parameter: Tissue Value: Aerial
  misc_feature: MA Experiment ID: 20000111 Result: Down-regulated in Transcription
  misc_feature: MA Experiment 20000111 PARAMETER Experiment Name: At_42deg_Heat_cDNA_P Parameter: Temperature (deg C) Value: 42 vs. 22
  misc_feature: MA Experiment 20000111 PARAMETER Experiment Name: At_42deg_Heat_cDNA_P Parameter: Timepoint (hr) Value: 6
  misc_feature: MA Experiment 20000111 PARAMETER Experiment Name: At_42deg_Heat_cDNA_P Parameter: Tissue Value: Aerial
  misc_feature: MA Experiment ID: 20000112 Result: Down-regulated in Transcription
  misc_feature: MA Experiment 20000112 PARAMETER Experiment Name: At_42deg_Heat_cDNA_P Parameter: Temperature (deg C) Value: 42 vs. 22
  misc_feature: MA Experiment 20000112 PARAMETER Experiment Name: At_42deg_Heat_cDNA_P Parameter: Timepoint (hr) Value: 2
  misc_feature: MA Experiment 20000112 PARAMETER Experiment Name: At_42deg_Heat_cDNA_P Parameter: Tissue Value: Aerial
  misc_feature: MA Experiment ID: 20000113 Result: Down-regulated in Transcription
  misc_feature: MA Experiment 20000113 PARAMETER Experiment Name: At_42deg_Heat_cDNA_P Parameter: Temperature (deg C) Value: 42 vs. 22
  misc_feature: MA Experiment 20000113 PARAMETER Experiment Name: At_42deg_Heat_cDNA_P Parameter: Timepoint (hr) Value: 8
  misc_feature: MA Experiment 20000113 PARAMETER Experiment Name: At_42deg_Heat_cDNA_P Parameter: Tissue Value: Aerial
  misc_feature: MA Experiment ID: 20000144 Result: Down-regulated in Transcription
  misc_feature: MA Experiment 20000144 PARAMETER Experiment Name: At_42deg_Heat_cDNA_P Parameter: Temperature (deg C) Value: 42 vs. 22
  misc_feature: MA Experiment 20000144 PARAMETER Experiment Name: At_42deg_Heat_cDNA_P Parameter: Timepoint (hr) Value: 1
  misc_feature: MA Experiment 20000144 PARAMETER Experiment Name: At_42deg_Heat_cDNA_P Parameter: Tissue Value: Aerial
  misc_feature: MA Experiment ID: 20000184 Result: Up-regulated in Transcription
  misc_feature: MA Experiment 20000184 PARAMETER Experiment Name: At_Shoots__P Parameter: Age (day) Value: 7
  misc_feature: MA Experiment 20000184 PARAMETER Experiment Name: At_Shoots__P Parameter: Tissue Value: Shoots vs. Whole Plant
  misc_feature: MA Experiment ID: 20000224 Result: Down-regulated in Transcription
  misc_feature: MA Experiment ID: 20000227 Result: Down-regulated in Transcription
  misc_feature: MA Experiment 20000227 PARAMETER Experiment Name: At_Root-Tips-vs-Tops_P Parameter: Tissue Value: Root Tips vs. Root Tops
  misc_feature: MA Experiment ID: 20000436 Result: Up-regulated in Transcription
  misc_feature: MA Experiment 20000436 PARAMETER Experiment Name: At_Drought_P Parameter: Age (day) Value: 7
  misc_feature: MA Experiment 20000436 PARAMETER Experiment Name: At_Drought_P Parameter: Organism Value: A. thaliana
  misc_feature: MA Experiment 20000436 PARAMETER Experiment Name: At_Drought_P Parameter: Plant Line Value: WS
  misc_feature: MA Experiment 20000436 PARAMETER Experiment Name: At_Drought_P Parameter: Timepoint (hr) Value: 12
  misc_feature: MA Experiment 20000436 PARAMETER Experiment Name: At_Drought_P Parameter: Tissue Value: Whole Plant
  misc_feature: MA Experiment 20000436 PARAMETER Experiment Name: At_Drought_P Parameter: Treatment Value: Drought vs. No Drought
  misc_feature: MA Experiment ID: 20000445 Result: Up-regulated in Transcription
  misc_feature: MA Experiment 20000445 PARAMETER Experiment Name: At_100uM_NAA__P Parameter: Age (day) Value: 14
  misc_feature: MA Experiment 20000445 PARAMETER Experiment Name: At_100uM_NAA__P Parameter: Organism Value: A. thaliana
  misc_feature: MA Experiment 20000445 PARAMETER Experiment Name: At_100uM_NAA__P Parameter: Plant Line Value: WS
  misc_feature: MA Experiment 20000445 PARAMETER Experiment Name: At_100uM_NAA__P Parameter: Timepoint (hr) Value: 6
  misc_feature: MA Experiment 20000445 PARAMETER Experiment Name: At_100uM_NAA__P Parameter: Tissue Value: Aerial
  misc_feature: MA Experiment 20000445 PARAMETER Experiment Name: At_100uM_NAA__P Parameter: Treatment Value: 100uM NAA vs. No Treatment
  misc_feature: MA Experiment ID: 20000495 Result: Up-regulated in Transcription
  misc_feature: MA Experiment 20000495 PARAMETER Experiment Name: At_Guard_Cells_P Parameter: Harvest Date Value: 8/2/2002
  misc_feature: MA Experiment 20000495 PARAMETER Experiment Name: At_Guard_Cells_P Parameter: Organism Value: A. thaliana
  misc_feature: MA Experiment 20000495 PARAMETER Experiment Name: At_Guard_Cells_P Parameter: Tissue Value: Guard Cells vs. Leaves
  misc_feature: MA Experiment ID: 20001247 Result: Up-regulated in Transcription
  misc_feature: MA Experiment 20001247 PARAMETER Experiment Name: At_Far-red-induction_P Parameter: Age (day) Value: 7
  misc_feature: MA Experiment 20001247 PARAMETER Experiment Name: At_Far-red-induction_P Parameter: Light Value: Far-red vs. White
  misc_feature: MA Experiment 20001247 PARAMETER Experiment Name: At_Far-red-induction_P Parameter: Organism Value: A. thaliana
  misc_feature: MA Experiment 20001247 PARAMETER Experiment Name: At_Far-red-induction_P Parameter: Plant Line Value: Columbia
  misc_feature: MA Experiment 20001247 PARAMETER Experiment Name: At_Far-red-induction_P Parameter: Timepoint (hr) Value: 1
  misc_feature: MA Experiment 20001247 PARAMETER Experiment Name: At_Far-red-induction_P Parameter: Tissue Value: Whole Plant
  misc_feature: MA Experiment ID: 20001248 Result: Up-regulated in Transcription
  misc_feature: MA Experiment 20001248 PARAMETER Experiment Name: At_Far-red-induction_P Parameter: Age (day) Value: 7
  misc_feature: MA Experiment 20001248 PARAMETER Experiment Name: At_Far-red-induction_P Parameter: Light Value: Far-red vs. White
  misc_feature: MA Experiment 20001248 PARAMETER Experiment Name: At_Far-red-induction_P Parameter: Organism Value: A. thaliana
  misc_feature: MA Experiment 20001248 PARAMETER Experiment Name: At_Far-red-induction_P Parameter: Plant Line Value: Columbia
  misc_feature: MA Experiment 20001248 PARAMETER Experiment Name: At_Far-red-induction_P Parameter: Timepoint (hr) Value: 4
  misc_feature: MA Experiment 20001248 PARAMETER Experiment Name: At_Far-red-induction_P Parameter: Tissue Value: Whole Plant
  misc_feature: MA Experiment ID: 20001450 Result: Up-regulated in Transcription
  misc_feature: MA Experiment 20001450 PARAMETER Experiment Name: At_Far-red-induction_P Parameter: Age (day) Value: 7
  misc_feature: MA Experiment 20001450 PARAMETER Experiment Name: At_Far-red-induction_P Parameter: Light Value: Far-red vs. White
  misc_feature: MA Experiment 20001450 PARAMETER Experiment Name: At_Far-red-induction_P Parameter: Organism Value: A. thaliana
  misc_feature: MA Experiment 20001450 PARAMETER Experiment Name: At_Far-red-induction_P Parameter: Plant Line Value: Columbia
  misc_feature: MA Experiment 20001450 PARAMETER Experiment Name: At_Far-red-induction_P Parameter: Timepoint (hr) Value: 8
  misc_feature: MA Experiment 20001450 PARAMETER Experiment Name: At_Far-red-induction_P Parameter: Tissue Value: Whole Plant
aactttttcaaaaaaaggaaaaaaaacagagctcactcattattatctctctaaaaaccctagctttctccatgggctttcccgtaggttacacagaggttttcttaccgaagcttttcgtacaaacgctttcgattctcggattcatcagaaccatcgtcttctctatcttccgcttcttgggtctctcagattttctcgaaatggatcaaacctggcccgattacacatcgtacccgacccgaatacccgaaacccgctcacctttctccgcactcctaattagagagatcctaccggttatcaaattcgaagagttaacgaattccggcgaagatctaccggaaaactgcgccgtttgtctatacgaattcgaaggagaacaagagatccggtggctgagaaattgcagacatatatttcaccggagctgtcttgaccgttggatggatcatgatcagaagacgtgtccactttgtagaacaccgtttgttccagatgagatgcaagaagagtttaatcaacggctatgggctgcttctggtgttcatgattttcactgtcccgtgaccgaattattatagaagaagccacgcttttctatctttttctgtgtcccttatgttcttttttgttttgactttcacccctctacttttgatgttgcttttttcacccctcttactgacatttagacttgccacgcttttatgtgtgtatatactccttacatatgaatgagagatgagcaataaatattaccgagacagg

SEQ ID NO: 36018 - protein, 193 aa, Arabidopsis thaliana
  peptide (1)..(193): Ceres Seq. ID no. 12393377
  misc_feature (117)..(159): Pfam Name: Zinc finger, C3HC4 type (RING finger) Pfam Description: Zinc finger, C3HC4 type (RING finger)
  misc_feature (24)..(179): Homolog of NCBI NO: 15233352 NR Description: RING-H2 finger protein RHA1a -like protein
  misc_feature (24)..(179): Homolog of NCBI NO: 11358776 NR Description: RING-H2 finger protein RHA1a [imported] -
  misc_feature (24)..(180): Homolog of NCBI NO: 15233350 NR Description: RING-H2 finger protein RHA1b
  misc_feature (24)..(180): Homolog of NCBI NO: 11358777 NR Description: RING-H2 finger protein RHA1b [imported] -
  misc_feature (91)..(184): Homolog of NCBI NO: 32488512 NR Description: OSJNBa0011J08.19 [Oryza sativa (japonica
  misc_feature (24)..(106): Homolog of NCBI NO: 32488512 NR Description: OSJNBa0011J08.19 [Oryza sativa (japonica
  misc_feature (24)..(180): Homolog of NCBI NO: 15222553 NR Description: putative RING zinc finger protein
  misc_feature (24)..(180): Homolog of NCBI NO: 15238072 NR Description: RING zinc finger protein-like
  misc_feature (24)..(180): Homolog of NCBI NO: 21554155 NR Description: RING zinc finger protein-like [Arabidopsis
  misc_feature (24)..(193): Homolog of NCBI NO: 15233117 NR Description: RING finger protein
LFQKKEKKQSSLIIISLKTLAFSMGFPVGYTEVFLPKLFVQTLSILGFIRTIVFSIFRFLGLSDFLEMDQTWPDYTSYPTRIPETRSPFSALLIREILPVIKFEELTNSGEDLPENCAVCLYEFEGEQEIRWLRNCRHIFHRSCLDRWMDHDQKTCPLCRTPFVPDEMQEEFNQRLWAASGVHDFHCPVTELL

SEQ ID NO: 36019 - protein, 170 aa, Arabidopsis thaliana
  peptide (1)..(170): Ceres Seq. ID no. 12393378
  misc_feature (94)..(136): Pfam Name: Zinc finger, C3HC4 type (RING finger) Pfam Description: Zinc finger, C3HC4 type (RING finger)
  misc_feature (1)..(156): Homolog of NCBI NO: 15233352 NR Description: RING-H2 finger protein RHA1a -like protein
  misc_feature (1)..(156): Homolog of NCBI NO: 11358776 NR Description: RING-H2 finger protein RHA1a [imported] -
  misc_feature (1)..(157): Homolog of NCBI NO: 15233350 NR Description: RING-H2 finger protein RHA1b
  misc_feature (1)..(157): Homolog of NCBI NO: 11358777 NR Description: RING-H2 finger protein RHA1b [imported] -
  misc_feature (68)..(161): Homolog of NCBI NO: 32488512 NR Description: OSJNBa0011J08.19 [Oryza sativa (japonica
  misc_feature (1)..(83): Homolog of NCBI NO: 32488512 NR Description: OSJNBa0011J08.19 [Oryza sativa (japonica
  misc_feature (1)..(157): Homolog of NCBI NO: 15222553 NR Description: putative RING zinc finger protein
  misc_feature (1)..(157): Homolog of NCBI NO: 15238072 NR Description: RING zinc finger protein-like
  misc_feature (1)..(157): Homolog of NCBI NO: 21554155 NR Description: RING zinc finger protein-like [Arabidopsis
  misc_feature (1)..(170): Homolog of NCBI NO: 15233117 NR Description: RING finger protein
MGFPVGYTEVFLPKLFVQTLSILGFIRTIVFSIFRFLGLSDFLEMDQTWPDYTSYPTRIPETRSPFSALLIREILPVIKFEELTNSGEDLPENCAVCLYEFEGEQEIRWLRNCRHIFHRSCLDRWMDHDQKTCPLCRTPFVPDEMQEEFNQRLWAASGVHDFHCPVTELL

SEQ ID NO: 36020 - protein, 126 aa, Arabidopsis thaliana
  peptide (1)..(126): Ceres Seq. ID no. 12393379
  misc_feature (50)..(92): Pfam Name: Zinc finger, C3HC4 type (RING finger) Pfam Description: Zinc finger, C3HC4 type (RING finger)
  misc_feature (1)..(112): Homolog of NCBI NO: 15233352 NR Description: RING-H2 finger protein RHA1a -like protein
  misc_feature (1)..(112): Homolog of NCBI NO: 11358776 NR Description: RING-H2 finger protein RHA1a [imported] -
  misc_feature (1)..(113): Homolog of NCBI NO: 15233350 NR Description: RING-H2 finger protein RHA1b
  misc_feature (1)..(113): Homolog of NCBI NO: 11358777 NR Description: RING-H2 finger protein RHA1b [imported] -
  misc_feature (24)..(117): Homolog of NCBI NO: 32488512 NR Description: OSJNBa0011J08.19 [Oryza sativa (japonica
  misc_feature (1)..(39): Homolog of NCBI NO: 32488512 NR Description: OSJNBa0011J08.19 [Oryza sativa (japonica
  misc_feature (1)..(113): Homolog of NCBI NO: 15222553 NR Description: putative RING zinc finger protein
  misc_feature (1)..(113): Homolog of NCBI NO: 15238072 NR Description: RING zinc finger protein-like
  misc_feature (1)..(113): Homolog of NCBI NO: 21554155 NR Description: RING zinc finger protein-like [Arabidopsis
  misc_feature (1)..(126): Homolog of NCBI NO: 15233117 NR Description: RING finger protein
MDQTWPDYTSYPTRIPETRSPFSALLIREILPVIKFEELTNSGEDLPENCAVCLYEFEGEQEIRWLRNCRHIFHRSCLDRWMDHDQKTCPLCRTPFVPDEMQEEFNQRLWAASGVHDFHCPVTELL

SEQ ID NO: 36021 - DNA, 1117 bp, Arabidopsis thaliana
  misc_feature (1)..(1117): Ceres Seq. ID no. 12334123
  misc_feature: MA Experiment ID: 108434 Result: Down-regulated in Transcription
  misc_feature: MA Experiment 108434 PARAMETER Experiment Name: At_Root_Tips_cDNA_P Parameter: Tissue Value: Root Tips
  misc_feature: MA Experiment ID: 108462 Result: Down-regulated in Transcription
  misc_feature: MA Experiment 108462 PARAMETER Experiment Name: At_Germinating_Seeds_cDNA_P Parameter: Age (day) Value: 2 vs. 0
  misc_feature: MA Experiment 108462 PARAMETER Experiment Name: At_Germinating_Seeds_cDNA_P Parameter: Tissue Value: Germinating Seeds
  misc_feature: MA Experiment ID: 108463 Result: Down-regulated in Transcription
  misc_feature: MA Experiment 108463 PARAMETER Experiment Name: At_Germinating_Seeds_cDNA_P Parameter: Age (day) Value: 3 vs. 0
  misc_feature: MA Experiment 108463 PARAMETER Experiment Name: At_Germinating_Seeds_cDNA_P Parameter: Tissue Value: Germinating Seeds
  misc_feature: MA Experiment ID: 108464 Result: Down-regulated in Transcription
  misc_feature: MA Experiment 108464 PARAMETER Experiment Name: At_Germinating_Seeds_cDNA_P Parameter: Age (day) Value: 4 vs. 0
  misc_feature: MA Experiment 108464 PARAMETER Experiment Name: At_Germinating_Seeds_cDNA_P Parameter: Tissue Value: Germinating Seeds
  misc_feature: MA Experiment ID: 108469 Result: Up-regulated in Transcription
  misc_feature: MA Experiment ID: 108488 Result: Down-regulated in Transcription
  misc_feature: MA Experiment ID: 108561 Result: Up-regulated in Transcription
  misc_feature: MA Experiment 108561 PARAMETER Experiment Name: At_100uM_ABA_cDNA_P Parameter: Timepoint (hr) Value: 6
  misc_feature: MA Experiment 108561 PARAMETER Experiment Name: At_100uM_ABA_cDNA_P Parameter: Tissue Value: Aerial
  misc_feature: MA Experiment 108561 PARAMETER Experiment Name: At_100uM_ABA_cDNA_P Parameter: Treatment Value: 100uM ABA vs. No Treatment
  misc_feature: MA Experiment ID: 108572 Result: Up-regulated in Transcription
  misc_feature: MA Experiment 108572 PARAMETER Experiment Name: At_Drought_cDNA_P Parameter: Timepoint (hr) Value: 1
  misc_feature: MA Experiment 108572 PARAMETER Experiment Name: At_Drought_cDNA_P Parameter: Tissue Value: Aerial
  misc_feature: MA Experiment 108572 PARAMETER Experiment Name: At_Drought_cDNA_P Parameter: Treatment Value: Drought vs. No Drought
  misc_feature: MA Experiment ID: 108573 Result: Up-regulated in Transcription
  misc_feature: MA Experiment 108573 PARAMETER Experiment Name: At_Drought_cDNA_P Parameter: Timepoint (hr) Value: 6
  misc_feature: MA Experiment 108573 PARAMETER Experiment Name: At_Drought_cDNA_P Parameter: Tissue Value: Aerial
  misc_feature: MA Experiment 108573 PARAMETER Experiment Name: At_Drought_cDNA_P Parameter: Treatment Value: Drought vs. No Drought
  misc_feature: MA Experiment ID: 108585 Result: Up-regulated in Transcription
  misc_feature: MA Experiment 108585 PARAMETER Experiment Name: At_5mM_NaNP_cDNA_P Parameter: Timepoint (hr) Value: 6
  misc_feature: MA Experiment 108585 PARAMETER Experiment Name: At_5mM_NaNP_cDNA_P Parameter: Tissue Value: Aerial
  misc_feature: MA Experiment 108585 PARAMETER Experiment Name: At_5mM_NaNP_cDNA_P Parameter: Treatment Value: null
  misc_feature: MA Experiment ID: 108595 Result: Up-regulated in Transcription
  misc_feature: MA Experiment 108595 PARAMETER Experiment Name: At_Ler-pi_Ovule_cDNA_P Parameter: Plant Line Value: null
  misc_feature: MA Experiment ID: 108605 Result: Up-regulated in Transcription
  misc_feature: MA Experiment 108605 PARAMETER Experiment Name: At_100uM_ABA_cDNA_P Parameter: Timepoint (hr) Value: 6
  misc_feature: MA Experiment 108605 PARAMETER Experiment Name: At_100uM_ABA_cDNA_P Parameter: Tissue Value: Aerial
  misc_feature: MA Experiment 108605 PARAMETER Experiment Name: At_100uM_ABA_cDNA_P Parameter: Treatment Value: 100uM ABA vs. No Treatment
  misc_feature: MA Experiment ID: 108607 Result: Up-regulated in Transcription
  misc_feature: MA Experiment 108607 PARAMETER Experiment Name: At_100uM_ABA_cDNA_P Parameter: Timepoint (hr) Value: 4
  misc_feature: MA Experiment 108607 PARAMETER Experiment Name: At_100uM_ABA_cDNA_P Parameter: Tissue Value: Aerial
  misc_feature: MA Experiment 108607 PARAMETER Experiment Name: At_100uM_ABA_cDNA_P Parameter: Treatment Value: 100uM ABA vs. No Treatment
  misc_feature: MA Experiment ID: 108608 Result: Up-regulated in Transcription
  misc_feature: MA Experiment 108608 PARAMETER Experiment Name: At_100uM_ABA_cDNA_P Parameter: Timepoint (hr) Value: 1
  misc_feature: MA Experiment 108608 PARAMETER Experiment Name: At_100uM_ABA_cDNA_P Parameter: Tissue Value: Aerial
  misc_feature: MA Experiment 108608 PARAMETER Experiment Name: At_100uM_ABA_cDNA_P Parameter: Treatment Value: 100uM ABA vs. No Treatment
  misc_feature: MA Experiment ID: 108609 Result: Up-regulated in Transcription
  misc_feature: MA Experiment 108609 PARAMETER Experiment Name: At_100uM_ABA_cDNA_P Parameter: Timepoint (hr) Value: 24
  misc_feature: MA Experiment 108609 PARAMETER Experiment Name: At_100uM_ABA_cDNA_P Parameter: Tissue Value: Aerial
  misc_feature: MA Experiment 108609 PARAMETER Experiment Name: At_100uM_ABA_cDNA_P Parameter: Treatment Value: 100uM ABA vs. No Treatment
  misc_feature: MA Experiment ID: 20000070 Result: Up-regulated in Transcription
  misc_feature: MA Experiment 20000070 PARAMETER Experiment Name: At_100uM_ABA_Mutants_cDNA_P Parameter: Plant Line Value: CS24
  misc_feature: MA Experiment 20000070 PARAMETER Experiment Name: At_100uM_ABA_Mutants_cDNA_P Parameter: Timepoint (hr) Value: 6
  misc_feature: MA Experiment 20000070 PARAMETER Experiment Name: At_100uM_ABA_Mutants_cDNA_P Parameter: Tissue Value: Aerial
  misc_feature: MA Experiment 20000070 PARAMETER Experiment Name: At_100uM_ABA_Mutants_cDNA_P Parameter: Treatment Value: 100uM ABA vs. No Treatment
  misc_feature: MA Experiment ID: 20000071 Result: Up-regulated in Transcription
  misc_feature: MA Experiment 20000071 PARAMETER Experiment Name: At_100uM_ABA_Mutants_cDNA_P Parameter: Plant Line Value: CS8104
  misc_feature: MA Experiment 20000071 PARAMETER Experiment Name: At_100uM_ABA_Mutants_cDNA_P Parameter: Timepoint (hr) Value: 6
  misc_feature: MA Experiment 20000071 PARAMETER Experiment Name: At_100uM_ABA_Mutants_cDNA_P Parameter: Tissue Value: Aerial
  misc_feature: MA Experiment 20000071 PARAMETER Experiment Name: At_100uM_ABA_Mutants_cDNA_P Parameter: Treatment Value: 100uM ABA vs. No Treatment
  misc_feature: MA Experiment ID: 20000072 Result: Up-regulated in Transcription
  misc_feature: MA Experiment 20000072 PARAMETER Experiment Name: At_100uM_ABA_Mutants_cDNA_P Parameter: Plant Line Value: CS8105
  misc_feature: MA Experiment 20000072 PARAMETER Experiment Name: At_100uM_ABA_Mutants_cDNA_P Parameter: Timepoint (hr) Value: 6
  misc_feature: MA Experiment 20000072 PARAMETER Experiment Name: At_100uM_ABA_Mutants_cDNA_P Parameter: Tissue Value: Aerial
  misc_feature: MA Experiment 20000072 PARAMETER Experiment Name: At_100uM_ABA_Mutants_cDNA_P Parameter: Treatment Value: 100uM ABA vs. No Treatment
  misc_feature: MA Experiment ID: 20000086 Result: Up-regulated in Transcription
  misc_feature: MA Experiment 20000086 PARAMETER Experiment Name: At_100uM_ABA_Mutants_cDNA_P Parameter: Plant Line Value: CS22
  misc_feature: MA Experiment 20000086 PARAMETER Experiment Name: At_100uM_ABA_Mutants_cDNA_P Parameter: Timepoint (hr) Value: 6
  misc_feature: MA Experiment 20000086 PARAMETER Experiment Name: At_100uM_ABA_Mutants_cDNA_P Parameter: Tissue Value: Aerial
  misc_feature: MA Experiment 20000086 PARAMETER Experiment Name: At_100uM_ABA_Mutants_cDNA_P Parameter: Treatment Value: 100uM ABA vs. No Treatment
  misc_feature: MA Experiment ID: 20000087 Result: Up-regulated in Transcription
  misc_feature: MA Experiment 20000087 PARAMETER Experiment Name: At_100uM_ABA_Mutants_cDNA_P Parameter: Plant Line Value: WS
  misc_feature: MA Experiment 20000087 PARAMETER Experiment Name: At_100uM_ABA_Mutants_cDNA_P Parameter: Timepoint (hr) Value: 6
  misc_feature: MA Experiment 20000087 PARAMETER Experiment Name: At_100uM_ABA_Mutants_cDNA_P Parameter: Tissue Value: Aerial
  misc_feature: MA Experiment 20000087 PARAMETER Experiment Name: At_100uM_ABA_Mutants_cDNA_P Parameter: Treatment Value: 100uM ABA vs. No Treatment
  misc_feature: MA Experiment ID: 20000088 Result: Up-regulated in Transcription
  misc_feature: MA Experiment 20000088 PARAMETER Experiment Name: At_100uM_ABA_Mutants_cDNA_P Parameter: Plant Line Value: Landsberg
  misc_feature: MA Experiment 20000088 PARAMETER Experiment Name: At_100uM_ABA_Mutants_cDNA_P Parameter: Timepoint (hr) Value: 6
  misc_feature: MA Experiment 20000088 PARAMETER Experiment Name: At_100uM_ABA_Mutants_cDNA_P Parameter: Tissue Value: Aerial
  misc_feature: MA Experiment 20000088 PARAMETER Experiment Name: At_100uM_ABA_Mutants_cDNA_P Parameter: Treatment Value: 100uM ABA vs. No Treatment
  misc_feature: MA Experiment ID: 20000090 Result: Up-regulated in Transcription
  misc_feature: MA Experiment ID: 20000117 Result: Up-regulated in Transcription
  misc_feature: MA Experiment 20000117 PARAMETER Experiment Name: At_100uM_ABA_Mutants_cDNA_P Parameter: Plant Line Value: Columbia
  misc_feature: MA Experiment 20000117 PARAMETER Experiment Name: At_100uM_ABA_Mutants_cDNA_P Parameter: Timepoint (hr) Value: 6
  misc_feature: MA Experiment 20000117 PARAMETER Experiment Name: At_100uM_ABA_Mutants_cDNA_P Parameter: Tissue Value: Aerial
  misc_feature: MA Experiment 20000117 PARAMETER Experiment Name: At_100uM_ABA_Mutants_cDNA_P Parameter: Treatment Value: 100uM ABA vs. No Treatment
  misc_feature: MA Experiment ID: 20000166 Result: Up-regulated in Transcription
  misc_feature: MA Experiment 20000166 PARAMETER Experiment Name: At_100uM_ABA_P Parameter: Age (day) Value: 14
  misc_feature: MA Experiment 20000166 PARAMETER Experiment Name: At_100uM_ABA_P Parameter: Organism Value: A. thaliana
  misc_feature: MA Experiment 20000166 PARAMETER Experiment Name: At_100uM_ABA_P Parameter: Plant Line Value: WS
  misc_feature: MA Experiment 20000166 PARAMETER Experiment Name: At_100uM_ABA_P Parameter: Timepoint (hr) Value: 1
  misc_feature: MA Experiment 20000166 PARAMETER Experiment Name: At_100uM_ABA_P Parameter: Tissue Value: Aerial
  misc_feature: MA Experiment 20000166 PARAMETER Experiment Name: At_100uM_ABA_P Parameter: Treatment Value: 100uM ABA vs. No Treatment
  misc_feature: MA Experiment ID: 20000169 Result: Up-regulated in Transcription
  misc_feature: MA Experiment 20000169 PARAMETER Experiment Name: At_100uM_ABA_P Parameter: Age (day) Value: 14
  misc_feature: MA Experiment 20000169 PARAMETER Experiment Name: At_100uM_ABA_P Parameter: Organism Value: A. thaliana
  misc_feature: MA Experiment 20000169 PARAMETER Experiment Name: At_100uM_ABA_P Parameter: Plant Line Value: WS
  misc_feature: MA Experiment 20000169 PARAMETER Experiment Name: At_100uM_ABA_P Parameter: Timepoint (hr) Value: 6
  misc_feature: MA Experiment 20000169 PARAMETER Experiment Name: At_100uM_ABA_P Parameter: Tissue Value: Aerial
  misc_feature: MA Experiment 20000169 PARAMETER Experiment Name: At_100uM_ABA_P Parameter: Treatment Value: 100uM ABA vs. No Treatment
  misc_feature: MA Experiment ID: 20000173 Result: Down-regulated in Transcription
  misc_feature: MA Experiment 20000173 PARAMETER Experiment Name: At_42deg_Heat_P Parameter: Age (day) Value: 14
  misc_feature: MA Experiment 20000173 PARAMETER Experiment Name: At_42deg_Heat_P Parameter: Organism Value: A. thaliana
  misc_feature: MA Experiment 20000173 PARAMETER Experiment Name: At_42deg_Heat_P Parameter: Plant Line Value: WS
  misc_feature: MA Experiment 20000173 PARAMETER Experiment Name: At_42deg_Heat_P Parameter: Temperature (deg C) Value: 42 vs. 22
  misc_feature: MA Experiment 20000173 PARAMETER Experiment Name: At_42deg_Heat_P Parameter: Timepoint (hr) Value: 6
  misc_feature: MA Experiment 20000173 PARAMETER Experiment Name: At_42deg_Heat_P Parameter: Tissue Value: Aerial
  misc_feature: MA Experiment ID: 20000182 Result: Up-regulated in Transcription
  misc_feature: MA Experiment 20000182 PARAMETER Experiment Name: At_2mM_SA_P Parameter: Age (day) Value: 14
  misc_feature: MA Experiment 20000182 PARAMETER Experiment Name: At_2mM_SA_P Parameter: Organism Value: A. thaliana
  misc_feature: MA Experiment 20000182 PARAMETER Experiment Name: At_2mM_SA_P Parameter: Plant Line Value: WS
  misc_feature: MA Experiment 20000182 PARAMETER Experiment Name: At_2mM_SA_P Parameter: Timepoint (hr) Value: 6
  misc_feature: MA Experiment 20000182 PARAMETER Experiment Name: At_2mM_SA_P Parameter: Tissue Value: Aerial
  misc_feature: MA Experiment 20000182 PARAMETER Experiment Name: At_2mM_SA_P Parameter: Treatment Value: 2mM SA vs. No Treatment
  misc_feature: MA Experiment ID: 20000184 Result: Down-regulated in Transcription
  misc_feature: MA Experiment 20000184 PARAMETER Experiment Name: At_Shoots__P Parameter: Age (day) Value: 7
  misc_feature: MA Experiment 20000184 PARAMETER Experiment Name: At_Shoots__P Parameter: Tissue Value: Shoots vs. Whole Plant
  misc_feature: MA Experiment ID: 20000185 Result: Down-regulated in Transcription
  misc_feature: MA Experiment 20000185 PARAMETER Experiment Name: At_Roots__P Parameter: Age (day) Value: 7 vs. 21
  misc_feature: MA Experiment 20000185 PARAMETER Experiment Name: At_Roots__P Parameter: Organism Value: A. thaliana
  misc_feature: MA Experiment 20000185 PARAMETER Experiment Name: At_Roots__P Parameter: Tissue Value: Roots vs. Whole Plant
  misc_feature: MA Experiment ID: 20000227 Result: Down-regulated in Transcription
  misc_feature: MA Experiment 20000227 PARAMETER Experiment Name: At_Root-Tips-vs-Tops_P Parameter: Tissue Value: Root Tips vs. Root Tops
  misc_feature: MA Experiment ID: 20000234 Result: Down-regulated in Transcription
  misc_feature: MA Experiment 20000234 PARAMETER Experiment Name: At_Siliques_P Parameter: Age (day) Value: 21
  misc_feature: MA Experiment 20000234 PARAMETER Experiment Name: At_Siliques_P Parameter: Organism Value: A. thaliana
  misc_feature: MA Experiment 20000234 PARAMETER Experiment Name: At_Siliques_P Parameter: Plant Line Value: WS
  misc_feature: MA Experiment 20000234 PARAMETER Experiment Name: At_Siliques_P Parameter: Tissue Value: Less Than 5mm Siliques vs. Whole Plant
  misc_feature: MA Experiment ID: 20000235 Result: Down-regulated in Transcription
  misc_feature: MA Experiment 20000235 PARAMETER Experiment Name: At_Siliques_P Parameter: Age (day) Value: 21
  misc_feature: MA Experiment 20000235 PARAMETER Experiment Name: At_Siliques_P Parameter: Organism Value: A. thaliana
  misc_feature: MA Experiment 20000235 PARAMETER Experiment Name: At_Siliques_P Parameter: Plant Line Value: WS
  misc_feature: MA Experiment 20000235 PARAMETER Experiment Name: At_Siliques_P Parameter: Tissue Value: 5-10mm Siliques vs. Whole Plant
  misc_feature: MA Experiment ID: 20000264 Result: Up-regulated in Transcription
  misc_feature: MA Experiment 20000264 PARAMETER Experiment Name: At_Open_Flower_P Parameter: Age (day) Value: 21
  misc_feature: MA Experiment 20000264 PARAMETER Experiment Name: At_Open_Flower_P Parameter: Plant Line Value: WS
  misc_feature: MA Experiment 20000264 PARAMETER Experiment Name: At_Open_Flower_P Parameter: Tissue Value: Open Flower vs. Whole Plant
  misc_feature: MA Experiment ID: 20000265 Result: Down-regulated in Transcription
  misc_feature: MA Experiment 20000265 PARAMETER Experiment Name: At_Open_Flower_P Parameter: Age (day) Value: 21
  misc_feature: MA Experiment 20000265 PARAMETER Experiment Name: At_Open_Flower_P Parameter: Plant Line Value: WS
  misc_feature: MA Experiment 20000265 PARAMETER Experiment Name: At_Open_Flower_P Parameter: Tissue Value: Closed Flower vs. Whole Plant
  misc_feature: MA Experiment ID: 20000267 Result: Up-regulated in Transcription
  misc_feature: MA Experiment 20000267 PARAMETER Experiment Name: At_Drought_P Parameter: Age (day) Value: 7
  misc_feature: MA Experiment 20000267 PARAMETER Experiment Name: At_Drought_P Parameter: Organism Value: A. thaliana
  misc_feature: MA Experiment 20000267 PARAMETER Experiment Name: At_Drought_P Parameter: Plant Line Value: WS
  misc_feature: MA Experiment 20000267 PARAMETER Experiment Name: At_Drought_P Parameter: Timepoint (hr) Value: 6
  misc_feature: MA Experiment 20000267 PARAMETER Experiment Name: At_Drought_P Parameter: Tissue Value: Whole Plant
  misc_feature: MA Experiment 20000267 PARAMETER Experiment Name: At_Drought_P Parameter: Treatment Value: Drought vs. No Drought
  misc_feature: MA Experiment ID: 20000269 Result: Up-regulated in Transcription
  misc_feature: MA Experiment 20000269 PARAMETER Experiment Name: At_1mM_KNO3_L-vs-H_Roots_P Parameter: Age (day) Value: 7,10,12
  misc_feature: MA Experiment 20000269 PARAMETER Experiment Name: At_1mM_KNO3_L-vs-H_Roots_P Parameter: Organism Value: A. thaliana
  misc_feature: MA Experiment 20000269 PARAMETER Experiment Name: At_1mM_KNO3_L-vs-H_Roots_P Parameter: Plant Line Value: WS
  misc_feature: MA Experiment 20000269 PARAMETER Experiment Name: At_1mM_KNO3_L-vs-H_Roots_P Parameter: Timepoint (day) Value: 7,10,12
  misc_feature: MA Experiment 20000269 PARAMETER Experiment Name: At_1mM_KNO3_L-vs-H_Roots_P Parameter: Tissue Value: Roots
  misc_feature: MA Experiment 20000269 PARAMETER Experiment Name: At_1mM_KNO3_L-vs-H_Roots_P Parameter: Treatment Value: 1mM KNO3 vs. 50mM KNO3
  misc_feature: MA Experiment ID: 20000286 Result: Down-regulated in Transcription
  misc_feature: MA Experiment 20000286 PARAMETER Experiment Name: At_Open_Flower_P Parameter: Age (day) Value: 21
  misc_feature: MA Experiment 20000286 PARAMETER Experiment Name: At_Open_Flower_P Parameter: Plant Line Value: WS
  misc_feature: MA Experiment 20000286 PARAMETER Experiment Name: At_Open_Flower_P Parameter: Tissue Value: Half Open vs. Whole Plant
  misc_feature: MA Experiment ID: 20000436 Result: Up-regulated in Transcription
  misc_feature: MA Experiment 20000436 PARAMETER Experiment Name: At_Drought_P Parameter: Age (day) Value: 7
  misc_feature: MA Experiment 20000436 PARAMETER Experiment Name: At_Drought_P Parameter: Organism Value: A. thaliana
  misc_feature: MA Experiment 20000436 PARAMETER Experiment Name: At_Drought_P Parameter: Plant Line Value: WS
  misc_feature: MA Experiment 20000436 PARAMETER Experiment Name: At_Drought_P Parameter: Timepoint (hr) Value: 12
  misc_feature: MA Experiment 20000436 PARAMETER Experiment Name: At_Drought_P Parameter: Tissue Value: Whole Plant
  misc_feature: MA Experiment 20000436 PARAMETER Experiment Name: At_Drought_P Parameter: Treatment Value: Drought vs. No Drought
  misc_feature: MA Experiment ID: 20000437 Result: Up-regulated in Transcription
  misc_feature: MA Experiment 20000437 PARAMETER Experiment Name: At_Drought_P Parameter: Age (day) Value: 8
  misc_feature: MA Experiment 20000437 PARAMETER Experiment Name: At_Drought_P Parameter: Organism Value: A. thaliana
  misc_feature: MA Experiment 20000437 PARAMETER Experiment Name: At_Drought_P Parameter: Plant Line Value: WS
  misc_feature: MA Experiment 20000437 PARAMETER Experiment Name: At_Drought_P Parameter: Timepoint (hr) Value: 24
  misc_feature: MA Experiment 20000437 PARAMETER Experiment Name: At_Drought_P Parameter: Tissue Value: Whole Plant
  misc_feature: MA Experiment 20000437 PARAMETER Experiment Name: At_Drought_P Parameter: Treatment Value: Drought vs. No Drought
  misc_feature: MA Experiment ID: 20000438 Result: Down-regulated in Transcription
  misc_feature: MA Experiment 20000438 PARAMETER Experiment Name: At_Shoots__P Parameter: Age (day) Value: 14
  misc_feature: MA Experiment 20000438 PARAMETER Experiment Name: At_Shoots__P Parameter: Tissue Value: Shoots vs. Whole Plant
  misc_feature: MA Experiment ID: 20000453 Result: Up-regulated in Transcription
  misc_feature: MA Experiment 20000453 PARAMETER Experiment Name: At_100uM_ABA_P Parameter: Age (day) Value: 15
  misc_feature: MA Experiment 20000453 PARAMETER Experiment Name: At_100uM_ABA_P Parameter: Organism Value: A. thaliana
  misc_feature: MA Experiment 20000453 PARAMETER Experiment Name: At_100uM_ABA_P Parameter: Plant Line Value: WS
  misc_feature: MA Experiment 20000453 PARAMETER Experiment Name: At_100uM_ABA_P Parameter: Timepoint (hr) Value: 24
  misc_feature: MA Experiment 20000453 PARAMETER Experiment Name: At_100uM_ABA_P Parameter: Tissue Value: Aerial
  misc_feature: MA Experiment 20000453 PARAMETER Experiment Name: At_100uM_ABA_P Parameter: Treatment Value: 100uM ABA vs. No Treatment
  misc_feature: MA Experiment ID: 20000527 Result: Down-regulated in Transcription
  misc_feature: MA Experiment 20000527 PARAMETER Experiment Name: At_10percent_PEG_P Parameter: Age (day) Value: 20
  misc_feature: MA Experiment 20000527 PARAMETER Experiment Name: At_10percent_PEG_P Parameter: Organism Value: A. thaliana
  misc_feature: MA Experiment 20000527 PARAMETER Experiment Name: At_10percent_PEG_P Parameter: Plant Line Value: WS
  misc_feature: MA Experiment 20000527 PARAMETER Experiment Name: At_10percent_PEG_P Parameter: Timepoint (day) Value: 20
  misc_feature: MA Experiment 20000527 PARAMETER Experiment Name: At_10percent_PEG_P Parameter: Tissue Value: Whole Plant
  misc_feature: MA Experiment 20000527 PARAMETER Experiment Name: At_10percent_PEG_P Parameter: Treatment Value: 10percent PEG vs. No Treatment
  misc_feature: MA Experiment ID: 20000573 Result: Up-regulated in Transcription
  misc_feature: MA Experiment 20000573 PARAMETER Experiment Name: At_100uM_ABA_Mutants__P Parameter: Organism Value: A. thaliana
  misc_feature: MA Experiment 20000573 PARAMETER Experiment Name: At_100uM_ABA_Mutants__P Parameter: Plant Line Value: CS22 vs. Ler wt
  misc_feature: MA Experiment 20000573 PARAMETER Experiment Name: At_100uM_ABA_Mutants__P Parameter: Timepoint (hr) Value: N/A
  misc_feature: MA Experiment 20000573 PARAMETER Experiment Name: At_100uM_ABA_Mutants__P Parameter: Tissue Value: Whole Plant
  misc_feature: MA Experiment 20000573 PARAMETER Experiment Name: At_100uM_ABA_Mutants__P Parameter: Treatment Value: None
  misc_feature: MA Experiment ID: 20000574 Result: Up-regulated in Transcription
  misc_feature: MA Experiment 20000574 PARAMETER Experiment Name: At_100uM_ABA_Mutants__P Parameter: Organism Value: A. thaliana
  misc_feature: MA Experiment 20000574 PARAMETER Experiment Name: At_100uM_ABA_Mutants__P Parameter: Plant Line Value: CS23 vs. Ler wt
  misc_feature: MA Experiment 20000574 PARAMETER Experiment Name: At_100uM_ABA_Mutants__P Parameter: Timepoint (hr) Value: N/A
  misc_feature: MA Experiment 20000574 PARAMETER Experiment Name: At_100uM_ABA_Mutants__P Parameter: Tissue Value: Whole Plant
  misc_feature: MA Experiment 20000574 PARAMETER Experiment Name: At_100uM_ABA_Mutants__P Parameter: Treatment Value: None
  misc_feature: MA Experiment ID: 20000794 Result: Up-regulated in Transcription
  misc_feature: MA Experiment 20000794 PARAMETER Experiment Name: At_Petals_P Parameter: Age (day) Value: 23-25 days
  misc_feature: MA Experiment 20000794 PARAMETER Experiment Name: At_Petals_P Parameter: Plant Line Value: WS
  misc_feature: MA Experiment 20000794 PARAMETER Experiment Name: At_Petals_P Parameter: Tissue Value: Petals vs. Whole plant
  misc_feature: MA Experiment ID: 20001248 Result: Up-regulated in Transcription
  misc_feature: MA Experiment 20001248 PARAMETER Experiment Name: At_Far-red-induction_P Parameter: Age (day) Value: 7
  misc_feature: MA Experiment 20001248 PARAMETER Experiment Name: At_Far-red-induction_P Parameter: Light Value: Far-red vs. White
  misc_feature: MA Experiment 20001248 PARAMETER Experiment Name: At_Far-red-induction_P Parameter: Organism Value: A. thaliana
  misc_feature: MA Experiment 20001248 PARAMETER Experiment Name: At_Far-red-induction_P Parameter: Plant Line Value: Columbia
  misc_feature: MA Experiment 20001248 PARAMETER Experiment Name: At_Far-red-induction_P Parameter: Timepoint (hr) Value: 4
  misc_feature: MA Experiment 20001248 PARAMETER Experiment Name: At_Far-red-induction_P Parameter: Tissue Value: Whole Plant
  misc_feature: MA Experiment ID: 20001450 Result: Up-regulated in Transcription
  misc_feature: MA Experiment 20001450 PARAMETER Experiment Name: At_Far-red-induction_P Parameter: Age (day) Value: 7
  misc_feature: MA Experiment 20001450 PARAMETER Experiment Name: At_Far-red-induction_P Parameter: Light Value: Far-red vs. White
  misc_feature: MA Experiment 20001450 PARAMETER Experiment Name: At_Far-red-induction_P Parameter: Organism Value: A. thaliana
  misc_feature: MA Experiment 20001450 PARAMETER Experiment Name: At_Far-red-induction_P Parameter: Plant Line Value: Columbia
  misc_feature: MA Experiment 20001450 PARAMETER Experiment Name: At_Far-red-induction_P Parameter: Timepoint (hr) Value: 8
  misc_feature: MA Experiment 20001450 PARAMETER Experiment Name: At_Far-red-induction_P Parameter: Tissue Value: Whole Plant
  misc_feature: MA Experiment ID: 20001451 Result: Up-regulated in Transcription
  misc_feature: MA Experiment 20001451 PARAMETER Experiment Name: At_Far-red-induction_P Parameter: Age (day) Value: 7
  misc_feature: MA Experiment 20001451 PARAMETER Experiment Name: At_Far-red-induction_P Parameter: Light Value: Far-red vs. White
  misc_feature: MA Experiment 20001451 PARAMETER Experiment Name: At_Far-red-induction_P Parameter: Organism Value: A. thaliana
  misc_feature: MA Experiment 20001451 PARAMETER Experiment Name: At_Far-red-induction_P Parameter: Plant Line Value: Columbia
  misc_feature: MA Experiment 20001451 PARAMETER Experiment Name: At_Far-red-induction_P Parameter: Timepoint (hr) Value: 24
  misc_feature: MA Experiment 20001451 PARAMETER Experiment Name: At_Far-red-induction_P Parameter: Tissue Value: Whole Plant
  misc_feature: MA Experiment ID: 20001770 Result: Up-regulated in Transcription
  misc_feature: MA Experiment 20001770 PARAMETER Experiment Name: At_Far-red-enriched-adult_P Parameter: Age (day) Value: 28
  misc_feature: MA Experiment 20001770 PARAMETER Experiment Name: At_Far-red-enriched-adult_P Parameter: Light Value: Far-red enriched vs. White
  misc_feature: MA Experiment 20001770 PARAMETER Experiment Name: At_Far-red-enriched-adult_P Parameter: Organism Value: A. thaliana
  misc_feature: MA Experiment 20001770 PARAMETER Experiment Name: At_Far-red-enriched-adult_P Parameter: Plant Line Value: Columbia
  misc_feature: MA Experiment 20001770 PARAMETER Experiment Name: At_Far-red-enriched-adult_P Parameter: Timepoint (hr) Value: 8
  misc_feature: MA Experiment 20001770 PARAMETER Experiment Name: At_Far-red-enriched-adult_P Parameter: Tissue Value: Aerial
  misc_feature: MA Experiment ID: 20001904 Result: Up-regulated in Transcription
  misc_feature: MA Experiment 20001904 PARAMETER Experiment Name: At_Drought_Reproduction_P Parameter: Age (day) Value: 37
  misc_feature: MA Experiment 20001904 PARAMETER Experiment Name: At_Drought_Reproduction_P Parameter: Organism Value: A. thaliana
  misc_feature: MA Experiment 20001904 PARAMETER Experiment Name: At_Drought_Reproduction_P Parameter: Plant Line Value: WS
  misc_feature: MA Experiment 20001904 PARAMETER Experiment Name: At_Drought_Reproduction_P Parameter: Timepoint (day) Value: 7
  misc_feature: MA Experiment 20001904 PARAMETER Experiment Name: At_Drought_Reproduction_P Parameter: Tissue Value: Rosettes
  misc_feature: MA Experiment 20001904 PARAMETER Experiment Name: At_Drought_Reproduction_P Parameter: Treatment Value: Drought vs. No Drought
aaaaatttcaatctttggctcacttctttgtttatctcatagctcttcaccaaaaccaatattttctcctttgttgttctttcttttctatcaaaactttctacttaaaatatcattcctttaaacaatgataagcaaggatccaagatcgagtttacctccagggtttcgatttcatccaacagatgaagaactcattctccattacctaaggaagaaagtttcctcttccccagtcccgctttcgattatcgccgatgtcgatatctacaaatccgatccatgggatttaccagctaaggctccatttggggagaaagagtggtattttttcagtccgagggataggaaatatccaaacggagcaagaccaaacagagcagctgcgtctggatattggaaagcaaccggaacaaataaattgattgcggtaccaaatggtgaagggtttcatgaaaacattgctggatgattgggttctttgccggatttacaagaaatcacacgcttcattgtcatcacctgatgttgctttggtcacaagcaatcaagagcatgaggaaaatgacaacgaaccattcgtagaccgcggaacctttttgccaaatttgcaaaatgatcaaccccttaaacgccagaagtcttcttgttcgttctcaaacttactagacgctacagatttgacgtttctcgcaaattttctaaacgaaaccccggaaaatcgttctgaatcagatttttctttcatgattggcaatttctctaatcctgacatttacggaaaccattacttggatcagaagttaccgcagttgagctctcccacttcagagacaagcggcatcggaagcaaaagagagagagtggattttgcggaagaaacgataaacgcttcgaagaagatgatgaacacatatagttacaataatagtatagatcaaatggatcatagtatgatgcaacaacctagtttcctgaaccaggaactcatgatgagttctcaccttcaatatcaaggctagagagaatattaatttgaaaacctaatcacgaattagggatcattcggtatgtgattgaaaagtaggagtcgttgttagtaatttaccaaactatt

SEQ ID NO: 36022 - protein, 194 aa, Arabidopsis thaliana
  peptide (1)..(194): Ceres Seq. ID no. 12334124
  misc_feature (1)..(25): Homolog of NCBI NO: 34894054 NR Description: putative NAM protein [Oryza sativa (japonica
  misc_feature (10)..(43): Homolog of NCBI NO: 18416983 NR Description: putative protein
  misc_feature (3)..(23): Homolog of NCBI NO: 34899790 NR Description: OJ1773_H01.21 [Oryza sativa (japonica
  misc_feature (10)..(54): Homolog of NCBI NO: 21554226 NR Description: NAM-like protein [Arabidopsis thaliana]
  misc_feature (10)..(77): Homolog of NCBI NO: 34902154 NR Description: Putative NAM (no apical meristem) protein
  misc_feature (10)..(25): Homolog of NCBI NO: 15232606 NR Description: putative jasmonic acid regulatory protein
  misc_feature (10)..(56): Homolog of NCBI NO: 20466640 NR Description: NAM-like protein [Arabidopsis thaliana]
  misc_feature (10)..(54): Homolog of NCBI NO: 15219110 NR Description: NAM-like protein
  misc_feature (10)..(194): Homolog of NCBI NO: 30679026 NR Description: No apical meristem (NAM) protein family
  misc_feature (10)..(194): Homolog of NCBI NO: 6223651 NR Description: NAM-like protein (no apical meristem)
MVKGFMKTLLDDWVLCRIYKKSHASLSSPDVALVTSNQEHEENDNEPFVDRGTFLPNLQNDQPLKRQKSSCSFSNLLDATDLTFLANFLNETPENRSESDFSFMIGNFSNPDIYGNHYLDQKLPQLSSPTSETSGIGSKRERVDFAEETINASKKMMNTYSYNNSIDQMDHSMMQQPSFLNQELMMSSHLQYQG

SEQ ID NO: 36023 - protein, 189 aa, Arabidopsis thaliana
  peptide (1)..(189): Ceres Seq. ID no. 12334125
  misc_feature (1)..(20): Homolog of NCBI NO: 34894054 NR Description: putative NAM protein [Oryza sativa (japonica
  misc_feature (5)..(38): Homolog of NCBI NO: 18416983 NR Description: putative protein
  misc_feature (1)..(18): Homolog of NCBI NO: 34899790 NR Description: OJ1773_H01.21 [Oryza sativa (japonica
  misc_feature (5)..(49): Homolog of NCBI NO: 21554226 NR Description: NAM-like protein [Arabidopsis thaliana]
  misc_feature (5)..(72): Homolog of NCBI NO: 34902154 NR Description: Putative NAM (no apical meristem) protein
  misc_feature (5)..(20): Homolog of NCBI NO: 15232606 NR Description: putative jasmonic acid regulatory protein
  misc_feature (5)..(51): Homolog of NCBI NO: 20466640 NR Description: NAM-like protein [Arabidopsis thaliana]
  misc_feature (5)..(49): Homolog of NCBI NO: 15219110 NR Description: NAM-like protein
  misc_feature (5)..(189): Homolog of NCBI NO: 30679026 NR Description: No apical meristem (NAM) protein family
  misc_feature (5)..(189): Homolog of NCBI NO: 6223651 NR Description: NAM-like protein (no apical meristem)
MKTLLDDWVLCRIYKKSHASLSSPDVALVTSNQEHEENDNEPFVDRGTFLPNLQNDQPLKRQKSSCSFSNLLDATDLTFLANFLNETPENRSESDFSFMIGNFSNPDIYGNHYLDQKLPQLSSPTSETSGIGSKRERVDFAEETINASKKMMNTYSYNNSIDQMDHSMMQQPSFLNQELMMSSHLQYQG

SEQ ID NO: 36024 - protein, 114 aa, Arabidopsis thaliana
  peptide (1)..(114): Ceres Seq. ID no. 12334126
  misc_feature (10)..(112): Pfam Name: No apical meristem (NAM) protein Pfam Description: No apical meristem (NAM) protein
  misc_feature (8)..(102): Homolog of NCBI NO: 34894054 NR Description: putative NAM protein [Oryza sativa (japonica
  misc_feature (4)..(100): Homolog of NCBI NO: 18416983 NR Description: putative protein
  misc_feature (10)..(100): Homolog of NCBI NO: 34899790 NR Description: OJ1773_H01.21 [Oryza sativa (japonica
  misc_feature (6)..(107): Homolog of NCBI NO: 21554226 NR Description: NAM-like protein [Arabidopsis thaliana]
  misc_feature (1)..(112): Homolog of NCBI NO: 34902154 NR Description: Putative NAM (no apical meristem) protein
  misc_feature (6)..(105): Homolog of NCBI NO: 15232606 NR Description: putative jasmonic acid regulatory protein
  misc_feature (6)..(107): Homolog of NCBI NO: 20466640 NR Description: NAM-like protein [Arabidopsis thaliana]
  misc_feature (6)..(107): Homolog of NCBI NO: 15219110 NR Description: NAM-like protein
  misc_feature (1)..(112): Homolog of NCBI NO: 30679026 NR Description: No apical meristem (NAM) protein family
  misc_feature (1)..(112): Homolog of NCBI NO: 6223651 NR Description: NAM-like protein (no apical meristem)
MISKDPRSSLPPGFRFHPTDEELILHYLRKKVSSSPVPLSIIADVDIYKSDPWDLPAKAPFGEKEWYFFSPRDRKYPNGARPNRAAASGYWKATGTNKLIAVPNGEGFHENIAG

SEQ ID NO: 36025 - DNA, 690 bp, Arabidopsis thaliana
  misc_feature (1)..(690): Ceres Seq. ID no. 12333682
  misc_feature: MA Experiment ID: 108461 Result: Down-regulated in Transcription
  misc_feature: MA Experiment 108461 PARAMETER Experiment Name: At_Germinating_Seeds_cDNA_P Parameter: Age (day) Value: 1 vs. 0
  misc_feature: MA Experiment 108461 PARAMETER Experiment Name: At_Germinating_Seeds_cDNA_P Parameter: Tissue Value: Germinating Seeds
  misc_feature: MA Experiment ID: 108469 Result: Up-regulated in Transcription
  misc_feature: MA Experiment ID: 108489 Result: Down-regulated in Transcription
  misc_feature: MA Experiment ID: 108576 Result: Up-regulated in Transcription
  misc_feature: MA Experiment 108576 PARAMETER Experiment Name: At_42deg_Heat_cDNA_P Parameter: Temperature (deg C) Value: 42 vs. 22
  misc_feature: MA Experiment 108576 PARAMETER Experiment Name: At_42deg_Heat_cDNA_P Parameter: Timepoint (hr) Value: 1
  misc_feature: MA Experiment 108576 PARAMETER Experiment Name: At_42deg_Heat_cDNA_P Parameter: Tissue Value: Aerial
  misc_feature: MA Experiment ID: 108577 Result: Up-regulated in Transcription
  misc_feature: MA Experiment 108577 PARAMETER Experiment Name: At_42deg_Heat_cDNA_P Parameter: Temperature (deg C) Value: 42 vs. 22
  misc_feature: MA Experiment 108577 PARAMETER Experiment Name: At_42deg_Heat_cDNA_P Parameter: Timepoint (hr) Value: 6
  misc_feature: MA Experiment 108577 PARAMETER Experiment Name: At_42deg_Heat_cDNA_P Parameter: Tissue Value: Aerial
  misc_feature: MA Experiment ID: 108585 Result: Up-regulated in Transcription
  misc_feature: MA Experiment 108585 PARAMETER Experiment Name: At_5mM_NaNP_cDNA_P Parameter: Timepoint (hr) Value: 6
  misc_feature: MA Experiment 108585 PARAMETER Experiment Name: At_5mM_NaNP_cDNA_P Parameter: Tissue Value: Aerial
  misc_feature: MA Experiment 108585 PARAMETER Experiment Name: At_5mM_NaNP_cDNA_P Parameter: Treatment Value: null
  misc_feature: MA Experiment ID: 108595 Result: Up-regulated in Transcription
  misc_feature: MA Experiment 108595 PARAMETER Experiment Name: At_Ler-pi_Ovule_cDNA_P Parameter: Plant Line Value: null
  misc_feature: MA Experiment ID: 108667 Result: Up-regulated in Transcription
  misc_feature: MA Experiment 108667 PARAMETER Experiment Name: At_2mM_SA_cDNA_P Parameter: Plant Line Value: WS
  misc_feature: MA Experiment 108667 PARAMETER Experiment Name: At_2mM_SA_cDNA_P Parameter: Timepoint (hr) Value: 1
  misc_feature: MA Experiment 108667 PARAMETER Experiment Name: At_2mM_SA_cDNA_P Parameter: Treatment Value: 2mM SA vs. No Treatment
  misc_feature: MA Experiment ID: 108668 Result: Up-regulated in Transcription
  misc_feature: MA Experiment 108668 PARAMETER Experiment Name: At_2mM_SA_cDNA_P Parameter: Plant Line Value: WS
  misc_feature: MA Experiment 108668 PARAMETER Experiment Name: At_2mM_SA_cDNA_P Parameter: Timepoint (hr) Value: 6
  misc_feature: MA Experiment 108668 PARAMETER Experiment Name: At_2mM_SA_cDNA_P Parameter: Treatment Value: 2mM SA vs. No Treatment
  misc_feature: MA Experiment ID: 20000069 Result: Up-regulated in Transcription
  misc_feature: MA Experiment 20000069 PARAMETER Experiment Name: At_100uM_ABA_Mutants_cDNA_P Parameter: Plant Line Value: CS23
  misc_feature: MA Experiment 20000069 PARAMETER Experiment Name: At_100uM_ABA_Mutants_cDNA_P Parameter: Timepoint (hr) Value: 6
  misc_feature: MA Experiment 20000069 PARAMETER Experiment Name: At_100uM_ABA_Mutants_cDNA_P Parameter: Tissue Value: Aerial
  misc_feature: MA Experiment 20000069 PARAMETER Experiment Name: At_100uM_ABA_Mutants_cDNA_P Parameter: Treatment Value: 100uM ABA vs. No Treatment
  misc_feature: MA Experiment ID: 20000070 Result: Up-regulated in Transcription
  misc_feature: MA Experiment 20000070 PARAMETER Experiment Name: At_100uM_ABA_Mutants_cDNA_P Parameter: Plant Line Value: CS24
  misc_feature: MA Experiment 20000070 PARAMETER Experiment Name: At_100uM_ABA_Mutants_cDNA_P Parameter: Timepoint (hr) Value: 6
  misc_feature: MA Experiment 20000070 PARAMETER Experiment Name: At_100uM_ABA_Mutants_cDNA_P Parameter: Tissue Value: Aerial
  misc_feature: MA Experiment 20000070 PARAMETER Experiment Name: At_100uM_ABA_Mutants_cDNA_P Parameter: Treatment Value: 100uM ABA vs. No Treatment
  misc_feature: MA Experiment ID: 20000090 Result: Up-regulated in Transcription
  misc_feature: MA Experiment ID: 20000113 Result: Up-regulated in Transcription
  misc_feature: MA Experiment 20000113 PARAMETER Experiment Name: At_42deg_Heat_cDNA_P Parameter: Temperature (deg C) Value: 42 vs. 22
  misc_feature: MA Experiment 20000113 PARAMETER Experiment Name: At_42deg_Heat_cDNA_P Parameter: Timepoint (hr) Value: 8
  misc_feature: MA Experiment 20000113 PARAMETER Experiment Name: At_42deg_Heat_cDNA_P Parameter: Tissue Value: Aerial
  misc_feature: MA Experiment ID: 20000144 Result: Up-regulated in Transcription
  misc_feature: MA Experiment 20000144 PARAMETER Experiment Name: At_42deg_Heat_cDNA_P Parameter: Temperature (deg C) Value: 42 vs. 22
  misc_feature: MA Experiment 20000144 PARAMETER Experiment Name: At_42deg_Heat_cDNA_P Parameter: Timepoint (hr) Value: 1
  misc_feature: MA Experiment 20000144 PARAMETER Experiment Name: At_42deg_Heat_cDNA_P Parameter: Tissue Value: Aerial
  misc_feature: MA Experiment ID: 20000171 Result: Up-regulated in Transcription
  misc_feature: MA Experiment 20000171 PARAMETER Experiment Name: At_42deg_Heat_P Parameter: Age (day) Value: 14
  misc_feature: MA Experiment 20000171 PARAMETER Experiment Name: At_42deg_Heat_P Parameter: Organism Value: A. thaliana
  misc_feature: MA Experiment 20000171 PARAMETER Experiment Name: At_42deg_Heat_P Parameter: Plant Line Value: WS
  misc_feature: MA Experiment 20000171 PARAMETER Experiment Name: At_42deg_Heat_P Parameter: Temperature (deg C) Value: 42 vs. 22
  misc_feature: MA Experiment 20000171 PARAMETER Experiment Name: At_42deg_Heat_P Parameter: Timepoint (hr) Value: 1
  misc_feature: MA Experiment 20000171 PARAMETER Experiment Name: At_42deg_Heat_P Parameter: Tissue Value: Aerial
  misc_feature: MA Experiment ID: 20000173 Result: Up-regulated in Transcription
  misc_feature: MA Experiment 20000173 PARAMETER Experiment Name: At_42deg_Heat_P Parameter: Age (day) Value: 14
  misc_feature: MA Experiment 20000173 PARAMETER Experiment Name: At_42deg_Heat_P Parameter: Organism Value: A. thaliana
  misc_feature: MA Experiment 20000173 PARAMETER Experiment Name: At_42deg_Heat_P Parameter: Plant Line Value: WS
  misc_feature: MA Experiment 20000173 PARAMETER Experiment Name: At_42deg_Heat_P Parameter: Temperature (deg C) Value: 42 vs. 22
  misc_feature: MA Experiment 20000173 PARAMETER Experiment Name: At_42deg_Heat_P Parameter: Timepoint (hr) Value: 6
  misc_feature: MA Experiment 20000173 PARAMETER Experiment Name: At_42deg_Heat_P Parameter: Tissue Value: Aerial
  misc_feature: MA Experiment ID: 20000179 Result: Up-regulated in Transcription
  misc_feature: MA Experiment 20000179 PARAMETER Experiment Name: At_Germinating_Seeds_P Parameter: Age (hr) Value: 6 vs. 0
  misc_feature: MA Experiment 20000179 PARAMETER Experiment Name: At_Germinating_Seeds_P Parameter: Tissue Value: Germinating Seeds
  misc_feature: MA Experiment ID: 20000182 Result: Up-regulated in Transcription
  misc_feature: MA Experiment 20000182 PARAMETER Experiment Name: At_2mM_SA_P Parameter: Age (day) Value: 14
  misc_feature: MA Experiment 20000182 PARAMETER Experiment Name: At_2mM_SA_P Parameter: Organism Value: A. thaliana
  misc_feature: MA Experiment 20000182 PARAMETER Experiment Name: At_2mM_SA_P Parameter: Plant Line Value: WS
  misc_feature: MA Experiment 20000182 PARAMETER Experiment Name: At_2mM_SA_P Parameter: Timepoint (hr) Value: 6
  misc_feature: MA Experiment 20000182 PARAMETER Experiment Name: At_2mM_SA_P Parameter: Tissue Value: Aerial
  misc_feature: MA Experiment 20000182 PARAMETER Experiment Name: At_2mM_SA_P Parameter: Treatment Value: 2mM SA vs. No Treatment
  misc_feature: MA Experiment ID: 20000227 Result: Up-regulated in Transcription
  misc_feature: MA Experiment 20000227 PARAMETER Experiment Name: At_Root-Tips-vs-Tops_P Parameter: Tissue Value: Root Tips vs. Root Tops
  misc_feature: MA Experiment ID: 20000437 Result: Up-regulated in Transcription
  misc_feature: MA Experiment 20000437 PARAMETER Experiment Name: At_Drought_P Parameter: Age (day) Value: 8
  misc_feature: MA Experiment 20000437 PARAMETER Experiment Name: At_Drought_P Parameter: Organism Value: A. thaliana
  misc_feature: MA Experiment 20000437 PARAMETER Experiment Name: At_Drought_P Parameter: Plant Line Value: WS
  misc_feature: MA Experiment 20000437 PARAMETER Experiment Name: At_Drought_P Parameter: Timepoint (hr) Value: 24
  misc_feature: MA Experiment 20000437 PARAMETER Experiment Name: At_Drought_P Parameter: Tissue Value: Whole Plant
  misc_feature: MA Experiment 20000437 PARAMETER Experiment Name: At_Drought_P Parameter: Treatment Value: Drought vs. No Drought
  misc_feature: MA Experiment ID: 20000453 Result: Up-regulated in Transcription
  misc_feature: MA Experiment 20000453 PARAMETER Experiment Name: At_100uM_ABA_P Parameter: Age (day) Value: 15
  misc_feature: MA Experiment 20000453 PARAMETER Experiment Name: At_100uM_ABA_P Parameter: Organism Value: A. thaliana
  misc_feature: MA Experiment 20000453 PARAMETER Experiment Name: At_100uM_ABA_P Parameter: Plant Line Value: WS
  misc_feature: MA Experiment 20000453 PARAMETER Experiment Name: At_100uM_ABA_P Parameter: Timepoint (hr) Value: 24
  misc_feature: MA Experiment 20000453 PARAMETER Experiment Name: At_100uM_ABA_P Parameter: Tissue Value: Aerial
  misc_feature: MA Experiment 20000453 PARAMETER Experiment Name: At_100uM_ABA_P Parameter: Treatment Value: 100uM ABA vs. No Treatment
  misc_feature: MA Experiment ID: 20000456 Result: Up-regulated in Transcription
  misc_feature: MA Experiment 20000456 PARAMETER Experiment Name: At_100uM_BA_P Parameter: Age (day) Value: 14
  misc_feature: MA Experiment 20000456 PARAMETER Experiment Name: At_100uM_BA_P Parameter: Organism Value: A. thaliana
  misc_feature: MA Experiment 20000456 PARAMETER Experiment Name: At_100uM_BA_P Parameter: Plant Line Value: WS
  misc_feature: MA Experiment 20000456 PARAMETER Experiment Name: At_100uM_BA_P Parameter: Timepoint (hr) Value: 6
  misc_feature: MA Experiment 20000456 PARAMETER Experiment Name: At_100uM_BA_P Parameter: Tissue Value: Aerial
  misc_feature: MA Experiment 20000456 PARAMETER Experiment Name: At_100uM_BA_P Parameter: Treatment Value: 100uM BA vs. No Treatment
  misc_feature: MA Experiment ID: 20000573 Result: Down-regulated in Transcription
  misc_feature: MA Experiment 20000573 PARAMETER Experiment Name: At_100uM_ABA_Mutants__P Parameter: Organism Value: A. thaliana
  misc_feature: MA Experiment 20000573 PARAMETER Experiment Name: At_100uM_ABA_Mutants__P Parameter: Plant Line Value: CS22 vs. Ler wt
  misc_feature: MA Experiment 20000573 PARAMETER Experiment Name: At_100uM_ABA_Mutants__P Parameter: Timepoint (hr) Value: N/A
  misc_feature: MA Experiment 20000573 PARAMETER Experiment Name: At_100uM_ABA_Mutants__P Parameter: Tissue Value: Whole Plant
  misc_feature: MA Experiment 20000573 PARAMETER Experiment Name: At_100uM_ABA_Mutants__P Parameter: Treatment Value: None
  misc_feature: MA Experiment ID: 20000709 Result: Up-regulated in Transcription
  misc_feature: MA Experiment 20000709 PARAMETER Experiment Name: At_15mM_NH4NO3_L-to-H_P Parameter: Age (hr) Value: 14
  misc_feature: MA Experiment 20000709 PARAMETER Experiment Name: At_15mM_NH4NO3_L-to-H_P Parameter: Organism Value: A. thaliana
  misc_feature: MA Experiment 20000709 PARAMETER Experiment Name: At_15mM_NH4NO3_L-to-H_P Parameter: Plant Line Value: WS
  misc_feature: MA Experiment 20000709 PARAMETER Experiment Name: At_15mM_NH4NO3_L-to-H_P Parameter: Timepoint (hr) Value: 4
  misc_feature: MA Experiment 20000709 PARAMETER Experiment Name: At_15mM_NH4NO3_L-to-H_P Parameter: Tissue Value: Aerial
  misc_feature: MA Experiment 20000709 PARAMETER Experiment Name: At_15mM_NH4NO3_L-to-H_P Parameter: Treatment Value: 15mM NH4NO3 vs. 30mM Mannitol
  misc_feature: MA Experiment ID: 20001248 Result: Down-regulated in Transcription
  misc_feature: MA Experiment 20001248 PARAMETER Experiment Name: At_Far-red-induction_P Parameter: Age (day) Value: 7
  misc_feature: MA Experiment 20001248 PARAMETER Experiment Name: At_Far-red-induction_P Parameter: Light Value: Far-red vs. White
  misc_feature: MA Experiment 20001248 PARAMETER Experiment Name: At_Far-red-induction_P Parameter: Organism Value: A. thaliana
  misc_feature: MA Experiment 20001248 PARAMETER Experiment Name: At_Far-red-induction_P Parameter: Plant Line Value: Columbia
  misc_feature: MA Experiment 20001248 PARAMETER Experiment Name: At_Far-red-induction_P Parameter: Timepoint (hr) Value: 4
  misc_feature: MA Experiment 20001248 PARAMETER Experiment Name: At_Far-red-induction_P Parameter: Tissue Value: Whole Plant
  misc_feature: MA Experiment ID: 20001450 Result: Down-regulated in Transcription
  misc_feature: MA Experiment 20001450 PARAMETER Experiment Name: At_Far-red-induction_P Parameter: Age (day) Value: 7
  misc_feature: MA Experiment 20001450 PARAMETER Experiment Name: At_Far-red-induction_P Parameter: Light Value: Far-red vs. White
  misc_feature: MA Experiment 20001450 PARAMETER Experiment Name: At_Far-red-induction_P Parameter: Organism Value: A. thaliana
  misc_feature: MA Experiment 20001450 PARAMETER Experiment Name: At_Far-red-induction_P Parameter: Plant Line Value: Columbia
  misc_feature: MA Experiment 20001450 PARAMETER Experiment Name: At_Far-red-induction_P Parameter: Timepoint (hr) Value: 8
  misc_feature: MA Experiment 20001450 PARAMETER Experiment Name: At_Far-red-induction_P Parameter: Tissue Value: Whole Plant
  misc_feature: MA Experiment ID: 20001555 Result: Up-regulated in Transcription
  misc_feature: MA Experiment 20001555 PARAMETER Experiment Name: At_Drought_Soil_Dry_P Parameter: Age (day) Value: 24
  misc_feature: MA Experiment 20001555 PARAMETER Experiment Name: At_Drought_Soil_Dry_P Parameter: Organism Value: A. thaliana
  misc_feature: MA Experiment 20001555 PARAMETER Experiment Name: At_Drought_Soil_Dry_P Parameter: Plant Line Value: WS
  misc_feature: MA Experiment 20001555 PARAMETER Experiment Name: At_Drought_Soil_Dry_P Parameter: Post Timepoint (hr) Value: None
  misc_feature: MA Experiment 20001555 PARAMETER Experiment Name: At_Drought_Soil_Dry_P Parameter: Post-Treatment Value: None
  misc_feature: MA Experiment 20001555 PARAMETER Experiment Name: At_Drought_Soil_Dry_P Parameter: Timepoint (day) Value: 10
  misc_feature: MA Experiment 20001555 PARAMETER Experiment Name: At_Drought_Soil_Dry_P Parameter: Treatment Value: Drought vs. No Drought
  misc_feature: MA Experiment ID: 20001556 Result: Up-regulated in Transcription
  misc_feature: MA Experiment 20001556 PARAMETER Experiment Name: At_Drought_Soil_Dry_P Parameter: Age (day) Value: 26
  misc_feature: MA Experiment 20001556 PARAMETER Experiment Name: At_Drought_Soil_Dry_P Parameter: Organism Value: A. thaliana
  misc_feature: MA Experiment 20001556 PARAMETER Experiment Name: At_Drought_Soil_Dry_P Parameter: Plant Line Value: WS
  misc_feature: MA Experiment 20001556 PARAMETER Experiment Name: At_Drought_Soil_Dry_P Parameter: Post Timepoint (hr) Value: None
  misc_feature: MA Experiment 20001556 PARAMETER Experiment Name: At_Drought_Soil_Dry_P Parameter: Post-Treatment Value: None
  misc_feature: MA Experiment 20001556 PARAMETER Experiment Name: At_Drought_Soil_Dry_P Parameter: Timepoint (day) Value: 12
  misc_feature: MA Experiment 20001556 PARAMETER Experiment Name: At_Drought_Soil_Dry_P Parameter: Treatment Value: Drought vs. No Drought
  misc_feature: MA Experiment ID: 20001560 Result: Up-regulated in Transcription
  misc_feature: MA Experiment 20001560 PARAMETER Experiment Name: At_Drought_Soil_Dry_P Parameter: Age (day) Value: 28
  misc_feature: MA Experiment 20001560 PARAMETER Experiment Name: At_Drought_Soil_Dry_P Parameter: Organism Value: A. thaliana
  misc_feature: MA Experiment 20001560 PARAMETER Experiment Name: At_Drought_Soil_Dry_P Parameter: Plant Line Value: WS
  misc_feature: MA Experiment 20001560 PARAMETER Experiment Name: At_Drought_Soil_Dry_P Parameter: Post Timepoint (hr) Value: None
  misc_feature: MA Experiment 20001560 PARAMETER Experiment Name: At_Drought_Soil_Dry_P Parameter: Post-Treatment Value: None
  misc_feature: MA Experiment 20001560 PARAMETER Experiment Name: At_Drought_Soil_Dry_P Parameter: Timepoint (day) Value: 14
  misc_feature: MA Experiment 20001560 PARAMETER Experiment Name: At_Drought_Soil_Dry_P Parameter: Treatment Value: Drought vs. No Drought
  misc_feature: MA Experiment ID: 20001768 Result: Up-regulated in Transcription
  misc_feature: MA Experiment 20001768 PARAMETER Experiment Name: At_Far-red-enriched-adult_P Parameter: Age (day) Value: 28
  misc_feature: MA Experiment 20001768 PARAMETER Experiment Name: At_Far-red-enriched-adult_P Parameter: Light Value: Far-red enriched vs. White
  misc_feature: MA Experiment 20001768 PARAMETER Experiment Name: At_Far-red-enriched-adult_P Parameter: Organism Value: A. thaliana
  misc_feature: MA Experiment 20001768 PARAMETER Experiment Name: At_Far-red-enriched-adult_P Parameter: Plant Line Value: Columbia
  misc_feature: MA Experiment 20001768 PARAMETER Experiment Name: At_Far-red-enriched-adult_P Parameter: Timepoint (hr) Value: 1
  misc_feature: MA Experiment 20001768 PARAMETER Experiment Name: At_Far-red-enriched-adult_P Parameter: Tissue Value: Aerial
  misc_feature: MA Experiment ID: 20001904 Result: Up-regulated in Transcription
  misc_feature: MA Experiment 20001904 PARAMETER Experiment Name: At_Drought_Reproduction_P Parameter: Age (day) Value: 37
  misc_feature: MA Experiment 20001904 PARAMETER Experiment Name: At_Drought_Reproduction_P Parameter: Organism Value: A. thaliana
  misc_feature: MA Experiment 20001904 PARAMETER Experiment Name: At_Drought_Reproduction_P Parameter: Plant Line Value: WS
  misc_feature: MA Experiment 20001904 PARAMETER Experiment Name: At_Drought_Reproduction_P Parameter: Timepoint (day) Value: 7
  misc_feature: MA Experiment 20001904 PARAMETER Experiment Name: At_Drought_Reproduction_P Parameter: Tissue Value: Rosettes
  misc_feature: MA Experiment 20001904 PARAMETER Experiment Name: At_Drought_Reproduction_P Parameter: Treatment Value: Drought vs. No Drought
  misc_feature: MA Experiment ID: 20001910 Result: Up-regulated in Transcription
  misc_feature: MA Experiment 20001910 PARAMETER Experiment Name: At_Drought_Reproduction_P Parameter: Age (day) Value: 37
  misc_feature: MA Experiment 20001910 PARAMETER Experiment Name: At_Drought_Reproduction_P Parameter: Organism Value: A. thaliana
  misc_feature: MA Experiment 20001910 PARAMETER Experiment Name: At_Drought_Reproduction_P Parameter: Plant Line Value: WS
  misc_feature: MA Experiment 20001910 PARAMETER Experiment Name: At_Drought_Reproduction_P Parameter: Timepoint (day) Value: 7
  misc_feature: MA Experiment 20001910 PARAMETER Experiment Name: At_Drought_Reproduction_P Parameter: Tissue Value: Flowers
  misc_feature: MA Experiment 20001910 PARAMETER Experiment Name: At_Drought_Reproduction_P Parameter: Treatment Value: Drought vs. No Drought
atcagaaatcgaaaaatcaaagttctcaagaagatatcaacaaaaaaaaagtaaattctttaaaatgtcgatgattccaagtttcttcaacaacaacagacgaagcaacatctttgatccattctctcttgacgtatgggatccattcaaggaactaacatcatcatcactttctcgtgagaactcagcgatcgtgaacgcacgtgtggactggagagagacgcctgaggcgcacgtgtttaaagctgacttgcctggattgaagaaggaggaagttaaagttgagattgaggaggatagtgttttgaagatcagtggagagagacacgtggagaaagaagataagaatgacacgtggcaccgtgtggagagatcgagtggacagtttacgaggaggtttaggttgccggagaatgtgaagatggatcaggttaaggctgcgatggagaatggtgtgttgactgttacggtgcctaaggctgagactaagaaggctgatgttaagtctattcagatctctggttgagtaatgggttcgagttttatcatcggagttgcttgtgtttttgtcatggttatggttcatgttttacttgagtgtgtgagtcctctatctaaattataataatctccgattgagctatgaattatgatgtatcggatacatttgatcctaatgaagtatggaat

SEQ ID NO: 36026 - protein, 174 aa, Arabidopsis thaliana
  peptide (1)..(174): Ceres Seq. ID no. 12333683
  misc_feature (22)..(174): Homolog of NCBI NO: 123538 NR Description: 17.5 KD CLASS I HEAT SHOCK PROTEIN (HSP 17.5-M)
  misc_feature (22)..(174): Homolog of NCBI NO: 25809052 NR Description: heat shock protein [Pisum sativum]
  misc_feature (22)..(173): Homolog of NCBI NO: 18073561 NR Description: 20.5 kDa heat-shock protein [Helianthus annuus]
  misc_feature (22)..(174): Homolog of NCBI NO: 224545 NR Description: protein,small heat shock
  misc_feature (22)..(174): Homolog of NCBI NO: 123539 NR Description: 17.5 KD CLASS I HEAT SHOCK PROTEIN (HSP 17.5-E)
  misc_feature (22)..(174): Homolog of NCBI NO: 18073562 NR Description: 17.6 kDa heat-shock protein [Helianthus annuus]
  misc_feature (22)..(174): Homolog of NCBI NO: 21592809 NR Description: heat shock protein, putative [Arabidopsis
  misc_feature (22)..(174): Homolog of NCBI NO: 15218934 NR Description: heat shock protein, putative
  misc_feature (22)..(174): Homolog of NCBI NO: 15222395 NR Description: heat shock protein, putative
  misc_feature (22)..(174): Homolog of NCBI NO: 15227552 NR Description: putative small heat shock protein
SEIEKSKFSRRYQQKKSKFFKMSMIPSFFNNNRRSNIFDPFSLDVWDPFKELTSSSLSRENSAIVNARVDWRETPEAHVFKADLPGLKKEEVKVEIEEDSVLKISGERHVEKEDKNDTWHRVERSSGQFTRRFRLPENVKMDQVKAAMENGVLTVTVPKAETKKADVKSIQISG

SEQ ID NO: 36027 - protein, 153 aa, Arabidopsis thaliana
  peptide (1)..(153): Ceres Seq. ID no. 12333684
  misc_feature (1)..(153): Homolog of NCBI NO: 123538 NR Description: 17.5 KD CLASS I HEAT SHOCK PROTEIN (HSP 17.5-M)
  misc_feature (1)..(153): Homolog of NCBI NO: 25809052 NR Description: heat shock protein [Pisum sativum]
  misc_feature (1)..(152): Homolog of NCBI NO: 18073561 NR Description: 20.5 kDa heat-shock protein [Helianthus annuus]
  misc_feature (1)..(153): Homolog of NCBI NO: 224545 NR Description: protein,small heat shock
  misc_feature (1)..(153): Homolog of NCBI NO: 123539 NR Description: 17.5 KD CLASS I HEAT SHOCK PROTEIN (HSP 17.5-E)
  misc_feature (1)..(153): Homolog of NCBI NO: 18073562 NR Description: 17.6 kDa heat-shock protein [Helianthus annuus]
  misc_feature (1)..(153): Homolog of NCBI NO: 21592809 NR Description: heat shock protein, putative [Arabidopsis
  misc_feature (1)..(153): Homolog of NCBI NO: 15218934 NR Description: heat shock protein, putative
  misc_feature (1)..(153): Homolog of NCBI NO: 15222395 NR Description: heat shock protein, putative
  misc_feature (1)..(153): Homolog of NCBI NO: 15227552 NR Description: putative small heat shock protein
MSMIPSFFNNNRRSNIFDPFSLDVWDPFKELTSSSLSRENSAIVNARVDWRETPEAHVFKADLPGLKKEEVKVEIEEDSVLKISGERHVEKEDKNDTWHRVERSSGQFTRRFRLPENVKMDQVKAAMENGVLTVTVPKAETKKADVKSIQISG

SEQ ID NO: 36028 - protein, 151 aa, Arabidopsis thaliana
  peptide (1)..(151): Ceres Seq. ID no. 12333685
  misc_feature (1)..(151): Homolog of NCBI NO: 123538 NR Description: 17.5 KD CLASS I HEAT SHOCK PROTEIN (HSP 17.5-M)
  misc_feature (1)..(151): Homolog of NCBI NO: 25809052 NR Description: heat shock protein [Pisum sativum]
  misc_feature (1)..(150): Homolog of NCBI NO: 18073561 NR Description: 20.5 kDa heat-shock protein [Helianthus annuus]
  misc_feature (1)..(151): Homolog of NCBI NO: 224545 NR Description: protein,small heat shock
  misc_feature (1)..(151): Homolog of NCBI NO: 123539 NR Description: 17.5 KD CLASS I HEAT SHOCK PROTEIN (HSP 17.5-E)
  misc_feature (1)..(151): Homolog of NCBI NO: 18073562 NR Description: 17.6 kDa heat-shock protein [Helianthus annuus]
  misc_feature (1)..(151): Homolog of NCBI NO: 21592809 NR Description: heat shock protein, putative [Arabidopsis
  misc_feature (1)..(151): Homolog of NCBI NO: 15218934 NR Description: heat shock protein, putative
  misc_feature (1)..(151): Homolog of NCBI NO: 15222395 NR Description: heat shock protein, putative
  misc_feature (1)..(151): Homolog of NCBI NO: 15227552 NR Description: putative small heat shock protein
MIPSFFNNNRRSNIFDPFSLDVWDPFKELTSSSLSRENSAIVNARVDWRETPEAHVFKADLPGLKKEEVKVEIEEDSVLKISGERHVEKEDKNDTWHRVERSSGQFTRRFRLPENVKMDQVKAAMENGVLTVTVPKAETKKADVKSIQISG

SEQ ID NO: 36029 - DNA, 1350 bp, Arabidopsis thaliana
  misc_feature (1)..(1350): Ceres Seq. ID no. 12333686
  misc_feature: MA Experiment ID: 108462 Result: Down-regulated in Transcription
  misc_feature: MA Experiment 108462 PARAMETER Experiment Name: At_Germinating_Seeds_cDNA_P Parameter: Age (day) Value: 2 vs. 0
  misc_feature: MA Experiment 108462 PARAMETER Experiment Name: At_Germinating_Seeds_cDNA_P Parameter: Tissue Value: Germinating Seeds
  misc_feature: MA Experiment ID: 108463 Result: Down-regulated in Transcription
  misc_feature: MA Experiment 108463 PARAMETER Experiment Name: At_Germinating_Seeds_cDNA_P Parameter: Age (day) Value: 3 vs. 0
  misc_feature: MA Experiment 108463 PARAMETER Experiment Name: At_Germinating_Seeds_cDNA_P Parameter: Tissue Value: Germinating Seeds
  misc_feature: MA Experiment ID: 108464 Result: Down-regulated in Transcription
  misc_feature: MA Experiment 108464 PARAMETER Experiment Name: At_Germinating_Seeds_cDNA_P Parameter: Age (day) Value: 4 vs. 0
  misc_feature: MA Experiment 108464 PARAMETER Experiment Name: At_Germinating_Seeds_cDNA_P Parameter: Tissue Value: Germinating Seeds
  misc_feature: MA Experiment ID: 108573 Result: Down-regulated in Transcription
  misc_feature: MA Experiment 108573 PARAMETER Experiment Name: At_Drought_cDNA_P Parameter: Timepoint (hr) Value: 6
  misc_feature: MA Experiment 108573 PARAMETER Experiment Name: At_Drought_cDNA_P Parameter: Tissue Value: Aerial
  misc_feature: MA Experiment 108573 PARAMETER Experiment Name: At_Drought_cDNA_P Parameter: Treatment Value: Drought vs. No Drought
  misc_feature: MA Experiment ID: 20000173 Result: Down-regulated in Transcription
  misc_feature: MA Experiment 20000173 PARAMETER Experiment Name: At_42deg_Heat_P Parameter: Age (day) Value: 14
  misc_feature: MA Experiment 20000173 PARAMETER Experiment Name: At_42deg_Heat_P Parameter: Organism Value: A. thaliana
  misc_feature: MA Experiment 20000173 PARAMETER Experiment Name: At_42deg_Heat_P Parameter: Plant Line Value: WS
  misc_feature: MA Experiment 20000173 PARAMETER Experiment Name: At_42deg_Heat_P Parameter: Temperature (deg C) Value: 42 vs. 22
  misc_feature: MA Experiment 20000173 PARAMETER Experiment Name: At_42deg_Heat_P Parameter: Timepoint (hr) Value: 6
  misc_feature: MA Experiment 20000173 PARAMETER Experiment Name: At_42deg_Heat_P Parameter: Tissue Value: Aerial
  misc_feature: MA Experiment ID: 20001905 Result: Down-regulated in Transcription
  misc_feature: MA Experiment 20001905 PARAMETER Experiment Name: At_Drought_Reproduction_P Parameter: Age (day) Value: 40
  misc_feature: MA Experiment 20001905 PARAMETER Experiment Name: At_Drought_Reproduction_P Parameter: Organism Value: A. thaliana
  misc_feature: MA Experiment 20001905 PARAMETER Experiment Name: At_Drought_Reproduction_P Parameter: Plant Line Value: WS
  misc_feature: MA Experiment 20001905 PARAMETER Experiment Name: At_Drought_Reproduction_P Parameter: Timepoint (day) Value: 10
  misc_feature: MA Experiment 20001905 PARAMETER Experiment Name: At_Drought_Reproduction_P Parameter: Tissue Value: Rosettes
  misc_feature: MA Experiment 20001905 PARAMETER Experiment Name: At_Drought_Reproduction_P Parameter: Treatment Value: Drought vs. No Drought
  misc_feature: MA Experiment ID: 20001911 Result: Down-regulated in Transcription
  misc_feature: MA Experiment 20001911 PARAMETER Experiment Name: At_Drought_Reproduction_P Parameter: Age (day) Value: 40
  misc_feature: MA Experiment 20001911 PARAMETER Experiment Name: At_Drought_Reproduction_P Parameter: Organism Value: A. thaliana
  misc_feature: MA Experiment 20001911 PARAMETER Experiment Name: At_Drought_Reproduction_P Parameter: Plant Line Value: WS
  misc_feature: MA Experiment 20001911 PARAMETER Experiment Name: At_Drought_Reproduction_P Parameter: Timepoint (day) Value: 10
  misc_feature: MA Experiment 20001911 PARAMETER Experiment Name: At_Drought_Reproduction_P Parameter: Tissue Value: Flowers
  misc_feature: MA Experiment 20001911 PARAMETER Experiment Name: At_Drought_Reproduction_P Parameter: Treatment Value: Drought vs. No Drought
aaacactgtgagagagttgaccaaaatcgacccagtgggaggactaggtttatcgaaagctccagttttcatagataaatccagtaaaattatacacgcaaattctagtttcttagagcaaagctttgttgaattgatagcttgaatttgggaatggacggagaagagcttaccgagcaggagactgccttgtacgaccgccagattagggtttggggcgctaatgctcagagaagattgaccaaagctcatatcttggtatctggaattaaggggactgttgctgagttttgcaagaacattgtgctggcaggagttggttcagtgactttaatggatgatcgtttagcaaacatggaggccttgaacgctaactttttgattccgcctgatgaaaatgtttacagtggcaaaactgtggctgagatttgtagtgattcactcaaggatttcaaccctatggtccgtgtttccgtagagaaaggtgatttgtcaatgcttggcactgatttttttgagcagtttgatgtcgtagttataggctatggttctcgtgctaccaaaaaatatgtcaatgaaaaatgtcggaagttaaagaaacgtgtcgcattctatacagtcgattgtagagactcatgtggtgaaatctttgtggacctccaagattacaagtacacaaagaaaaagcttgaagagatggtggaatgcgaactaaattttccaagttttcaggaagctatatcggtaccatggaaaccgattcctcggagaacagcaaagctctactttgctatgagagtaatagaagtgtttgaagagagtgaagggcgtaaacatggagaatgttcgctactcgatcttgccagagtcttggaaatcaaaaagcaactctgtgaggcaaactctgtgagcgagagccatataccagatattctcttggagagacttatcactggtactactgaattcccgccagtttgtgccattgtgggaggaatattagcacaggaggtgatcaaagcagtatcaggcaaaggagacccgttgaaaaacttcttctactatgatggtgaagatgggaaaggtgtgatggaagacatttccgactcttttacctcttaaacaaccagtgggccttgatttagtttaaactctataatctctgagattccatgtatatctcaatcgtttgttttttgccttcacattatgaacaaatttaatgcagaatttagtggaggatcagttgtgattttccttcggtaaaatcattttcagttattgacatttgaattgttcaatttcaaatttcaaatattataattcaattcaaagactagctaagttttt

SEQ ID NO: 36030 - protein, 322 aa, Arabidopsis thaliana
  peptide (1)..(322): Ceres Seq. ID no. 12333687
  misc_feature (30)..(168): Pfam Name: ThiF family Pfam Description: ThiF family
  misc_feature (168)..(314): Homolog of NCBI NO: 4885585 NR Description: SUMO-1 activating enzyme subunit 1
  misc_feature (3)..(178): Homolog of NCBI NO: 4885585 NR Description: SUMO-1 activating enzyme subunit 1
  misc_feature (84)..(318): Homolog of NCBI NO: 25494393 NR Description: probable ubiquitin activating enzyme 2
  misc_feature (1)..(317): Homolog of NCBI NO: 3647283 NR Description: ubiquitin activating enzyme [Lycopersicon
  misc_feature (1)..(317): Homolog of NCBI NO: 21554965 NR Description: ubiquitin activating enzyme [Arabidopsis thaliana]
  misc_feature (1)..(317): Homolog of NCBI NO: 30695912 NR Description: SUMO activating enzyme 1b (SAE1b) [Arabidopsis
  misc_feature (1)..(317): Homolog of NCBI NO: 18423184 NR Description: ubiquitin activating enzyme
  misc_feature (1)..(317): Homolog of NCBI NO: 22652852 NR Description: SUMO activating enzyme 1b [Arabidopsis thaliana]
  misc_feature (1)..(322): Homolog of NCBI NO: 7488411 NR Description: ubiquitin-activating enzyme homolog F13M23.80 -
  misc_feature (1)..(322): Homolog of NCBI NO: 18416454 NR Description: ubiquitin activating enzyme - like protein
MDGEELTEQETALYDRQIRVWGANAQRRLTKAHILVSGIKGTVAEFCKNIVLAGVGSVTLMDDRLANMEALNANFLIPPDENVYSGKTVAEICSDSLKDFNPMVRVSVEKGDLSMLGTDFFEQFDVVVIGYGSRATKKYVNEKCRKLKKRVAFYTVDCRDSCGEIFVDLQDYKYTKKKLEEMVECELNFPSFQEAISVPWKPIPRRTAKLYFAMRVIEVFEESEGRKHGECSLLDLARVLEIKKQLCEANSVSESHIPDILLERLITGTTEFPPVCAIVGGILAQEVIKAVSGKGDPLKNFFYYDGEDGKGVMEDISDSFTS

SEQ ID NO: 36031 - protein, 262 aa, Arabidopsis thaliana
  peptide (1)..(262): Ceres Seq. ID no. 12333688
  misc_feature (1)..(108): Pfam Name: ThiF family Pfam Description: ThiF family
  misc_feature (108)..(254): Homolog of NCBI NO: 4885585 NR Description: SUMO-1 activating enzyme subunit 1
  misc_feature (1)..(118): Homolog of NCBI NO: 4885585 NR Description: SUMO-1 activating enzyme subunit 1
  misc_feature (24)..(258): Homolog of NCBI NO: 25494393 NR Description: probable ubiquitin activating enzyme 2
  misc_feature (1)..(257): Homolog of NCBI NO: 3647283 NR Description: ubiquitin activating enzyme [Lycopersicon
  misc_feature (1)..(257): Homolog of NCBI NO: 21554965 NR Description: ubiquitin activating enzyme [Arabidopsis thaliana]
  misc_feature (1)..(257): Homolog of NCBI NO: 30695912 NR Description: SUMO activating enzyme 1b (SAE1b) [Arabidopsis
  misc_feature (1)..(257): Homolog of NCBI NO: 18423184 NR Description: ubiquitin activating enzyme
  misc_feature (1)..(257): Homolog of NCBI NO: 22652852 NR Description: SUMO activating enzyme 1b [Arabidopsis thaliana]
  misc_feature (1)..(262): Homolog of NCBI NO: 7488411 NR Description: ubiquitin-activating enzyme homolog F13M23.80 -
  misc_feature (1)..(262): Homolog of NCBI NO: 18416454 NR Description: ubiquitin activating enzyme - like protein
MDDRLANMEALNANFLIPPDENVYSGKTVAEICSDSLKDFNPMVRVSVEKGDLSMLGTDFFEQFDVVVIGYGSRATKKYVNEKCRKLKKRVAFYTVDCRDSCGEIFVDLQDYKYTKKKLEEMVECELNFPSFQEAISVPWKPIPRRTAKLYFAMRVIEVFEESEGRKHGECSLLDLARVLEIKKQLCEANSVSESHIPDILLERLITGTTEFPPVCAIVGGILAQEVIKAVSGKGDPLKNFFYYDGEDGKGVMEDISDSFTS

SEQ ID NO: 36032 - protein, 255 aa, Arabidopsis thaliana
  peptide (1)..(255): Ceres Seq. ID no. 12333689
  misc_feature (1)..(101): Pfam Name: ThiF family Pfam Description: ThiF family
  misc_feature (101)..(247): Homolog of NCBI NO: 4885585 NR Description: SUMO-1 activating enzyme subunit 1
  misc_feature (1)..(111): Homolog of NCBI NO: 4885585 NR Description: SUMO-1 activating enzyme subunit 1
  misc_feature (17)..(251): Homolog of NCBI NO: 25494393 NR Description: probable ubiquitin activating enzyme 2
  misc_feature (1)..(250): Homolog of NCBI NO: 3647283 NR Description: ubiquitin activating enzyme [Lycopersicon
  misc_feature (1)..(250): Homolog of NCBI NO: 21554965 NR Description: ubiquitin activating enzyme [Arabidopsis thaliana]
  misc_feature (1)..(250): Homolog of NCBI NO: 30695912 NR Description: SUMO activating enzyme 1b (SAE1b) [Arabidopsis
  misc_feature (1)..(250): Homolog of NCBI NO: 18423184 NR Description: ubiquitin activating enzyme
  misc_feature (1)..(250): Homolog of NCBI NO: 22652852 NR Description: SUMO activating enzyme 1b [Arabidopsis thaliana]
  misc_feature (1)..(255): Homolog of NCBI NO: 7488411 NR Description: ubiquitin-activating enzyme homolog F13M23.80 -
  misc_feature (1)..(255): Homolog of NCBI NO: 18416454 NR Description: ubiquitin activating enzyme - like protein
MEALNANFLIPPDENVYSGKTVAEICSDSLKDFNPMVRVSVEKGDLSMLGTDFFEQFDVVVIGYGSRATKKYVNEKCRKLKKRVAFYTVDCRDSCGEIFVDLQDYKYTKKKLEEMVECELNFPSFQEAISVPWKPIPRRTAKLYFAMRVIEVFEESEGRKHGECSLLDLARVLEIKKQLCEANSVSESHIPDILLERLITGTTEFPPVCAIVGGILAQEVIKAVSGKGDPLKNFFYYDGEDGKGVMEDISDSFTS

SEQ ID NO: 36033 - DNA, 1192 bp, Arabidopsis thaliana
  misc_feature (1)..(1192): Ceres Seq. ID no. 12606733
  misc_feature: MA Experiment ID: 108433 Result: Down-regulated in Transcription
  misc_feature: MA Experiment 108433 PARAMETER Experiment Name: At_rhl_Mutant2_cDNA_P Parameter: Age (day) Value: 7
  misc_feature: MA Experiment 108433 PARAMETER Experiment Name: At_rhl_Mutant2_cDNA_P Parameter: Organism Value: A. thaliana
  misc_feature: MA Experiment 108433 PARAMETER Experiment Name: At_rhl_Mutant2_cDNA_P Parameter: Plant Line Value: rhl Mutant vs. wt landsburg
  misc_feature: MA Experiment 108433 PARAMETER Experiment Name: At_rhl_Mutant2_cDNA_P Parameter: Tissue Value: Roots
  misc_feature: MA Experiment ID: 108434 Result: Down-regulated in Transcription
  misc_feature: MA Experiment 108434 PARAMETER Experiment Name: At_Root_Tips_cDNA_P Parameter: Tissue Value: Root Tips
  misc_feature: MA Experiment ID: 108435 Result: Up-regulated in Transcription
  misc_feature: MA Experiment 108435 PARAMETER Experiment Name: At_stm_Mutants_cDNA_P Parameter: Plant Line Value: wt Landsburg vs stm
  misc_feature: MA Experiment 108435 PARAMETER Experiment Name: At_stm_Mutants_cDNA_P Parameter: Tissue Value: Shoot Apical Meristem Region
  misc_feature: MA Experiment ID: 108461 Result: Up-regulated in Transcription
  misc_feature: MA Experiment 108461 PARAMETER Experiment Name: At_Germinating_Seeds_cDNA_P Parameter: Age (day) Value: 1 vs. 0
  misc_feature: MA Experiment 108461 PARAMETER Experiment Name: At_Germinating_Seeds_cDNA_P Parameter: Tissue Value: Germinating Seeds
  misc_feature: MA Experiment ID: 108462 Result: Up-regulated in Transcription
  misc_feature: MA Experiment 108462 PARAMETER Experiment Name: At_Germinating_Seeds_cDNA_P Parameter: Age (day) Value: 2 vs. 0
  misc_feature: MA Experiment 108462 PARAMETER Experiment Name: At_Germinating_Seeds_cDNA_P Parameter: Tissue Value: Germinating Seeds
  misc_feature: MA Experiment ID: 108463 Result: Up-regulated in Transcription
  misc_feature: MA Experiment 108463 PARAMETER Experiment Name: At_Germinating_Seeds_cDNA_P Parameter: Age (day) Value: 3 vs. 0
  misc_feature: MA Experiment 108463 PARAMETER Experiment Name: At_Germinating_Seeds_cDNA_P Parameter: Tissue Value: Germinating Seeds
  misc_feature: MA Experiment ID: 108464 Result: Up-regulated in Transcription
  misc_feature: MA Experiment 108464 PARAMETER Experiment Name: At_Germinating_Seeds_cDNA_P Parameter: Age (day) Value: 4 vs. 0
  misc_feature: MA Experiment 108464 PARAMETER Experiment Name: At_Germinating_Seeds_cDNA_P Parameter: Tissue Value: Germinating Seeds
  misc_feature: MA Experiment ID: 108473 Result: Up-regulated in Transcription
  misc_feature: MA Experiment 108473 PARAMETER Experiment Name: At_Drought_Flowers_cDNA_P Parameter: Timepoint (hr) Value: 7 d
  misc_feature: MA Experiment 108473 PARAMETER Experiment Name: At_Drought_Flowers_cDNA_P Parameter: Tissue Value: Flower
  misc_feature: MA Experiment 108473 PARAMETER Experiment Name: At_Drought_Flowers_cDNA_P Parameter: Treatment Value: Drought vs. No Drought
  misc_feature: MA Experiment ID: 108474 Result: Up-regulated in Transcription
  misc_feature: MA Experiment 108474 PARAMETER Experiment Name: At_Drought_Flowers_cDNA_P Parameter: Timepoint (hr) Value: null
  misc_feature: MA Experiment 108474 PARAMETER Experiment Name: At_Drought_Flowers_cDNA_P Parameter: Treatment Value: Drought vs. No Drought
  misc_feature: MA Experiment ID: 108488 Result: Up-regulated in Transcription
  misc_feature: MA Experiment ID: 108489 Result: Up-regulated in Transcription
  misc_feature: MA Experiment ID: 108501 Result: Up-regulated in Transcription
  misc_feature: MA Experiment 108501 PARAMETER Experiment Name: At_ap2_floral_buds_cDNA_P Parameter: Plant Line Value: ap2 (Ler.)
  misc_feature: MA Experiment 108501 PARAMETER Experiment Name: At_ap2_floral_buds_cDNA_P Parameter: Tissue Value: Closed Flower
  misc_feature: MA Experiment ID: 108561 Result: Up-regulated in Transcription
  misc_feature: MA Experiment 108561 PARAMETER Experiment Name: At_100uM_ABA_cDNA_P Parameter: Timepoint (hr) Value: 6
  misc_feature: MA Experiment 108561 PARAMETER Experiment Name: At_100uM_ABA_cDNA_P Parameter: Tissue Value: Aerial
  misc_feature: MA Experiment 108561 PARAMETER Experiment Name: At_100uM_ABA_cDNA_P Parameter: Treatment Value: 100uM ABA vs. No Treatment
  misc_feature: MA Experiment ID: 108573 Result: Up-regulated in Transcription
  misc_feature: MA Experiment 108573 PARAMETER Experiment Name: At_Drought_cDNA_P Parameter: Timepoint (hr) Value: 6
  misc_feature: MA Experiment 108573 PARAMETER Experiment Name: At_Drought_cDNA_P Parameter: Tissue Value: Aerial
  misc_feature: MA Experiment 108573 PARAMETER Experiment Name: At_Drought_cDNA_P Parameter: Treatment Value: Drought vs. No Drought
  misc_feature: MA Experiment ID: 108594 Result: Down-regulated in Transcription
  misc_feature: MA Experiment 108594 PARAMETER Experiment Name: At_Ler-rhl_Root_cDNA_P Parameter: Plant Line Value: null
  misc_feature: MA Experiment ID: 108605 Result: Up-regulated in Transcription
  misc_feature: MA Experiment 108605 PARAMETER Experiment Name: At_100uM_ABA_cDNA_P Parameter: Timepoint (hr) Value: 6
  misc_feature: MA Experiment 108605 PARAMETER Experiment Name: At_100uM_ABA_cDNA_P Parameter: Tissue Value: Aerial
  misc_feature: MA Experiment 108605 PARAMETER Experiment Name: At_100uM_ABA_cDNA_P Parameter: Treatment Value: 100uM ABA vs. No Treatment
  misc_feature: MA Experiment ID: 108607 Result: Up-regulated in Transcription
  misc_feature: MA Experiment 108607 PARAMETER Experiment Name: At_100uM_ABA_cDNA_P Parameter: Timepoint (hr) Value: 4
  misc_feature: MA Experiment 108607 PARAMETER Experiment Name: At_100uM_ABA_cDNA_P Parameter: Tissue Value: Aerial
  misc_feature: MA Experiment 108607 PARAMETER Experiment Name: At_100uM_ABA_cDNA_P Parameter: Treatment Value: 100uM ABA vs. No Treatment
  misc_feature: MA Experiment ID: 108609 Result: Up-regulated in Transcription
  misc_feature: MA Experiment 108609 PARAMETER Experiment Name: At_100uM_ABA_cDNA_P Parameter: Timepoint (hr) Value: 24
  misc_feature: MA Experiment 108609 PARAMETER Experiment Name: At_100uM_ABA_cDNA_P Parameter: Tissue Value: Aerial
  misc_feature: MA Experiment 108609 PARAMETER Experiment Name: At_100uM_ABA_cDNA_P Parameter: Treatment Value: 100uM ABA vs. No Treatment
  misc_feature: MA Experiment ID: 20000069 Result: Up-regulated in Transcription
  misc_feature: MA Experiment 20000069 PARAMETER Experiment Name: At_100uM_ABA_Mutants_cDNA_P Parameter: Plant Line Value: CS23
  misc_feature: MA Experiment 20000069 PARAMETER Experiment Name: At_100uM_ABA_Mutants_cDNA_P Parameter: Timepoint (hr) Value: 6
  misc_feature: MA Experiment 20000069 PARAMETER Experiment Name: At_100uM_ABA_Mutants_cDNA_P Parameter: Tissue Value: Aerial
  misc_feature: MA Experiment 20000069 PARAMETER Experiment Name: At_100uM_ABA_Mutants_cDNA_P Parameter: Treatment Value: 100uM ABA vs. No Treatment
  misc_feature: MA Experiment ID: 20000070 Result: Up-regulated in Transcription
  misc_feature: MA Experiment 20000070 PARAMETER Experiment Name: At_100uM_ABA_Mutants_cDNA_P Parameter: Plant Line Value: CS24
  misc_feature: MA Experiment 20000070 PARAMETER Experiment Name: At_100uM_ABA_Mutants_cDNA_P Parameter: Timepoint (hr) Value: 6
  misc_feature: MA Experiment 20000070 PARAMETER Experiment Name: At_100uM_ABA_Mutants_cDNA_P Parameter: Tissue Value: Aerial
  misc_feature: MA Experiment 20000070 PARAMETER Experiment Name: At_100uM_ABA_Mutants_cDNA_P Parameter: Treatment Value: 100uM ABA vs. No Treatment
  misc_feature: MA Experiment ID: 20000071 Result: Up-regulated in Transcription
  misc_feature: MA Experiment 20000071 PARAMETER Experiment Name: At_100uM_ABA_Mutants_cDNA_P Parameter: Plant Line Value: CS8104
  misc_feature: MA Experiment 20000071 PARAMETER Experiment Name: At_100uM_ABA_Mutants_cDNA_P Parameter: Timepoint (hr) Value: 6
  misc_feature: MA Experiment 20000071 PARAMETER Experiment Name: At_100uM_ABA_Mutants_cDNA_P Parameter: Tissue Value: Aerial
  misc_feature: MA Experiment 20000071 PARAMETER Experiment Name: At_100uM_ABA_Mutants_cDNA_P Parameter: Treatment Value: 100uM ABA vs. No Treatment
  misc_feature: MA Experiment ID: 20000072 Result: Up-regulated in Transcription
  misc_feature: MA Experiment 20000072 PARAMETER Experiment Name: At_100uM_ABA_Mutants_cDNA_P Parameter: Plant Line Value: CS8105
  misc_feature: MA Experiment 20000072 PARAMETER Experiment Name: At_100uM_ABA_Mutants_cDNA_P Parameter: Timepoint (hr) Value: 6
  misc_feature: MA Experiment 20000072 PARAMETER Experiment Name: At_100uM_ABA_Mutants_cDNA_P Parameter: Tissue Value: Aerial
  misc_feature: MA Experiment 20000072 PARAMETER Experiment Name: At_100uM_ABA_Mutants_cDNA_P Parameter: Treatment Value: 100uM ABA vs. No Treatment
  misc_feature: MA Experiment ID: 20000086 Result: Up-regulated in Transcription
  misc_feature: MA Experiment 20000086 PARAMETER Experiment Name: At_100uM_ABA_Mutants_cDNA_P Parameter: Plant Line Value: CS22
  misc_feature: MA Experiment 20000086 PARAMETER Experiment Name: At_100uM_ABA_Mutants_cDNA_P Parameter: Timepoint (hr) Value: 6
  misc_feature: MA Experiment 20000086 PARAMETER Experiment Name: At_100uM_ABA_Mutants_cDNA_P Parameter: Tissue Value: Aerial
  misc_feature: MA Experiment 20000086 PARAMETER Experiment Name: At_100uM_ABA_Mutants_cDNA_P Parameter: Treatment Value: 100uM ABA vs. No Treatment
  misc_feature: MA Experiment ID: 20000087 Result: Up-regulated in Transcription
  misc_feature: MA Experiment 20000087 PARAMETER Experiment Name: At_100uM_ABA_Mutants_cDNA_P Parameter: Plant Line Value: WS
  misc_feature: MA Experiment 20000087 PARAMETER Experiment Name: At_100uM_ABA_Mutants_cDNA_P Parameter: Timepoint (hr) Value: 6
  misc_feature: MA Experiment 20000087 PARAMETER Experiment Name: At_100uM_ABA_Mutants_cDNA_P Parameter: Tissue Value: Aerial
  misc_feature: MA Experiment 20000087 PARAMETER Experiment Name: At_100uM_ABA_Mutants_cDNA_P Parameter: Treatment Value: 100uM ABA vs. No Treatment
  misc_feature: MA Experiment ID: 20000088 Result: Up-regulated in Transcription
  misc_feature: MA Experiment 20000088 PARAMETER Experiment Name: At_100uM_ABA_Mutants_cDNA_P Parameter: Plant Line Value: Landsberg
  misc_feature: MA Experiment 20000088 PARAMETER Experiment Name: At_100uM_ABA_Mutants_cDNA_P Parameter: Timepoint (hr) Value: 6
  misc_feature: MA Experiment 20000088 PARAMETER Experiment Name: At_100uM_ABA_Mutants_cDNA_P Parameter: Tissue Value: Aerial
  misc_feature: MA Experiment 20000088 PARAMETER Experiment Name: At_100uM_ABA_Mutants_cDNA_P Parameter: Treatment Value: 100uM ABA vs. No Treatment
  misc_feature: MA Experiment ID: 20000090 Result: Up-regulated in Transcription
  misc_feature: MA Experiment ID: 20000117 Result: Up-regulated in Transcription
  misc_feature: MA Experiment 20000117 PARAMETER Experiment Name: At_100uM_ABA_Mutants_cDNA_P Parameter: Plant Line Value: Columbia
  misc_feature: MA Experiment 20000117 PARAMETER Experiment Name: At_100uM_ABA_Mutants_cDNA_P Parameter: Timepoint (hr) Value: 6
  misc_feature: MA Experiment 20000117 PARAMETER Experiment Name: At_100uM_ABA_Mutants_cDNA_P Parameter: Tissue Value: Aerial
  misc_feature: MA Experiment 20000117 PARAMETER Experiment Name: At_100uM_ABA_Mutants_cDNA_P Parameter: Treatment Value: 100uM ABA vs. No Treatment
  misc_feature: MA Experiment ID: 20000169 Result: Up-regulated in Transcription
  misc_feature: MA Experiment 20000169 PARAMETER Experiment Name: At_100uM_ABA_P Parameter: Age (day) Value: 14
  misc_feature: MA Experiment 20000169 PARAMETER Experiment Name: At_100uM_ABA_P Parameter: Organism Value: A. thaliana
  misc_feature: MA Experiment 20000169 PARAMETER Experiment Name: At_100uM_ABA_P Parameter: Plant Line Value: WS
  misc_feature: MA Experiment 20000169 PARAMETER Experiment Name: At_100uM_ABA_P Parameter: Timepoint (hr) Value: 6
  misc_feature: MA Experiment 20000169 PARAMETER Experiment Name: At_100uM_ABA_P Parameter: Tissue Value: Aerial
  misc_feature: MA Experiment 20000169 PARAMETER Experiment Name: At_100uM_ABA_P Parameter: Treatment Value: 100uM ABA vs. No Treatment
  misc_feature: MA Experiment ID: 20000180 Result: Up-regulated in Transcription
  misc_feature: MA Experiment 20000180 PARAMETER Experiment Name: At_Germinating_Seeds_P Parameter: Age (hr) Value: 24 vs. 0
  misc_feature: MA Experiment 20000180 PARAMETER Experiment Name: At_Germinating_Seeds_P Parameter: Tissue Value: Germinating Seeds
  misc_feature: MA Experiment ID: 20000185 Result: Up-regulated in Transcription
  misc_feature: MA Experiment 20000185 PARAMETER Experiment Name: At_Roots__P Parameter: Age (day) Value: 7 vs. 21
  misc_feature: MA Experiment 20000185 PARAMETER Experiment Name: At_Roots__P Parameter: Organism Value: A. thaliana
  misc_feature: MA Experiment 20000185 PARAMETER Experiment Name: At_Roots__P Parameter: Tissue Value: Roots vs. Whole Plant
  misc_feature: MA Experiment ID: 20000234 Result: Down-regulated in Transcription
  misc_feature: MA Experiment 20000234 PARAMETER Experiment Name: At_Siliques_P Parameter: Age (day) Value: 21
  misc_feature: MA Experiment 20000234 PARAMETER Experiment Name: At_Siliques_P Parameter: Organism Value: A. thaliana
  misc_feature: MA Experiment 20000234 PARAMETER Experiment Name: At_Siliques_P Parameter: Plant Line Value: WS
  misc_feature: MA Experiment 20000234 PARAMETER Experiment Name: At_Siliques_P Parameter: Tissue Value: Less Than 5mm Siliques vs. Whole Plant
  misc_feature: MA Experiment ID: 20000264 Result: Down-regulated in Transcription
  misc_feature: MA Experiment 20000264 PARAMETER Experiment Name: At_Open_Flower_P Parameter: Age (day) Value: 21
  misc_feature: MA Experiment 20000264 PARAMETER Experiment Name: At_Open_Flower_P Parameter: Plant Line Value: WS
  misc_feature: MA Experiment 20000264 PARAMETER Experiment Name: At_Open_Flower_P Parameter: Tissue Value: Open Flower vs. Whole Plant
  misc_feature: MA Experiment ID: 20000265 Result: Down-regulated in Transcription
  misc_feature: MA Experiment 20000265 PARAMETER Experiment Name: At_Open_Flower_P Parameter: Age (day) Value: 21
  misc_feature: MA Experiment 20000265 PARAMETER Experiment Name: At_Open_Flower_P Parameter: Plant Line Value: WS
  misc_feature: MA Experiment 20000265 PARAMETER Experiment Name: At_Open_Flower_P Parameter: Tissue Value: Closed Flower vs. Whole Plant
  misc_feature: MA Experiment ID: 20000267 Result: Up-regulated in Transcription
  misc_feature: MA Experiment 20000267 PARAMETER Experiment Name: At_Drought_P Parameter: Age (day) Value: 7
  misc_feature: MA Experiment 20000267 PARAMETER Experiment Name: At_Drought_P Parameter: Organism Value: A. thaliana
  misc_feature: MA Experiment 20000267 PARAMETER Experiment Name: At_Drought_P Parameter: Plant Line Value: WS
  misc_feature: MA Experiment 20000267 PARAMETER Experiment Name: At_Drought_P Parameter: Timepoint (hr) Value: 6
  misc_feature: MA Experiment 20000267 PARAMETER Experiment Name: At_Drought_P Parameter: Tissue Value: Whole Plant
  misc_feature: MA Experiment 20000267 PARAMETER Experiment Name: At_Drought_P Parameter: Treatment Value: Drought vs. No Drought
  misc_feature: MA Experiment ID: 20000268 Result: Up-regulated in Transcription
  misc_feature: MA Experiment 20000268 PARAMETER Experiment Name: At_100mM_NaCl__P Parameter: Age (day) Value: 14
  misc_feature: MA Experiment 20000268 PARAMETER Experiment Name: At_100mM_NaCl__P Parameter: Organism Value: A. thaliana
  misc_feature: MA Experiment 20000268 PARAMETER Experiment Name: At_100mM_NaCl__P Parameter: Plant Line Value: WS
  misc_feature: MA Experiment 20000268 PARAMETER Experiment Name: At_100mM_NaCl__P Parameter: Timepoint (hr) Value: 6
  misc_feature: MA Experiment 20000268 PARAMETER Experiment Name: At_100mM_NaCl__P Parameter: Tissue Value: Whole Plant
  misc_feature: MA Experiment 20000268 PARAMETER Experiment Name: At_100mM_NaCl__P Parameter: Treatment Value: 100mM NaCl vs. No Treatment
  misc_feature: MA Experiment ID: 20000286 Result: Down-regulated in Transcription
  misc_feature: MA Experiment 20000286 PARAMETER Experiment Name: At_Open_Flower_P Parameter: Age (day) Value: 21
  misc_feature: MA Experiment 20000286 PARAMETER Experiment Name: At_Open_Flower_P Parameter: Plant Line Value: WS
  misc_feature: MA Experiment 20000286 PARAMETER Experiment Name: At_Open_Flower_P Parameter: Tissue Value: Half Open vs. Whole Plant
  misc_feature: MA Experiment ID: 20000308 Result: Up-regulated in Transcription
  misc_feature: MA Experiment 20000308 PARAMETER Experiment Name: At_100mM_NaCl__P Parameter: Age (day) Value: 17
  misc_feature: MA Experiment 20000308 PARAMETER Experiment Name: At_100mM_NaCl__P Parameter: Organism Value: A. thaliana
  misc_feature: MA Experiment 20000308 PARAMETER Experiment Name: At_100mM_NaCl__P Parameter: Plant Line Value: WS
  misc_feature: MA Experiment 20000308 PARAMETER Experiment Name: At_100mM_NaCl__P Parameter: Timepoint (hr) Value: 72
  misc_feature: MA Experiment 20000308 PARAMETER Experiment Name: At_100mM_NaCl__P Parameter: Tissue Value: Whole Plant
  misc_feature: MA Experiment 20000308 PARAMETER Experiment Name: At_100mM_NaCl__P Parameter: Treatment Value: 100mM NaCl vs. No Treatment
  misc_feature: MA Experiment ID: 20000437 Result: Up-regulated in Transcription
  misc_feature: MA Experiment 20000437 PARAMETER Experiment Name: At_Drought_P Parameter: Age (day) Value: 8
  misc_feature: MA Experiment 20000437 PARAMETER Experiment Name: At_Drought_P Parameter: Organism Value: A. thaliana
  misc_feature: MA Experiment 20000437 PARAMETER Experiment Name: At_Drought_P Parameter: Plant Line Value: WS
  misc_feature: MA Experiment 20000437 PARAMETER Experiment Name: At_Drought_P Parameter: Timepoint (hr) Value: 24
  misc_feature: MA Experiment 20000437 PARAMETER Experiment Name: At_Drought_P Parameter: Tissue Value: Whole Plant
  misc_feature: MA Experiment 20000437 PARAMETER Experiment Name: At_Drought_P Parameter: Treatment Value: Drought vs. No Drought
  misc_feature: MA Experiment ID: 20000441 Result: Down-regulated in Transcription
  misc_feature: MA Experiment 20000441 PARAMETER Experiment Name: At_1uM_BR-BRZ__P Parameter: Tissue Value: Shoot Apices
  misc_feature: MA Experiment 20000441 PARAMETER Experiment Name: At_1uM_BR-BRZ__P Parameter: Treatment Value: 1uM BR vs. No Treatment
  misc_feature: MA Experiment ID: 20000451 Result: Up-regulated in Transcription
  misc_feature: MA Experiment 20000451 PARAMETER Experiment Name: At_CS6879_Shoots-Roots_P Parameter: Age (day) Value: 14
  misc_feature: MA Experiment 20000451 PARAMETER Experiment Name: At_CS6879_Shoots-Roots_P Parameter: Organism Value: A. thaliana
  misc_feature: MA Experiment 20000451 PARAMETER Experiment Name: At_CS6879_Shoots-Roots_P Parameter: Plant Line Value: CS6879 vs. WS
  misc_feature: MA Experiment 20000451 PARAMETER Experiment Name: At_CS6879_Shoots-Roots_P Parameter: Tissue Value: Roots
  misc_feature: MA Experiment ID: 20000452 Result: Up-regulated in Transcription
  misc_feature: MA Experiment 20000452 PARAMETER Experiment Name: At_CS6879_Shoots-Roots_P Parameter: Age (day) Value: 14
  misc_feature: MA Experiment 20000452 PARAMETER Experiment Name: At_CS6879_Shoots-Roots_P Parameter: Organism Value: A. thaliana
  misc_feature: MA Experiment 20000452 PARAMETER Experiment Name: At_CS6879_Shoots-Roots_P Parameter: Plant Line Value: CS6879 vs. WS
  misc_feature: MA Experiment 20000452 PARAMETER Experiment Name: At_CS6879_Shoots-Roots_P Parameter: Tissue Value: Shoots
  misc_feature: MA Experiment ID: 20000453 Result: Up-regulated in Transcription
  misc_feature: MA Experiment 20000453 PARAMETER Experiment Name: At_100uM_ABA_P Parameter: Age (day) Value: 15
  misc_feature: MA Experiment 20000453 PARAMETER Experiment Name: At_100uM_ABA_P Parameter: Organism Value: A. thaliana
  misc_feature: MA Experiment 20000453 PARAMETER Experiment Name: At_100uM_ABA_P Parameter: Plant Line Value: WS
  misc_feature: MA Experiment 20000453 PARAMETER Experiment Name: At_100uM_ABA_P Parameter: Timepoint (hr) Value: 24
  misc_feature: MA Experiment 20000453 PARAMETER Experiment Name: At_100uM_ABA_P Parameter: Tissue Value: Aerial
  misc_feature: MA Experiment 20000453 PARAMETER Experiment Name: At_100uM_ABA_P Parameter: Treatment Value: 100uM ABA vs. No Treatment
  misc_feature: MA Experiment ID: 20000455 Result: Up-regulated in Transcription
  misc_feature: MA Experiment 20000455 PARAMETER Experiment Name: At_100uM_ABA_P Parameter: Age (day) Value: 16
  misc_feature: MA Experiment 20000455 PARAMETER Experiment Name: At_100uM_ABA_P Parameter: Organism Value: A. thaliana
  misc_feature: MA Experiment 20000455 PARAMETER Experiment Name: At_100uM_ABA_P Parameter: Plant Line Value: WS
  misc_feature: MA Experiment 20000455 PARAMETER Experiment Name: At_100uM_ABA_P Parameter: Timepoint (hr) Value: 48
  misc_feature: MA Experiment 20000455 PARAMETER Experiment Name: At_100uM_ABA_P Parameter: Tissue Value: Aerial
  misc_feature: MA Experiment 20000455 PARAMETER Experiment Name: At_100uM_ABA_P Parameter: Treatment Value: 100uM ABA vs. No Treatment
  misc_feature: MA Experiment ID: 20000794 Result: Down-regulated in Transcription
  misc_feature: MA Experiment 20000794 PARAMETER Experiment Name: At_Petals_P Parameter: Age (day) Value: 23-25 days
  misc_feature: MA Experiment 20000794 PARAMETER Experiment Name: At_Petals_P Parameter: Plant Line Value: WS
  misc_feature: MA Experiment 20000794 PARAMETER Experiment Name: At_Petals_P Parameter: Tissue Value: Petals vs. Whole plant
  misc_feature: MA Experiment ID: 20001554 Result: Up-regulated in Transcription
  misc_feature: MA Experiment 20001554 PARAMETER Experiment Name: At_Drought_Soil_Dry_P Parameter: Age (day) Value: 21
  misc_feature: MA Experiment 20001554 PARAMETER Experiment Name: At_Drought_Soil_Dry_P Parameter: Organism Value: A. thaliana
  misc_feature: MA Experiment 20001554 PARAMETER Experiment Name: At_Drought_Soil_Dry_P Parameter: Plant Line Value: WS
  misc_feature: MA Experiment 20001554 PARAMETER Experiment Name: At_Drought_Soil_Dry_P Parameter: Post Timepoint (hr) Value: None
  misc_feature: MA Experiment 20001554 PARAMETER Experiment Name: At_Drought_Soil_Dry_P Parameter: Post-Treatment Value: None
  misc_feature: MA Experiment 20001554 PARAMETER Experiment Name: At_Drought_Soil_Dry_P Parameter: Timepoint (day) Value: 7
  misc_feature: MA Experiment 20001554 PARAMETER Experiment Name: At_Drought_Soil_Dry_P Parameter: Treatment Value: Drought vs. No Drought
  misc_feature: MA Experiment ID: 20001555 Result: Up-regulated in Transcription
  misc_feature: MA Experiment 20001555 PARAMETER Experiment Name: At_Drought_Soil_Dry_P Parameter: Age (day) Value: 24
  misc_feature: MA Experiment 20001555 PARAMETER Experiment Name: At_Drought_Soil_Dry_P Parameter: Organism Value: A. thaliana
  misc_feature: MA Experiment 20001555 PARAMETER Experiment Name: At_Drought_Soil_Dry_P Parameter: Plant Line Value: WS
  misc_feature: MA Experiment 20001555 PARAMETER Experiment Name: At_Drought_Soil_Dry_P Parameter: Post Timepoint (hr) Value: None
  misc_feature: MA Experiment 20001555 PARAMETER Experiment Name: At_Drought_Soil_Dry_P Parameter: Post-Treatment Value: None
  misc_feature: MA Experiment 20001555 PARAMETER Experiment Name: At_Drought_Soil_Dry_P Parameter: Timepoint (day) Value: 10
  misc_feature: MA Experiment 20001555 PARAMETER Experiment Name: At_Drought_Soil_Dry_P Parameter: Treatment Value: Drought vs. No Drought
  misc_feature: MA Experiment ID: 20001556 Result: Up-regulated in Transcription
  misc_feature: MA Experiment 20001556 PARAMETER Experiment Name: At_Drought_Soil_Dry_P Parameter: Age (day) Value: 26
  misc_feature: MA Experiment 20001556 PARAMETER Experiment Name: At_Drought_Soil_Dry_P Parameter: Organism Value: A. thaliana
  misc_feature: MA Experiment 20001556 PARAMETER Experiment Name: At_Drought_Soil_Dry_P Parameter: Plant Line Value: WS
  misc_feature: MA Experiment 20001556 PARAMETER Experiment Name: At_Drought_Soil_Dry_P Parameter: Post Timepoint (hr) Value: None
  misc_feature: MA Experiment 20001556 PARAMETER Experiment Name: At_Drought_Soil_Dry_P Parameter: Post-Treatment Value: None
  misc_feature: MA Experiment 20001556 PARAMETER Experiment Name: At_Drought_Soil_Dry_P Parameter: Timepoint (day) Value: 12
  misc_feature: MA Experiment 20001556 PARAMETER Experiment Name: At_Drought_Soil_Dry_P Parameter: Treatment Value: Drought vs. No Drought
  misc_feature: MA Experiment ID: 20001559 Result: Up-regulated in Transcription
  misc_feature: MA Experiment 20001559 PARAMETER Experiment Name: At_Drought_Soil_Dry_P Parameter: Age (day) Value: 28
  misc_feature: MA Experiment 20001559 PARAMETER Experiment Name: At_Drought_Soil_Dry_P Parameter: Organism Value: A. thaliana
  misc_feature: MA Experiment 20001559 PARAMETER Experiment Name: At_Drought_Soil_Dry_P Parameter: Plant Line Value: WS
  misc_feature: MA Experiment 20001559 PARAMETER Experiment Name: At_Drought_Soil_Dry_P Parameter: Post Timepoint (hr) Value: 29
  misc_feature: MA Experiment 20001559 PARAMETER Experiment Name: At_Drought_Soil_Dry_P Parameter: Post-Treatment Value: Re-Water vs. No Drought
  misc_feature: MA Experiment 20001559 PARAMETER Experiment Name: At_Drought_Soil_Dry_P Parameter: Timepoint (day) Value: 14
  misc_feature: MA Experiment 20001559 PARAMETER Experiment Name: At_Drought_Soil_Dry_P Parameter: Treatment Value: Drought vs. No Drought
  misc_feature: MA Experiment ID: 20001904 Result: Up-regulated in Transcription
  misc_feature: MA Experiment 20001904 PARAMETER Experiment Name: At_Drought_Reproduction_P Parameter: Age (day) Value: 37
  misc_feature: MA Experiment 20001904 PARAMETER Experiment Name: At_Drought_Reproduction_P Parameter: Organism Value: A. thaliana
  misc_feature: MA Experiment 20001904 PARAMETER Experiment Name: At_Drought_Reproduction_P Parameter: Plant Line Value: WS
  misc_feature: MA Experiment 20001904 PARAMETER Experiment Name: At_Drought_Reproduction_P Parameter: Timepoint (day) Value: 7
  misc_feature: MA Experiment 20001904 PARAMETER Experiment Name: At_Drought_Reproduction_P Parameter: Tissue Value: Rosettes
  misc_feature: MA Experiment 20001904 PARAMETER Experiment Name: At_Drought_Reproduction_P Parameter: Treatment Value: Drought vs. No Drought
  misc_feature: MA Experiment ID: 20001905 Result: Up-regulated in Transcription
  misc_feature: MA Experiment 20001905 PARAMETER Experiment Name: At_Drought_Reproduction_P Parameter: Age (day) Value: 40
  misc_feature: MA Experiment 20001905 PARAMETER Experiment Name: At_Drought_Reproduction_P Parameter: Organism Value: A. thaliana
  misc_feature: MA Experiment 20001905 PARAMETER Experiment Name: At_Drought_Reproduction_P Parameter: Plant Line Value: WS
  misc_feature: MA Experiment 20001905 PARAMETER Experiment Name: At_Drought_Reproduction_P Parameter: Timepoint (day) Value: 10
  misc_feature: MA Experiment 20001905 PARAMETER Experiment Name: At_Drought_Reproduction_P Parameter: Tissue Value: Rosettes
  misc_feature: MA Experiment 20001905 PARAMETER Experiment Name: At_Drought_Reproduction_P Parameter: Treatment Value: Drought vs. No Drought
  misc_feature: MA Experiment ID: 20001906 Result: Up-regulated in Transcription
  misc_feature: MA Experiment 20001906 PARAMETER Experiment Name: At_Drought_Reproduction_P Parameter: Age (day) Value: 35
  misc_feature: MA Experiment 20001906 PARAMETER Experiment Name: At_Drought_Reproduction_P Parameter: Organism Value: A. thaliana
  misc_feature: MA Experiment 20001906 PARAMETER Experiment Name: At_Drought_Reproduction_P Parameter: Plant Line Value: WS
  misc_feature: MA Experiment 20001906 PARAMETER Experiment Name: At_Drought_Reproduction_P Parameter: Timepoint (day) Value: 5
  misc_feature: MA Experiment 20001906 PARAMETER Experiment Name: At_Drought_Reproduction_P Parameter: Tissue Value: Siliques
  misc_feature: MA Experiment 20001906 PARAMETER Experiment Name: At_Drought_Reproduction_P Parameter: Treatment Value: Drought vs. No Drought
  misc_feature: MA Experiment ID: 20001910 Result: Up-regulated in Transcription
  misc_feature: MA Experiment 20001910 PARAMETER Experiment Name: At_Drought_Reproduction_P Parameter: Age (day) Value: 37
  misc_feature: MA Experiment 20001910 PARAMETER Experiment Name: At_Drought_Reproduction_P Parameter: Organism Value: A. thaliana
  misc_feature: MA Experiment 20001910 PARAMETER Experiment Name: At_Drought_Reproduction_P Parameter: Plant Line Value: WS
  misc_feature: MA Experiment 20001910 PARAMETER Experiment Name: At_Drought_Reproduction_P Parameter: Timepoint (day) Value: 7
  misc_feature: MA Experiment 20001910 PARAMETER Experiment Name: At_Drought_Reproduction_P Parameter: Tissue Value: Flowers
  misc_feature: MA Experiment 20001910 PARAMETER Experiment Name: At_Drought_Reproduction_P Parameter: Treatment Value: Drought vs. No Drought
  misc_feature: MA Experiment ID: 20001911 Result: Up-regulated in Transcription
  misc_feature: MA Experiment 20001911 PARAMETER Experiment Name: At_Drought_Reproduction_P Parameter: Age (day) Value: 40
  misc_feature: MA Experiment 20001911 PARAMETER Experiment Name: At_Drought_Reproduction_P Parameter: Organism Value: A. thaliana
  misc_feature: MA Experiment 20001911 PARAMETER Experiment Name: At_Drought_Reproduction_P Parameter: Plant Line Value: WS
  misc_feature: MA Experiment 20001911 PARAMETER Experiment Name: At_Drought_Reproduction_P Parameter: Timepoint (day) Value: 10
  misc_feature: MA Experiment 20001911 PARAMETER Experiment Name: At_Drought_Reproduction_P Parameter: Tissue Value: Flowers
  misc_feature: MA Experiment 20001911 PARAMETER Experiment Name: At_Drought_Reproduction_P Parameter: Treatment Value: Drought vs. No Drought
ctcaacatacacaaaacactaaaagtagaagaaaaatggcgactcttaaggtttctgattctgttcctgctccttctgatgatgctgagcaattgagaaccgcttttgaaggatggggtacaaacgaggacttgatcatatcaatcttggctcacagaagtgctgaacagaggaaagtgatcaggcaagcataccatgaaacctacggtgaagaccttctcaagactcttgacaaggagctctctaacgacttcgagagagctatcttgttgtggactcttgaacccggtgagcgtgatgctttattggctaatgaagctacaaaaagatggacttcaagcaaccaagtgcttatggaagtagcttgcacaaggacatcaacgcagctgcttcacgcgaggcaagcttaccatgctcgctacaagaagtctcttgaagaggacgtggctcaccacactaccggtgacttcagaaagcttttggtctctcttgttacctcatacaggtacgaaggagatgaagtgaacatgacattggctaagcaagaagctaagctggtccatgagaaaatcaaggacaagcactacaatgatgaggatgttattagaatcttgtccacaagaagcaaagctcagatcaatgctacttttaaccgttaccaagatgatcatggcgaggaaattctcaagagtcttgaggaaggagatgatgatgacaagttccttgcacttttgaggtcaaccattcagtgcttgacaagaccagagctttactttgtcgatgttcttcgttcagcaatcaacaaaactggaactgatgaaggagcactcactagaattgtgaccacaagagctgagattgacttgaaggtcattggagaggagtaccagcgcaggaacagcattcctttggagaaagctattaccaaagacactcgtggagattacgagaagatgctcgtcgcacttctcggtgaagatgatgcttaatcaatcaatcctccacagagaaacataagctgctctacagcttctgttatctcttatctccctctctctctctttgatgagtttcaaatcgtttgattttgtttctacaaaaaccttgtttgtttctgttgtgtgttttgagttcctaaataatgcaaaagagagagacagagagaaccagtgtggtctcttaagttatatac

SEQ ID NO: 36034 - protein, 328 aa, Arabidopsis thaliana
  peptide (1)..(328): Ceres Seq. ID no. 12606734
  misc_feature (24)..(91): Pfam Name: Annexin Pfam Description: Annexin
  misc_feature (12)..(327): Homolog of NCBI NO: 12084607 NR Description: Chain A, Crystal Structure Of Annexin 24(Ca32)
  misc_feature (12)..(327): Homolog of NCBI NO: 2129923 NR Description: annexin - pepper
  misc_feature (13)..(324): Homolog of NCBI NO: 7441510 NR Description: annexin - upland cotton (fragment)
  misc_feature (12)..(328): Homolog of NCBI NO: 2459926 NR Description: annexin [Lavatera thuringiaca]
  misc_feature (13)..(324): Homolog of NCBI NO: 33357398 NR Description: Chain A, Annexin Gh1 From Cotton
  misc_feature (13)..(324): Homolog of NCBI NO: 15214410 NR Description: annexin [Gossypium hirsutum]
  misc_feature (12)..(324): Homolog of NCBI NO: 7484723 NR Description: fiber annexin - upland cotton
  misc_feature (14)..(328): Homolog of NCBI NO: 1429207 NR Description: annexin [Arabidopsis thaliana]
  misc_feature (12)..(328): Homolog of NCBI NO: 1621539 NR Description: annexin-like protein
  misc_feature (12)..(328): Homolog of NCBI NO: 15220216 NR Description: Ca2+-dependent membrane-binding protein annexin
QHTQNTKSRRKMATLKVSDSVPAPSDDAEQLRTAFEGWGTNEDLIISILAHRSAEQRKVIRQAYHETYGEDLLKTLDKELSNDFERAILLWTLEPGERDALLANEATKRWTSSNQVLMEVACTRTSTQLLHARQAYHARYKKSLEEDVAHHTTGDFRKLLVSLVTSYRYEGDEVNMTLAKQEAKLVHEKIKDKHYNDEDVIRILSTRSKAQINATFNRYQDDHGEEILKSLEEGDDDDKFLALLRSTIQCLTRPELYFVDVLRSAINKTGTDEGALTRIVTTRAEIDLKVIGEEYQRRNSIPLEKAITKDTRGDYEKMLVALLGEDDA

SEQ ID NO: 36035 - protein, 317 aa, Arabidopsis thaliana; identical to SEQ ID NO: 35542
  peptide (1)..(317): Ceres Seq. ID no. 12606735
  misc_feature (13)..(80): Pfam Name: Annexin Pfam Description: Annexin
  misc_feature (1)..(316): Homolog of NCBI NO: 12084607 NR Description: Chain A, Crystal Structure Of Annexin 24(Ca32)
  misc_feature (1)..(316): Homolog of NCBI NO: 2129923 NR Description: annexin - pepper
  misc_feature (2)..(313): Homolog of NCBI NO: 7441510 NR Description: annexin - upland cotton (fragment)
  misc_feature (1)..(317): Homolog of NCBI NO: 2459926 NR Description: annexin [Lavatera thuringiaca]
  misc_feature (2)..(313): Homolog of NCBI NO: 33357398 NR Description: Chain A, Annexin Gh1 From Cotton
  misc_feature (2)..(313): Homolog of NCBI NO: 15214410 NR Description: annexin [Gossypium hirsutum]
  misc_feature (1)..(313): Homolog of NCBI NO: 7484723 NR Description: fiber annexin - upland cotton
  misc_feature (3)..(317): Homolog of NCBI NO: 1429207 NR Description: annexin [Arabidopsis thaliana]
  misc_feature (1)..(317): Homolog of NCBI NO: 1621539 NR Description: annexin-like protein
  misc_feature (1)..(317): Homolog of NCBI NO: 15220216 NR Description: Ca2+-dependent membrane-binding protein annexin

SEQ ID NO: 36036 - protein, 211 aa, Arabidopsis thaliana; identical to SEQ ID NO: 24550
  peptide (1)..(211): Ceres Seq. ID no. 12606736
  misc_feature (1)..(210): Homolog of NCBI NO: 12084607 NR Description: Chain A, Crystal Structure Of Annexin 24(Ca32)
  misc_feature (1)..(210): Homolog of NCBI NO: 2129923 NR Description: annexin - pepper
  misc_feature (1)..(207): Homolog of NCBI NO: 7441510 NR Description: annexin - upland cotton (fragment)
  misc_feature (1)..(211): Homolog of NCBI NO: 2459926 NR Description: annexin [Lavatera thuringiaca]
  misc_feature (1)..(207): Homolog of NCBI NO: 33357398 NR Description: Chain A, Annexin Gh1 From Cotton
  misc_feature (1)..(207): Homolog of NCBI NO: 15214410 NR Description: annexin [Gossypium hirsutum]
  misc_feature (1)..(207): Homolog of NCBI NO: 7484723 NR Description: fiber annexin - upland cotton
  misc_feature (1)..(211): Homolog of NCBI NO: 1429207 NR Description: annexin [Arabidopsis thaliana]
  misc_feature (1)..(211): Homolog of NCBI NO: 1621539 NR Description: annexin-like protein
  misc_feature (1)..(211): Homolog of NCBI NO: 15220216 NR Description: Ca2+-dependent membrane-binding protein annexin

SEQ ID NO: 36037 - DNA, 743 bp, Arabidopsis thaliana
  misc_feature (1)..(743): Ceres Seq. ID no. 13592706
  misc_feature: MA Experiment ID: 20000180 Result: Up-regulated in Transcription
  misc_feature: MA Experiment 20000180 PARAMETER Experiment Name: At_Germinating_Seeds_P Parameter: Age (hr) Value: 24 vs. 0
  misc_feature: MA Experiment 20000180 PARAMETER Experiment Name: At_Germinating_Seeds_P Parameter: Tissue Value: Germinating Seeds
  misc_feature: MA Experiment ID: 20000184 Result: Up-regulated in Transcription
  misc_feature: MA Experiment 20000184 PARAMETER Experiment Name: At_Shoots__P Parameter: Age (day) Value: 7
  misc_feature: MA Experiment 20000184 PARAMETER Experiment Name: At_Shoots__P Parameter: Tissue Value: Shoots vs. Whole Plant
  misc_feature: MA Experiment ID: 20000185 Result: Down-regulated in Transcription
  misc_feature: MA Experiment 20000185 PARAMETER Experiment Name: At_Roots__P Parameter: Age (day) Value: 7 vs. 21
  misc_feature: MA Experiment 20000185 PARAMETER Experiment Name: At_Roots__P Parameter: Organism Value: A. thaliana
  misc_feature: MA Experiment 20000185 PARAMETER Experiment Name: At_Roots__P Parameter: Tissue Value: Roots vs. Whole Plant
  misc_feature: MA Experiment ID: 20000264 Result: Down-regulated in Transcription
  misc_feature: MA Experiment 20000264 PARAMETER Experiment Name: At_Open_Flower_P Parameter: Age (day) Value: 21
  misc_feature: MA Experiment 20000264 PARAMETER Experiment Name: At_Open_Flower_P Parameter: Plant Line Value: WS
  misc_feature: MA Experiment 20000264 PARAMETER Experiment Name: At_Open_Flower_P Parameter: Tissue Value: Open Flower vs. Whole Plant
  misc_feature: MA Experiment ID: 20000437 Result: Down-regulated in Transcription
  misc_feature: MA Experiment 20000437 PARAMETER Experiment Name: At_Drought_P Parameter: Age (day) Value: 8
  misc_feature: MA Experiment 20000437 PARAMETER Experiment Name: At_Drought_P Parameter: Organism Value: A. thaliana
  misc_feature: MA Experiment 20000437 PARAMETER Experiment Name: At_Drought_P Parameter: Plant Line Value: WS
  misc_feature: MA Experiment 20000437 PARAMETER Experiment Name: At_Drought_P Parameter: Timepoint (hr) Value: 24
  misc_feature: MA Experiment 20000437 PARAMETER Experiment Name: At_Drought_P Parameter: Tissue Value: Whole Plant
  misc_feature: MA Experiment 20000437 PARAMETER Experiment Name: At_Drought_P Parameter: Treatment Value: Drought vs. No Drought
  misc_feature: MA Experiment ID: 20000438 Result: Up-regulated in Transcription
  misc_feature: MA Experiment 20000438 PARAMETER Experiment Name: At_Shoots__P Parameter: Age (day) Value: 14
  misc_feature: MA Experiment 20000438 PARAMETER Experiment Name: At_Shoots__P Parameter: Tissue Value: Shoots vs. Whole Plant
  misc_feature: MA Experiment ID: 20000439 Result: Down-regulated in Transcription
  misc_feature: MA Experiment 20000439 PARAMETER Experiment Name: At_Roots__P Parameter: Age (day) Value: 14 vs. 21
  misc_feature: MA Experiment 20000439 PARAMETER Experiment Name: At_Roots__P Parameter: Organism Value: A. thaliana
  misc_feature: MA Experiment 20000439 PARAMETER Experiment Name: At_Roots__P Parameter: Tissue Value: Roots vs. Whole Plant
  misc_feature: MA Experiment ID: 20000495 Result: Down-regulated in Transcription
  misc_feature: MA Experiment 20000495 PARAMETER Experiment Name: At_Guard_Cells_P Parameter: Harvest Date Value: 8/2/2002
  misc_feature: MA Experiment 20000495 PARAMETER Experiment Name: At_Guard_Cells_P Parameter: Organism Value: A. thaliana
  misc_feature: MA Experiment 20000495 PARAMETER Experiment Name: At_Guard_Cells_P Parameter: Tissue Value: Guard Cells vs. Leaves
  misc_feature: MA Experiment ID: 20000496 Result: Down-regulated in Transcription
  misc_feature: MA Experiment 20000496 PARAMETER Experiment Name: At_Guard_Cells_P Parameter: Harvest Date Value: 7/19/2002
  misc_feature: MA Experiment 20000496 PARAMETER Experiment Name: At_Guard_Cells_P Parameter: Organism Value: Canola
  misc_feature: MA Experiment 20000496 PARAMETER Experiment Name: At_Guard_Cells_P Parameter: Tissue Value: Guard Cells vs. Leaves
  misc_feature: MA Experiment ID: 20000794 Result: Down-regulated in Transcription
  misc_feature: MA Experiment 20000794 PARAMETER Experiment Name: At_Petals_P Parameter: Age (day) Value: 23-25 days
  misc_feature: MA Experiment 20000794 PARAMETER Experiment Name: At_Petals_P Parameter: Plant Line Value: WS
  misc_feature: MA Experiment 20000794 PARAMETER Experiment Name: At_Petals_P Parameter: Tissue Value: Petals vs. Whole plant
  misc_feature: MA Experiment ID: 20001248 Result: Down-regulated in Transcription
  misc_feature: MA Experiment 20001248 PARAMETER Experiment Name: At_Far-red-induction_P Parameter: Age (day) Value: 7
  misc_feature: MA Experiment 20001248 PARAMETER Experiment Name: At_Far-red-induction_P Parameter: Light Value: Far-red vs. White
  misc_feature: MA Experiment 20001248 PARAMETER Experiment Name: At_Far-red-induction_P Parameter: Organism Value: A. thaliana
  misc_feature: MA Experiment 20001248 PARAMETER Experiment Name: At_Far-red-induction_P Parameter: Plant Line Value: Columbia
  misc_feature: MA Experiment 20001248 PARAMETER Experiment Name: At_Far-red-induction_P Parameter: Timepoint (hr) Value: 4
  misc_feature: MA Experiment 20001248 PARAMETER Experiment Name: At_Far-red-induction_P Parameter: Tissue Value: Whole Plant
  misc_feature: MA Experiment ID: 20001450 Result: Down-regulated in Transcription
  misc_feature: MA Experiment 20001450 PARAMETER Experiment Name: At_Far-red-induction_P Parameter: Age (day) Value: 7
  misc_feature: MA Experiment 20001450 PARAMETER Experiment Name: At_Far-red-induction_P Parameter: Light Value: Far-red vs. White
  misc_feature: MA Experiment 20001450 PARAMETER Experiment Name: At_Far-red-induction_P Parameter: Organism Value: A. thaliana
  misc_feature: MA Experiment 20001450 PARAMETER Experiment Name: At_Far-red-induction_P Parameter: Plant Line Value: Columbia
  misc_feature: MA Experiment 20001450 PARAMETER Experiment Name: At_Far-red-induction_P Parameter: Timepoint (hr) Value: 8
  misc_feature: MA Experiment 20001450 PARAMETER Experiment Name: At_Far-red-induction_P Parameter: Tissue Value: Whole Plant
  misc_feature: MA Experiment ID: 20001451 Result: Down-regulated in Transcription
  misc_feature: MA Experiment 20001451 PARAMETER Experiment Name: At_Far-red-induction_P Parameter: Age (day) Value: 7
  misc_feature: MA Experiment 20001451 PARAMETER Experiment Name: At_Far-red-induction_P Parameter: Light Value: Far-red vs. White
  misc_feature: MA Experiment 20001451 PARAMETER Experiment Name: At_Far-red-induction_P Parameter: Organism Value: A. thaliana
  misc_feature: MA Experiment 20001451 PARAMETER Experiment Name: At_Far-red-induction_P Parameter: Plant Line Value: Columbia
  misc_feature: MA Experiment 20001451 PARAMETER Experiment Name: At_Far-red-induction_P Parameter: Timepoint (hr) Value: 24
  misc_feature: MA Experiment 20001451 PARAMETER Experiment Name: At_Far-red-induction_P Parameter: Tissue Value: Whole Plant
  misc_feature: MA Experiment ID: 20001555 Result: Down-regulated in Transcription
  misc_feature: MA Experiment 20001555 PARAMETER Experiment Name: At_Drought_Soil_Dry_P Parameter: Age (day) Value: 24
  misc_feature: MA Experiment 20001555 PARAMETER Experiment Name: At_Drought_Soil_Dry_P Parameter: Organism Value: A. thaliana
  misc_feature: MA Experiment 20001555 PARAMETER Experiment Name: At_Drought_Soil_Dry_P Parameter: Plant Line Value: WS
  misc_feature: MA Experiment 20001555 PARAMETER Experiment Name: At_Drought_Soil_Dry_P Parameter: Post Timepoint (hr) Value: None
  misc_feature: MA Experiment 20001555 PARAMETER Experiment Name: At_Drought_Soil_Dry_P Parameter: Post-Treatment Value: None
  misc_feature: MA Experiment 20001555 PARAMETER Experiment Name: At_Drought_Soil_Dry_P Parameter: Timepoint (day) Value: 10
  misc_feature: MA Experiment 20001555 PARAMETER Experiment Name: At_Drought_Soil_Dry_P Parameter: Treatment Value: Drought vs. No Drought
  misc_feature: MA Experiment ID: 20001757 Result: Up-regulated in Transcription
  misc_feature: MA Experiment 20001757 PARAMETER Experiment Name: At_50mM_NH4NO3_L-to-H_P Parameter: Timepoint (hr) Value: 6
  misc_feature: MA Experiment 20001757 PARAMETER Experiment Name: At_50mM_NH4NO3_L-to-H_P Parameter: Tissue Value: Leaf
  misc_feature: MA Experiment 20001757 PARAMETER Experiment Name: At_50mM_NH4NO3_L-to-H_P Parameter: Treatment Value: 50mM NH4NO3 vs 100mM Mannitol
  misc_feature: MA Experiment ID: 20001904 Result: Down-regulated in Transcription
  misc_feature: MA Experiment 20001904 PARAMETER Experiment Name: At_Drought_Reproduction_P Parameter: Age (day) Value: 37
  misc_feature: MA Experiment 20001904 PARAMETER Experiment Name: At_Drought_Reproduction_P Parameter: Organism Value: A. thaliana
  misc_feature: MA Experiment 20001904 PARAMETER Experiment Name: At_Drought_Reproduction_P Parameter: Plant Line Value: WS
  misc_feature: MA Experiment 20001904 PARAMETER Experiment Name: At_Drought_Reproduction_P Parameter: Timepoint (day) Value: 7
  misc_feature: MA Experiment 20001904 PARAMETER Experiment Name: At_Drought_Reproduction_P Parameter: Tissue Value: Rosettes
  misc_feature: MA Experiment 20001904 PARAMETER Experiment Name: At_Drought_Reproduction_P Parameter: Treatment Value: Drought vs. No Drought
  misc_feature: MA Experiment ID: 20001905 Result: Down-regulated in Transcription
  misc_feature: MA Experiment 20001905 PARAMETER Experiment Name: At_Drought_Reproduction_P Parameter: Age (day) Value: 40
  misc_feature: MA Experiment 20001905 PARAMETER Experiment Name: At_Drought_Reproduction_P Parameter: Organism Value: A. thaliana
  misc_feature: MA Experiment 20001905 PARAMETER Experiment Name: At_Drought_Reproduction_P Parameter: Plant Line Value: WS
  misc_feature: MA Experiment 20001905 PARAMETER Experiment Name: At_Drought_Reproduction_P Parameter: Timepoint (day) Value: 10
  misc_feature: MA Experiment 20001905 PARAMETER Experiment Name: At_Drought_Reproduction_P Parameter: Tissue Value: Rosettes
  misc_feature: MA Experiment 20001905 PARAMETER Experiment Name: At_Drought_Reproduction_P Parameter: Treatment Value: Drought vs. No Drought
  misc_feature: MA Experiment ID: 20001906 Result: Down-regulated in Transcription
  misc_feature: MA Experiment 20001906 PARAMETER Experiment Name: At_Drought_Reproduction_P Parameter: Age (day) Value: 35
  misc_feature: MA Experiment 20001906 PARAMETER Experiment Name: At_Drought_Reproduction_P Parameter: Organism Value: A. thaliana
  misc_feature: MA Experiment 20001906 PARAMETER Experiment Name: At_Drought_Reproduction_P Parameter: Plant Line Value: WS
  misc_feature: MA Experiment 20001906 PARAMETER Experiment Name: At_Drought_Reproduction_P Parameter: Timepoint (day) Value: 5
  misc_feature: MA Experiment 20001906 PARAMETER Experiment Name: At_Drought_Reproduction_P Parameter: Tissue Value: Siliques
  misc_feature: MA Experiment 20001906 PARAMETER Experiment Name: At_Drought_Reproduction_P Parameter: Treatment Value: Drought vs. No Drought
  misc_feature: MA Experiment ID: 20001907 Result: Down-regulated in Transcription
  misc_feature: MA Experiment 20001907 PARAMETER Experiment Name: At_Drought_Reproduction_P Parameter: Age (day) Value: 37
  misc_feature: MA Experiment 20001907 PARAMETER Experiment Name: At_Drought_Reproduction_P Parameter: Organism Value: A. thaliana
  misc_feature: MA Experiment 20001907 PARAMETER Experiment Name: At_Drought_Reproduction_P Parameter: Plant Line Value: WS
  misc_feature: MA Experiment 20001907 PARAMETER Experiment Name: At_Drought_Reproduction_P Parameter: Timepoint (day) Value: 7
  misc_feature: MA Experiment 20001907 PARAMETER Experiment Name: At_Drought_Reproduction_P Parameter: Tissue Value: Siliques
  misc_feature: MA Experiment 20001907 PARAMETER Experiment Name: At_Drought_Reproduction_P Parameter: Treatment Value: Drought vs. No Drought
gaagtcagtaagtaaacgagcaaaagaagaagagaaacaacaagaagtagtaatggcttcctctatgctctcctccgccgctgtggttacatccccggctcaggccaccatggtcgctccattcaccggcttgaagtcatccgctgcattcccggtcacccgcaagaccaacaaggacatcacttccatcgcaagcaacgggggaagagttagctgcatgaaggtgtggccaccaattggaaagaagaagtttgagactctatcttacctccctgaccttagtgacgtcgaattggctaaggaagttgactaccttctccgcaacaagtggattccttgtgttgaattcgagttagagcacggatttgtgtaccgtgagcacggaaacactcccggatactacgatggacggtactggacaatgtggaagcttccattgttcggatgcaccgactccgctcaagtgttgaaggaagttgaagaatgcaagaaggagtacccgggcgccttcattaggatcatcggattcgacaacacacgtcaagtccaatgcatcagtttcattgcctacaagcccccaagcttcaccgaagcttaatttcttttctaaaacattcttatgaattatctctgctcatttcatttcctattgtctgtgttctttttctctttatgagacaatttctatcggattgtcaaatgtctgatttatgaatatgtaatttatatatccgtgcgtcttg

SEQ ID NO: 36038 - protein, 198 aa, Arabidopsis thaliana
  peptide (1)..(198): Ceres Seq. ID no. 13592707
  misc_feature (18)..(196): Homolog of NCBI NO: 15219826 NR Description: ribulose-bisphosphate carboxylase small unit
  misc_feature (18)..(198): Homolog of NCBI NO: 480983 NR Description: ribulose-bisphosphate carboxylase (EC 4.1.1.39)
  misc_feature (18)..(198): Homolog of NCBI NO: 266891 NR Description: Ribulose bisphosphate carboxylase small chain,
  misc_feature (18)..(198): Homolog of NCBI NO: 132091 NR Description: Ribulose bisphosphate carboxylase small chain F1,
  misc_feature (18)..(198): Homolog of NCBI NO: 132154 NR Description: Ribulose bisphosphate carboxylase small chain,
  misc_feature (18)..(198): Homolog of NCBI NO: 15240903 NR Description: ribulose bisphosphate carboxylase small chain 2b
  misc_feature (18)..(198): Homolog of NCBI NO: 15240912 NR Description: ribulose bisphosphate carboxylase small chain 1b
  misc_feature (18)..(198): Homolog of NCBI NO: 68061 NR Description: ribulose-bisphosphate carboxylase (EC 4.1.1.39)
  misc_feature (18)..(198): Homolog of NCBI NO: 68060 NR Description: ribulose-bisphosphate carboxylase (EC 4.1.1.39)
  misc_feature (18)..(198): Homolog of NCBI NO: 15240901 NR Description: ribulose bisphosphate carboxylase small chain 3b
  misc_feature (18)..(196): Homolog of NCBI NO: 15219826 NR Description: ribulose-bisphosphate carboxylase small unit
  misc_feature (18)..(198): Homolog of NCBI NO: 480983 NR Description: ribulose-bisphosphate carboxylase (EC 4.1.1.39)
  misc_feature (18)..(198): Homolog of NCBI NO: 266891 NR Description: Ribulose bisphosphate carboxylase small chain,
  misc_feature (18)..(198): Homolog of NCBI NO: 132091 NR Description: Ribulose bisphosphate carboxylase small chain F1,
  misc_feature (18)..(198): Homolog of NCBI NO: 132154 NR Description: Ribulose bisphosphate carboxylase small chain,
  misc_feature (18)..(198): Homolog of NCBI NO: 15240903 NR Description: ribulose bisphosphate carboxylase small chain 2b
  misc_feature (18)..(198): Homolog of NCBI NO: 15240912 NR Description: ribulose bisphosphate carboxylase small chain 1b
  misc_feature (18)..(198): Homolog of NCBI NO: 68061 NR Description: ribulose-bisphosphate carboxylase (EC 4.1.1.39)
  misc_feature (18)..(198): Homolog of NCBI NO: 68060 NR Description: ribulose-bisphosphate carboxylase (EC 4.1.1.39)
  misc_feature (18)..(198): Homolog of NCBI NO: 15240901 NR Description: ribulose bisphosphate carboxylase small chain 3b
KSVSKRAKEEEKQQEVVMASSMLSSAAVVTSPAQATMVAPFTGLKSSAAFPVTRKTNKDITSIASNGGRVSCMKVWPPIGKKKFETLSYLPDLSDVELAKEVDYLLRNKWIPCVEFELEHGFVYREHGNTPGYYDGRYWTMWKLPLFGCTDSAQVLKEVEECKKEYPGAFIRIIGFDNTRQVQCISFIAYKPPSFTEA

SEQ ID NO: 36039 - protein, 181 aa, Arabidopsis thaliana
  peptide (1)..(181): Ceres Seq. ID no. 13592708
  misc_feature (1)..(179): Homolog of NCBI NO: 15219826 NR Description: ribulose-bisphosphate carboxylase small unit
  misc_feature (1)..(181): Homolog of NCBI NO: 480983 NR Description: ribulose-bisphosphate carboxylase (EC 4.1.1.39)
  misc_feature (1)..(181): Homolog of NCBI NO: 266891 NR Description: Ribulose bisphosphate carboxylase small chain,
  misc_feature (1)..(181): Homolog of NCBI NO: 132091 NR Description: Ribulose bisphosphate carboxylase small chain F1,
  misc_feature (1)..(181): Homolog of NCBI NO: 132154 NR Description: Ribulose bisphosphate carboxylase small chain,
  misc_feature (1)..(181): Homolog of NCBI NO: 15240903 NR Description: ribulose bisphosphate carboxylase small chain 2b
  misc_feature (1)..(181): Homolog of NCBI NO: 15240912 NR Description: ribulose bisphosphate carboxylase small chain 1b
  misc_feature (1)..(181): Homolog of NCBI NO: 68061 NR Description: ribulose-bisphosphate carboxylase (EC 4.1.1.39)
  misc_feature (1)..(181): Homolog of NCBI NO: 68060 NR Description: ribulose-bisphosphate carboxylase (EC 4.1.1.39)
  misc_feature (1)..(181): Homolog of NCBI NO: 15240901 NR Description: ribulose bisphosphate carboxylase small chain 3b
  misc_feature (1)..(179): Homolog of NCBI NO: 15219826 NR Description: ribulose-bisphosphate carboxylase small unit
  misc_feature (1)..(181): Homolog of NCBI NO: 480983 NR Description: ribulose-bisphosphate carboxylase (EC 4.1.1.39)
  misc_feature (1)..(181): Homolog of NCBI NO: 266891 NR Description: Ribulose bisphosphate carboxylase small chain,
  misc_feature (1)..(181): Homolog of NCBI NO: 132091 NR Description: Ribulose bisphosphate carboxylase small chain F1,
  misc_feature (1)..(181): Homolog of NCBI NO: 132154 NR Description: Ribulose bisphosphate carboxylase small chain,
  misc_feature (1)..(181): Homolog of NCBI NO: 15240903 NR Description: ribulose bisphosphate carboxylase small chain 2b
  misc_feature (1)..(181): Homolog of NCBI NO: 15240912 NR Description: ribulose bisphosphate carboxylase small chain 1b
  misc_feature (1)..(181): Homolog of NCBI NO: 68061 NR Description: ribulose-bisphosphate carboxylase (EC 4.1.1.39)
  misc_feature (1)..(181): Homolog of NCBI NO: 68060 NR Description: ribulose-bisphosphate carboxylase (EC 4.1.1.39)
  misc_feature (1)..(181): Homolog of NCBI NO: 15240901 NR Description: ribulose bisphosphate carboxylase small chain 3b
MASSMLSSAAVVTSPAQATMVAPFTGLKSSAAFPVTRKTNKDITSIASNGGRVSCMKVWPPIGKKKFETLSYLPDLSDVELAKEVDYLLRNKWIPCVEFELEHGFVYREHGNTPGYYDGRYWTMWKLPLFGCTDSAQVLKEVEECKKEYPGAFIRIIGFDNTRQVQCISFIAYKPPSFTEA

SEQ ID NO: 36040 - protein, 177 aa, Arabidopsis thaliana
  peptide (1)..(177): Ceres Seq. ID no. 13592709
  misc_feature (1)..(175): Homolog of NCBI NO: 15219826 NR Description: ribulose-bisphosphate carboxylase small unit
  misc_feature (1)..(177): Homolog of NCBI NO: 480983 NR Description: ribulose-bisphosphate carboxylase (EC 4.1.1.39)
  misc_feature (1)..(177): Homolog of NCBI NO: 266891 NR Description: Ribulose bisphosphate carboxylase small chain,
  misc_feature (1)..(177): Homolog of NCBI NO: 132091 NR Description: Ribulose bisphosphate carboxylase small chain F1,
  misc_feature (1)..(177): Homolog of NCBI NO: 132154 NR Description: Ribulose bisphosphate carboxylase small chain,
  misc_feature (1)..(177): Homolog of NCBI NO: 15240903 NR Description: ribulose bisphosphate carboxylase small chain 2b
  misc_feature (1)..(177): Homolog of NCBI NO: 15240912 NR Description: ribulose bisphosphate carboxylase small chain 1b
  misc_feature (1)..(177): Homolog of NCBI NO: 68061 NR Description: ribulose-bisphosphate carboxylase (EC 4.1.1.39)
  misc_feature (1)..(177): Homolog of NCBI NO: 68060 NR Description: ribulose-bisphosphate carboxylase (EC 4.1.1.39)
  misc_feature (1)..(177): Homolog of NCBI NO: 15240901 NR Description: ribulose bisphosphate carboxylase small chain 3b
  misc_feature (1)..(175): Homolog of NCBI NO: 15219826 NR Description: ribulose-bisphosphate carboxylase small unit
  misc_feature (1)..(177): Homolog of NCBI NO: 480983 NR Description: ribulose-bisphosphate carboxylase (EC 4.1.1.39)
  misc_feature (1)..(177): Homolog of NCBI NO: 266891 NR Description: Ribulose bisphosphate carboxylase small chain,
  misc_feature (1)..(177): Homolog of NCBI NO: 132091 NR Description: Ribulose bisphosphate carboxylase small chain F1,
  misc_feature (1)..(177): Homolog of NCBI NO: 132154 NR Description: Ribulose bisphosphate carboxylase small chain,
  misc_feature (1)..(177): Homolog of NCBI NO: 15240903 NR Description: ribulose bisphosphate carboxylase small chain 2b
  misc_feature (1)..(177): Homolog of NCBI NO: 15240912 NR Description: ribulose bisphosphate carboxylase small chain 1b
  misc_feature (1)..(177): Homolog of NCBI NO: 68061 NR Description: ribulose-bisphosphate carboxylase (EC 4.1.1.39)
  misc_feature (1)..(177): Homolog of NCBI NO: 68060 NR Description: ribulose-bisphosphate carboxylase (EC 4.1.1.39)
  misc_feature (1)..(177): Homolog of NCBI NO: 15240901 NR Description: ribulose bisphosphate carboxylase small chain 3b
MLSSAAVVTSPAQATMVAPFTGLKSSAAFPVTRKTNKDITSIASNGGRVSCMKVWPPIGKKKFETLSYLPDLSDVELAKEVDYLLRNKWIPCVEFELEHGFVYREHGNTPGYYDGRYWTMWKLPLFGCTDSAQVLKEVEECKKEYPGAFIRIIGFDNTRQVQCISFIAYKPPSFTEA

SEQ ID NO: 36041 - DNA, 1365 bp, Arabidopsis thaliana
  misc_feature (1)..(1365): Ceres Seq. ID no. 12371989
  misc_feature: MA Experiment ID: 108462 Result: Up-regulated in Transcription
  misc_feature: MA Experiment 108462 PARAMETER Experiment Name: At_Germinating_Seeds_cDNA_P Parameter: Age (day) Value: 2 vs. 0
  misc_feature: MA Experiment 108462 PARAMETER Experiment Name: At_Germinating_Seeds_cDNA_P Parameter: Tissue Value: Germinating Seeds
  misc_feature: MA Experiment ID: 108463 Result: Up-regulated in Transcription
  misc_feature: MA Experiment 108463 PARAMETER Experiment Name: At_Germinating_Seeds_cDNA_P Parameter: Age (day) Value: 3 vs. 0
  misc_feature: MA Experiment 108463 PARAMETER Experiment Name: At_Germinating_Seeds_cDNA_P Parameter: Tissue Value: Germinating Seeds
  misc_feature: MA Experiment ID: 108464 Result: Up-regulated in Transcription
  misc_feature: MA Experiment 108464 PARAMETER Experiment Name: At_Germinating_Seeds_cDNA_P Parameter: Age (day) Value: 4 vs. 0
  misc_feature: MA Experiment 108464 PARAMETER Experiment Name: At_Germinating_Seeds_cDNA_P Parameter: Tissue Value: Germinating Seeds
  misc_feature: MA Experiment ID: 108572 Result: Down-regulated in Transcription
  misc_feature: MA Experiment 108572 PARAMETER Experiment Name: At_Drought_cDNA_P Parameter: Timepoint (hr) Value: 1
  misc_feature: MA Experiment 108572 PARAMETER Experiment Name: At_Drought_cDNA_P Parameter: Tissue Value: Aerial
  misc_feature: MA Experiment 108572 PARAMETER Experiment Name: At_Drought_cDNA_P Parameter: Treatment Value: Drought vs. No Drought
  misc_feature: MA Experiment ID: 108594 Result: Up-regulated in Transcription
  misc_feature: MA Experiment 108594 PARAMETER Experiment Name: At_Ler-rhl_Root_cDNA_P Parameter: Plant Line Value: null
  misc_feature: MA Experiment ID: 20000069 Result: Up-regulated in Transcription
  misc_feature: MA Experiment 20000069 PARAMETER Experiment Name: At_100uM_ABA_Mutants_cDNA_P Parameter: Plant Line Value: CS23
  misc_feature: MA Experiment 20000069 PARAMETER Experiment Name: At_100uM_ABA_Mutants_cDNA_P Parameter: Timepoint (hr) Value: 6
  misc_feature: MA Experiment 20000069 PARAMETER Experiment Name: At_100uM_ABA_Mutants_cDNA_P Parameter: Tissue Value: Aerial
  misc_feature: MA Experiment 20000069 PARAMETER Experiment Name: At_100uM_ABA_Mutants_cDNA_P Parameter: Treatment Value: 100uM ABA vs. No Treatment
  misc_feature: MA Experiment ID: 20000070 Result: Up-regulated in Transcription
  misc_feature: MA Experiment 20000070 PARAMETER Experiment Name: At_100uM_ABA_Mutants_cDNA_P Parameter: Plant Line Value: CS24
  misc_feature: MA Experiment 20000070 PARAMETER Experiment Name: At_100uM_ABA_Mutants_cDNA_P Parameter: Timepoint (hr) Value: 6
  misc_feature: MA Experiment 20000070 PARAMETER Experiment Name: At_100uM_ABA_Mutants_cDNA_P Parameter: Tissue Value: Aerial
  misc_feature: MA Experiment 20000070 PARAMETER Experiment Name: At_100uM_ABA_Mutants_cDNA_P Parameter: Treatment Value: 100uM ABA vs. No Treatment
  misc_feature: MA Experiment ID: 20000071 Result: Up-regulated in Transcription
  misc_feature: MA Experiment 20000071 PARAMETER Experiment Name: At_100uM_ABA_Mutants_cDNA_P Parameter: Plant Line Value: CS8104
  misc_feature: MA Experiment 20000071 PARAMETER Experiment Name: At_100uM_ABA_Mutants_cDNA_P Parameter: Timepoint (hr) Value: 6
  misc_feature: MA Experiment 20000071 PARAMETER Experiment Name: At_100uM_ABA_Mutants_cDNA_P Parameter: Tissue Value: Aerial
  misc_feature: MA Experiment 20000071 PARAMETER Experiment Name: At_100uM_ABA_Mutants_cDNA_P Parameter: Treatment Value: 100uM ABA vs. No Treatment
  misc_feature: MA Experiment ID: 20000072 Result: Up-regulated in Transcription
  misc_feature: MA Experiment 20000072 PARAMETER Experiment Name: At_100uM_ABA_Mutants_cDNA_P Parameter: Plant Line Value: CS8105
  misc_feature: MA Experiment 20000072 PARAMETER Experiment Name: At_100uM_ABA_Mutants_cDNA_P Parameter: Timepoint (hr) Value: 6
  misc_feature: MA Experiment 20000072 PARAMETER Experiment Name: At_100uM_ABA_Mutants_cDNA_P Parameter: Tissue Value: Aerial
  misc_feature: MA Experiment 20000072 PARAMETER Experiment Name: At_100uM_ABA_Mutants_cDNA_P Parameter: Treatment Value: 100uM ABA vs. No Treatment
  misc_feature: MA Experiment ID: 20000086 Result: Up-regulated in Transcription
  misc_feature: MA Experiment 20000086 PARAMETER Experiment Name: At_100uM_ABA_Mutants_cDNA_P Parameter: Plant Line Value: CS22
  misc_feature: MA Experiment 20000086 PARAMETER Experiment Name: At_100uM_ABA_Mutants_cDNA_P Parameter: Timepoint (hr) Value: 6
  misc_feature: MA Experiment 20000086 PARAMETER Experiment Name: At_100uM_ABA_Mutants_cDNA_P Parameter: Tissue Value: Aerial
  misc_feature: MA Experiment 20000086 PARAMETER Experiment Name: At_100uM_ABA_Mutants_cDNA_P Parameter: Treatment Value: 100uM ABA vs. No Treatment
  misc_feature: MA Experiment ID: 20000087 Result: Up-regulated in Transcription
  misc_feature: MA Experiment 20000087 PARAMETER Experiment Name: At_100uM_ABA_Mutants_cDNA_P Parameter: Plant Line Value: WS
  misc_feature: MA Experiment 20000087 PARAMETER Experiment Name: At_100uM_ABA_Mutants_cDNA_P Parameter: Timepoint (hr) Value: 6
  misc_feature: MA Experiment 20000087 PARAMETER Experiment Name: At_100uM_ABA_Mutants_cDNA_P Parameter: Tissue Value: Aerial
  misc_feature: MA Experiment 20000087 PARAMETER Experiment Name: At_100uM_ABA_Mutants_cDNA_P Parameter: Treatment Value: 100uM ABA vs. No Treatment
  misc_feature: MA Experiment ID: 20000111 Result: Down-regulated in Transcription
  misc_feature: MA Experiment 20000111 PARAMETER Experiment Name: At_42deg_Heat_cDNA_P Parameter: Temperature (deg C) Value: 42 vs. 22
  misc_feature: MA Experiment 20000111 PARAMETER Experiment Name: At_42deg_Heat_cDNA_P Parameter: Timepoint (hr) Value: 6
  misc_feature: MA Experiment 20000111 PARAMETER Experiment Name: At_42deg_Heat_cDNA_P Parameter: Tissue Value: Aerial
  misc_feature: MA Experiment ID: 20000113 Result: Down-regulated in Transcription
  misc_feature: MA Experiment 20000113 PARAMETER Experiment Name: At_42deg_Heat_cDNA_P Parameter: Temperature (deg C) Value: 42 vs. 22
  misc_feature: MA Experiment 20000113 PARAMETER Experiment Name: At_42deg_Heat_cDNA_P Parameter: Timepoint (hr) Value: 8
  misc_feature: MA Experiment 20000113 PARAMETER Experiment Name: At_42deg_Heat_cDNA_P Parameter: Tissue Value: Aerial
  misc_feature: MA Experiment ID: 20000117 Result: Up-regulated in Transcription
  misc_feature: MA Experiment 20000117 PARAMETER Experiment Name: At_100uM_ABA_Mutants_cDNA_P Parameter: Plant Line Value: Columbia
  misc_feature: MA Experiment 20000117 PARAMETER Experiment Name: At_100uM_ABA_Mutants_cDNA_P Parameter: Timepoint (hr) Value: 6
  misc_feature: MA Experiment 20000117 PARAMETER Experiment Name: At_100uM_ABA_Mutants_cDNA_P Parameter: Tissue Value: Aerial
  misc_feature: MA Experiment 20000117 PARAMETER Experiment Name: At_100uM_ABA_Mutants_cDNA_P Parameter: Treatment Value: 100uM ABA vs. No Treatment
  misc_feature: MA Experiment ID: 20000144 Result: Down-regulated in Transcription
  misc_feature: MA Experiment 20000144 PARAMETER Experiment Name: At_42deg_Heat_cDNA_P Parameter: Temperature (deg C) Value: 42 vs. 22
  misc_feature: MA Experiment 20000144 PARAMETER Experiment Name: At_42deg_Heat_cDNA_P Parameter: Timepoint (hr) Value: 1
  misc_feature: MA Experiment 20000144 PARAMETER Experiment Name: At_42deg_Heat_cDNA_P Parameter: Tissue Value: Aerial
  misc_feature: MA Experiment ID: 20000171 Result: Down-regulated in Transcription
  misc_feature: MA Experiment 20000171 PARAMETER Experiment Name: At_42deg_Heat_P Parameter: Age (day) Value: 14
  misc_feature: MA Experiment 20000171 PARAMETER Experiment Name: At_42deg_Heat_P Parameter: Organism Value: A. thaliana
  misc_feature: MA Experiment 20000171 PARAMETER Experiment Name: At_42deg_Heat_P Parameter: Plant Line Value: WS
  misc_feature: MA Experiment 20000171 PARAMETER Experiment Name: At_42deg_Heat_P Parameter: Temperature (deg C) Value: 42 vs. 22
  misc_feature: MA Experiment 20000171 PARAMETER Experiment Name: At_42deg_Heat_P Parameter: Timepoint (hr) Value: 1
  misc_feature: MA Experiment 20000171 PARAMETER Experiment Name: At_42deg_Heat_P Parameter: Tissue Value: Aerial
  misc_feature: MA Experiment ID: 20000173 Result: Down-regulated in Transcription
  misc_feature: MA Experiment 20000173 PARAMETER Experiment Name: At_42deg_Heat_P Parameter: Age (day) Value: 14
  misc_feature: MA Experiment 20000173 PARAMETER Experiment Name: At_42deg_Heat_P Parameter: Organism Value: A. thaliana
  misc_feature: MA Experiment 20000173 PARAMETER Experiment Name: At_42deg_Heat_P Parameter: Plant Line Value: WS
  misc_feature: MA Experiment 20000173 PARAMETER Experiment Name: At_42deg_Heat_P Parameter: Temperature (deg C) Value: 42 vs. 22
  misc_feature: MA Experiment 20000173 PARAMETER Experiment Name: At_42deg_Heat_P Parameter: Timepoint (hr) Value: 6
  misc_feature: MA Experiment 20000173 PARAMETER Experiment Name: At_42deg_Heat_P Parameter: Tissue Value: Aerial
  misc_feature: MA Experiment ID: 20000224 Result: Down-regulated in Transcription
  misc_feature: MA Experiment ID: 20000264 Result: Down-regulated in Transcription
  misc_feature: MA Experiment 20000264 PARAMETER Experiment Name: At_Open_Flower_P Parameter: Age (day) Value: 21
  misc_feature: MA Experiment 20000264 PARAMETER Experiment Name: At_Open_Flower_P Parameter: Plant Line Value: WS
  misc_feature: MA Experiment 20000264 PARAMETER Experiment Name: At_Open_Flower_P Parameter: Tissue Value: Open Flower vs. Whole Plant
  misc_feature: MA Experiment ID: 20000265 Result: Down-regulated in Transcription
  misc_feature: MA Experiment 20000265 PARAMETER Experiment Name: At_Open_Flower_P Parameter: Age (day) Value: 21
  misc_feature: MA Experiment 20000265 PARAMETER Experiment Name: At_Open_Flower_P Parameter: Plant Line Value: WS
  misc_feature: MA Experiment 20000265 PARAMETER Experiment Name: At_Open_Flower_P Parameter: Tissue Value: Closed Flower vs. Whole Plant
  misc_feature: MA Experiment ID: 20000268 Result: Down-regulated in Transcription
  misc_feature: MA Experiment 20000268 PARAMETER Experiment Name: At_100mM_NaCl__P Parameter: Age (day) Value: 14
  misc_feature: MA Experiment 20000268 PARAMETER Experiment Name: At_100mM_NaCl__P Parameter: Organism Value: A. thaliana
  misc_feature: MA Experiment 20000268 PARAMETER Experiment Name: At_100mM_NaCl__P Parameter: Plant Line Value: WS
  misc_feature: MA Experiment 20000268 PARAMETER Experiment Name: At_100mM_NaCl__P Parameter: Timepoint (hr) Value: 6
  misc_feature: MA Experiment 20000268 PARAMETER Experiment Name: At_100mM_NaCl__P Parameter: Tissue Value: Whole Plant
  misc_feature: MA Experiment 20000268 PARAMETER Experiment Name: At_100mM_NaCl__P Parameter: Treatment Value: 100mM NaCl vs. No Treatment
  misc_feature: MA Experiment ID: 20000286 Result: Down-regulated in Transcription
  misc_feature: MA Experiment 20000286 PARAMETER Experiment Name: At_Open_Flower_P Parameter: Age (day) Value: 21
  misc_feature: MA Experiment 20000286 PARAMETER Experiment Name: At_Open_Flower_P Parameter: Plant Line Value: WS
  misc_feature: MA Experiment 20000286 PARAMETER Experiment Name: At_Open_Flower_P Parameter: Tissue Value: Half Open vs. Whole Plant
  misc_feature: MA Experiment ID: 20000308 Result: Down-regulated in Transcription
  misc_feature: MA Experiment 20000308 PARAMETER Experiment Name: At_100mM_NaCl__P Parameter: Age (day) Value: 17
  misc_feature: MA Experiment 20000308 PARAMETER Experiment Name: At_100mM_NaCl__P Parameter: Organism Value: A. thaliana
  misc_feature: MA Experiment 20000308 PARAMETER Experiment Name: At_100mM_NaCl__P Parameter: Plant Line Value: WS
  misc_feature: MA Experiment 20000308 PARAMETER Experiment Name: At_100mM_NaCl__P Parameter: Timepoint (hr) Value: 72
  misc_feature: MA Experiment 20000308 PARAMETER Experiment Name: At_100mM_NaCl__P Parameter: Tissue Value: Whole Plant
  misc_feature: MA Experiment 20000308 PARAMETER Experiment Name: At_100mM_NaCl__P Parameter: Treatment Value: 100mM NaCl vs. No Treatment
  misc_feature: MA Experiment ID: 20000438 Result: Up-regulated in Transcription
  misc_feature: MA Experiment 20000438 PARAMETER Experiment Name: At_Shoots__P Parameter: Age (day) Value: 14
  misc_feature: MA Experiment 20000438 PARAMETER Experiment Name: At_Shoots__P Parameter: Tissue Value: Shoots vs. Whole Plant
  misc_feature: MA Experiment ID: 20000441 Result: Up-regulated in Transcription
  misc_feature: MA Experiment 20000441 PARAMETER Experiment Name: At_1uM_BR-BRZ__P Parameter: Tissue Value: Shoot Apices
  misc_feature: MA Experiment 20000441 PARAMETER Experiment Name: At_1uM_BR-BRZ__P Parameter: Treatment Value: 1uM BR vs. No Treatment
  misc_feature: MA Experiment ID: 20000443 Result: Up-regulated in Transcription
  misc_feature: MA Experiment 20000443 PARAMETER Experiment Name: At_1uM_BR-BRZ__P Parameter: Tissue Value: Shoot Apices
  misc_feature: MA Experiment 20000443 PARAMETER Experiment Name: At_1uM_BR-BRZ__P Parameter: Treatment Value: 1uM BRZ vs. No Treatment
  misc_feature: MA Experiment ID: 20000573 Result: Down-regulated in Transcription
  misc_feature: MA Experiment 20000573 PARAMETER Experiment Name: At_100uM_ABA_Mutants__P Parameter: Organism Value: A. thaliana
  misc_feature: MA Experiment 20000573 PARAMETER Experiment Name: At_100uM_ABA_Mutants__P Parameter: Plant Line Value: CS22 vs. Ler wt
  misc_feature: MA Experiment 20000573 PARAMETER Experiment Name: At_100uM_ABA_Mutants__P Parameter: Timepoint (hr) Value: N/A
  misc_feature: MA Experiment 20000573 PARAMETER Experiment Name: At_100uM_ABA_Mutants__P Parameter: Tissue Value: Whole Plant
  misc_feature: MA Experiment 20000573 PARAMETER Experiment Name: At_100uM_ABA_Mutants__P Parameter: Treatment Value: None
  misc_feature: MA Experiment ID: 20000574 Result: Down-regulated in Transcription
  misc_feature: MA Experiment 20000574 PARAMETER Experiment Name: At_100uM_ABA_Mutants__P Parameter: Organism Value: A. thaliana
  misc_feature: MA Experiment 20000574 PARAMETER Experiment Name: At_100uM_ABA_Mutants__P Parameter: Plant Line Value: CS23 vs. Ler wt
  misc_feature: MA Experiment 20000574 PARAMETER Experiment Name: At_100uM_ABA_Mutants__P Parameter: Timepoint (hr) Value: N/A
  misc_feature: MA Experiment 20000574 PARAMETER Experiment Name: At_100uM_ABA_Mutants__P Parameter: Tissue Value: Whole Plant
  misc_feature: MA Experiment 20000574 PARAMETER Experiment Name: At_100uM_ABA_Mutants__P Parameter: Treatment Value: None
  misc_feature: MA Experiment ID: 20000794 Result: Down-regulated in Transcription
  misc_feature: MA Experiment 20000794 PARAMETER Experiment Name: At_Petals_P Parameter: Age (day) Value: 23-25 days
  misc_feature: MA Experiment 20000794 PARAMETER Experiment Name: At_Petals_P Parameter: Plant Line Value: WS
  misc_feature: MA Experiment 20000794 PARAMETER Experiment Name: At_Petals_P Parameter: Tissue Value: Petals vs. Whole plant
  misc_feature: MA Experiment ID: 20001248 Result: Up-regulated in Transcription
  misc_feature: MA Experiment 20001248 PARAMETER Experiment Name: At_Far-red-induction_P Parameter: Age (day) Value: 7
  misc_feature: MA Experiment 20001248 PARAMETER Experiment Name: At_Far-red-induction_P Parameter: Light Value: Far-red vs. White
  misc_feature: MA Experiment 20001248 PARAMETER Experiment Name: At_Far-red-induction_P Parameter: Organism Value: A. thaliana
  misc_feature: MA Experiment 20001248 PARAMETER Experiment Name: At_Far-red-induction_P Parameter: Plant Line Value: Columbia
  misc_feature: MA Experiment 20001248 PARAMETER Experiment Name: At_Far-red-induction_P Parameter: Timepoint (hr) Value: 4
  misc_feature: MA Experiment 20001248 PARAMETER Experiment Name: At_Far-red-induction_P Parameter: Tissue Value: Whole Plant
  misc_feature: MA Experiment ID: 20001450 Result: Up-regulated in Transcription
  misc_feature: MA Experiment 20001450 PARAMETER Experiment Name: At_Far-red-induction_P Parameter: Age (day) Value: 7
  misc_feature: MA Experiment 20001450 PARAMETER Experiment Name: At_Far-red-induction_P Parameter: Light Value: Far-red vs. White
  misc_feature: MA Experiment 20001450 PARAMETER Experiment Name: At_Far-red-induction_P Parameter: Organism Value: A. thaliana
  misc_feature: MA Experiment 20001450 PARAMETER Experiment Name: At_Far-red-induction_P Parameter: Plant Line Value: Columbia
  misc_feature: MA Experiment 20001450 PARAMETER Experiment Name: At_Far-red-induction_P Parameter: Timepoint (hr) Value: 8
  misc_feature: MA Experiment 20001450 PARAMETER Experiment Name: At_Far-red-induction_P Parameter: Tissue Value: Whole Plant
  misc_feature: MA Experiment ID: 20001451 Result: Up-regulated in Transcription
  misc_feature: MA Experiment 20001451 PARAMETER Experiment Name: At_Far-red-induction_P Parameter: Age (day) Value: 7
  misc_feature: MA Experiment 20001451 PARAMETER Experiment Name: At_Far-red-induction_P Parameter: Light Value: Far-red vs. White
  misc_feature: MA Experiment 20001451 PARAMETER Experiment Name: At_Far-red-induction_P Parameter: Organism Value: A. thaliana
  misc_feature: MA Experiment 20001451 PARAMETER Experiment Name: At_Far-red-induction_P Parameter: Plant Line Value: Columbia
  misc_feature: MA Experiment 20001451 PARAMETER Experiment Name: At_Far-red-induction_P Parameter: Timepoint (hr) Value: 24
  misc_feature: MA Experiment 20001451 PARAMETER Experiment Name: At_Far-red-induction_P Parameter: Tissue Value: Whole Plant
  misc_feature: MA Experiment ID: 20001554 Result: Down-regulated in Transcription
  misc_feature: MA Experiment 20001554 PARAMETER Experiment Name: At_Drought_Soil_Dry_P Parameter: Age (day) Value: 21
  misc_feature: MA Experiment 20001554 PARAMETER Experiment Name: At_Drought_Soil_Dry_P Parameter: Organism Value: A. thaliana
  misc_feature: MA Experiment 20001554 PARAMETER Experiment Name: At_Drought_Soil_Dry_P Parameter: Plant Line Value: WS
  misc_feature: MA Experiment 20001554 PARAMETER Experiment Name: At_Drought_Soil_Dry_P Parameter: Post Timepoint (hr) Value: None
  misc_feature: MA Experiment 20001554 PARAMETER Experiment Name: At_Drought_Soil_Dry_P Parameter: Post-Treatment Value: None
  misc_feature: MA Experiment 20001554 PARAMETER Experiment Name: At_Drought_Soil_Dry_P Parameter: Timepoint (day) Value: 7
  misc_feature: MA Experiment 20001554 PARAMETER Experiment Name: At_Drought_Soil_Dry_P Parameter: Treatment Value: Drought vs. No Drought
  misc_feature: MA Experiment ID: 20001556 Result: Down-regulated in Transcription
  misc_feature: MA Experiment 20001556 PARAMETER Experiment Name: At_Drought_Soil_Dry_P Parameter: Age (day) Value: 26
  misc_feature: MA Experiment 20001556 PARAMETER Experiment Name: At_Drought_Soil_Dry_P Parameter: Organism Value: A. thaliana
  misc_feature: MA Experiment 20001556 PARAMETER Experiment Name: At_Drought_Soil_Dry_P Parameter: Plant Line Value: WS
  misc_feature: MA Experiment 20001556 PARAMETER Experiment Name: At_Drought_Soil_Dry_P Parameter: Post Timepoint (hr) Value: None
  misc_feature: MA Experiment 20001556 PARAMETER Experiment Name: At_Drought_Soil_Dry_P Parameter: Post-Treatment Value: None
  misc_feature: MA Experiment 20001556 PARAMETER Experiment Name: At_Drought_Soil_Dry_P Parameter: Timepoint (day) Value: 12
  misc_feature: MA Experiment 20001556 PARAMETER Experiment Name: At_Drought_Soil_Dry_P Parameter: Treatment Value: Drought vs. No Drought
  misc_feature: MA Experiment ID: 20001774 Result: Down-regulated in Transcription
  misc_feature: MA Experiment 20001774 PARAMETER Experiment Name: At_Far-red-enriched-adult_P Parameter: Age (day) Value: 31
  misc_feature: MA Experiment 20001774 PARAMETER Experiment Name: At_Far-red-enriched-adult_P Parameter: Light Value: Far-red enriched vs. White
  misc_feature: MA Experiment 20001774 PARAMETER Experiment Name: At_Far-red-enriched-adult_P Parameter: Organism Value: A. thaliana
  misc_feature: MA Experiment 20001774 PARAMETER Experiment Name: At_Far-red-enriched-adult_P Parameter: Plant Line Value: Columbia
  misc_feature: MA Experiment 20001774 PARAMETER Experiment Name: At_Far-red-enriched-adult_P Parameter: Timepoint (hr) Value: 72
  misc_feature: MA Experiment 20001774 PARAMETER Experiment Name: At_Far-red-enriched-adult_P Parameter: Tissue Value: Aerial
  misc_feature: MA Experiment ID: 20001904 Result: Down-regulated in Transcription
  misc_feature: MA Experiment 20001904 PARAMETER Experiment Name: At_Drought_Reproduction_P Parameter: Age (day) Value: 37
  misc_feature: MA Experiment 20001904 PARAMETER Experiment Name: At_Drought_Reproduction_P Parameter: Organism Value: A. thaliana
  misc_feature: MA Experiment 20001904 PARAMETER Experiment Name: At_Drought_Reproduction_P Parameter: Plant Line Value: WS
  misc_feature: MA Experiment 20001904 PARAMETER Experiment Name: At_Drought_Reproduction_P Parameter: Timepoint (day) Value: 7
  misc_feature: MA Experiment 20001904 PARAMETER Experiment Name: At_Drought_Reproduction_P Parameter: Tissue Value: Rosettes
  misc_feature: MA Experiment 20001904 PARAMETER Experiment Name: At_Drought_Reproduction_P Parameter: Treatment Value: Drought vs. No Drought
  misc_feature: MA Experiment ID: 20001906 Result: Down-regulated in Transcription
  misc_feature: MA Experiment 20001906 PARAMETER Experiment Name: At_Drought_Reproduction_P Parameter: Age (day) Value: 35
  misc_feature: MA Experiment 20001906 PARAMETER Experiment Name: At_Drought_Reproduction_P Parameter: Organism Value: A. thaliana
  misc_feature: MA Experiment 20001906 PARAMETER Experiment Name: At_Drought_Reproduction_P Parameter: Plant Line Value: WS
  misc_feature: MA Experiment 20001906 PARAMETER Experiment Name: At_Drought_Reproduction_P Parameter: Timepoint (day) Value: 5
  misc_feature: MA Experiment 20001906 PARAMETER Experiment Name: At_Drought_Reproduction_P Parameter: Tissue Value: Siliques
  misc_feature: MA Experiment 20001906 PARAMETER Experiment Name: At_Drought_Reproduction_P Parameter: Treatment Value: Drought vs. No Drought
aaagcaacaaaaacttaacccatttcttcttctttttttgtttctctctcacaaacacaacaaatatggaatacagctgtgtagacgacagtagtacaacgtcagaatctctctccatctctactactccaaagccgacaacgacgacggagaagaaactctcttctccgccggcgacgtcgatgcgtctctacagaatgggaagcggcggaagcagcgtcgttttggattcagagaacggcgtcgagaccgagtcacgtaagcttccttcgtcgaaatataaaggcgttgtgcctcagcctaacggaagatggggagctcagatttacgagaagcatcagcgagtttggctcggtactttcaacgaggaagaagaagctgcgtcttcttacgacatcgccgtgaggagattccgcggccgcgacgccgtcactaacttcaaatctcaagttgatggaaacgacgccgaatcggcttttcttgacgctcattctaaagctgagatcgtggatatgttgaggaaacacacttacgccgatgagtttgagcagagtagacggaagtttgttaacggcgacggaaaacgctctgggttggagacggcgacgtacggaaacgacgctgttttgagagcgcgtgaggttttgttcgagaagactgttacgccgagcgacgtcgggaagctgaaccgtttagtgataccgaaacaacacgcggagaagcattttccgttaccggcgatgacgacggcgatggggatgaatccgtctccgacgaaaggcgttttgattaacttggaagatagaacagggaaagtgtggcggttccgttacagttactggaacagcagtcaaagttacgtgttgaccaagggctggagccggttcgttaaagagaagaatcttcgagccggtgatgtggtttgtttcgagagatcaaccggaccagaccggcaattgtatatccactggaaagtccggtctagtccggttcagactgtggttaggctattcggagtcaacattttcaatgtgagtaacgagaaaccaaacgacgtcgcagtagagtgtgttggcaagaagagatctcgggaagatgatttgttttcgttagggtgttccaagaagcaggcgattatcaacatcttgtgacaaattctttttttttggttttttttcttcaatttgtttctcctttttcaatattttgtattgaaatgacaagttgtaaattaggacaagacaagaaaaaatgacaactagacaaaatagtttttgtttacatctaatttaggatctgttttttcaccctttcctgaaatatgatatgtgttctcctccttaatctaataatcttgtttaatct

SEQ ID NO: 36042 - protein, 382 aa, Arabidopsis thaliana
  peptide (1)..(382): Ceres Seq. ID no. 12371990
  misc_feature (215)..(329): Pfam Name: B3 DNA binding domain Pfam Description: B3 DNA binding domain
  misc_feature (89)..(341): Homolog of NCBI NO: 34895676 NR Description: putative DNA binding protein RAV2
  misc_feature (30)..(332): Homolog of NCBI NO: 34895690 NR Description: putative DNA binding protein RAV2
  misc_feature (67)..(328): Homolog of NCBI NO: 34911404 NR Description: DNA-binding protein RAV2-like
  misc_feature (25)..(341): Homolog of NCBI NO: 21593532 NR Description: AP2 domain transcription factor [Arabidopsis
  misc_feature (25)..(379): Homolog of NCBI NO: 15230871 NR Description: AP2 domain transcription factor RAV, putative
  misc_feature (22)..(380): Homolog of NCBI NO: 15222217 NR Description: DNA-binding protein (RAV1)
  misc_feature (48)..(382): Homolog of NCBI NO: 2281641 NR Description: AP2 domain containing protein RAP2.8 [Arabidopsis
  misc_feature (22)..(382): Homolog of NCBI NO: 21554039 NR Description: putative RAV2-like DNA-binding protein
  misc_feature (22)..(382): Homolog of NCBI NO: 18409138 NR Description: AP2 domain protein RAP2.8 (RAV2)
  misc_feature (22)..(382): Homolog of NCBI NO: 15222622 NR Description: DNA-binding protein RAV2, putative
SNKNLTHFFFFFCFSLTNTTNMEYSCVDDSSTTSESLSISTTPKPTTTTEKKLSSPPATSMRLYRMGSGGSSVVLDSENGVETESRKLPSSKYKGVVPQPNGRWGAQIYEKHQRVWLGTFNEEEEAASSYDIAVRRFRGRDAVTNFKSQVDGNDAESAFLDAHSKAEIVDMLRKHTYADEFEQSRRKFVNGDGKRSGLETATYGNDAVLRAREVLFEKTVTPSDVGKLNRLVIPKQHAEKHFPLPAMTTAMGMNPSPTKGVLINLEDRTGKVWRFRYSYWNSSQSYVLTKGWSRFVKEKNLRAGDVVCFERSTGPDRQLYIHWKVRSSPVQTVVRLFGVNIFNVSNEKPNDVAVECVGKKRSREDDLFSLGCSKKQAIINIL

SEQ ID NO: 36043 - protein, 361 aa, Arabidopsis thaliana
  peptide (1)..(361): Ceres Seq. ID no. 12371991
  misc_feature (194)..(308): Pfam Name: B3 DNA binding domain Pfam Description: B3 DNA binding domain
  misc_feature (68)..(320): Homolog of NCBI NO: 34895676 NR Description: putative DNA binding protein RAV2
  misc_feature (9)..(311): Homolog of NCBI NO: 34895690 NR Description: putative DNA binding protein RAV2
  misc_feature (46)..(307): Homolog of NCBI NO: 34911404 NR Description: DNA-binding protein RAV2-like
  misc_feature (4)..(320): Homolog of NCBI NO: 21593532 NR Description: AP2 domain transcription factor [Arabidopsis
  misc_feature (4)..(358): Homolog of NCBI NO: 15230871 NR Description: AP2 domain transcription factor RAV, putative
  misc_feature (1)..(359): Homolog of NCBI NO: 15222217 NR Description: DNA-binding protein (RAV1)
  misc_feature (27)..(361): Homolog of NCBI NO: 2281641 NR Description: AP2 domain containing protein RAP2.8 [Arabidopsis
  misc_feature (1)..(361): Homolog of NCBI NO: 21554039 NR Description: putative RAV2-like DNA-binding protein
  misc_feature (1)..(361): Homolog of NCBI NO: 18409138 NR Description: AP2 domain protein RAP2.8 (RAV2)
  misc_feature (1)..(361): Homolog of NCBI NO: 15222622 NR Description: DNA-binding protein RAV2, putative
MEYSCVDDSSTTSESLSISTTPKPTTTTEKKLSSPPATSMRLYRMGSGGSSVVLDSENGVETESRKLPSSKYKGVVPQPNGRWGAQIYEKHQRVWLGTFNEEEEAASSYDIAVRRFRGRDAVTNFKSQVDGNDAESAFLDAHSKAEIVDMLRKHTYADEFEQSRRKFVNGDGKRSGLETATYGNDAVLRAREVLFEKTVTPSDVGKLNRLVIPKQHAEKHFPLPAMTTAMGMNPSPTKGVLINLEDRTGKVWRFRYSYWNSSQSYVLTKGWSRFVKEKNLRAGDVVCFERSTGPDRQLYIHWKVRSSPVQTVVRLFGVNIFNVSNEKPNDVAVECVGKKRSREDDLFSLGCSKKQAIINIL

SEQ ID NO: 36044 - protein, 322 aa, Arabidopsis thaliana
  peptide (1)..(322): Ceres Seq. ID no. 12371992
  misc_feature (155)..(269): Pfam Name: B3 DNA binding domain Pfam Description: B3 DNA binding domain
  misc_feature (29)..(281): Homolog of NCBI NO: 34895676 NR Description: putative DNA binding protein RAV2
  misc_feature (1)..(272): Homolog of NCBI NO: 34895690 NR Description: putative DNA binding protein RAV2
  misc_feature (7)..(268): Homolog of NCBI NO: 34911404 NR Description: DNA-binding protein RAV2-like
  misc_feature (1)..(281): Homolog of NCBI NO: 21593532 NR Description: AP2 domain transcription factor [Arabidopsis
  misc_feature (1)..(319): Homolog of NCBI NO: 15230871 NR Description: AP2 domain transcription factor RAV, putative
  misc_feature (1)..(320): Homolog of NCBI NO: 15222217 NR Description: DNA-binding protein (RAV1)
  misc_feature (1)..(322): Homolog of NCBI NO: 2281641 NR Description: AP2 domain containing protein RAP2.8 [Arabidopsis
  misc_feature (1)..(322): Homolog of NCBI NO: 21554039 NR Description: putative RAV2-like DNA-binding protein
  misc_feature (1)..(322): Homolog of NCBI NO: 18409138 NR Description: AP2 domain protein RAP2.8 (RAV2)
  misc_feature (1)..(322): Homolog of NCBI NO: 15222622 NR Description: DNA-binding protein RAV2, putative
MRLYRMGSGGSSVVLDSENGVETESRKLPSSKYKGVVPQPNGRWGAQIYEKHQRVWLGTFNEEEEAASSYDIAVRRFRGRDAVTNFKSQVDGNDAESAFLDAHSKAEIVDMLRKHTYADEFEQSRRKFVNGDGKRSGLETATYGNDAVLRAREVLFEKTVTPSDVGKLNRLVIPKQHAEKHFPLPAMTTAMGMNPSPTKGVLINLEDRTGKVWRFRYSYWNSSQSYVLTKGWSRFVKEKNLRAGDVVCFERSTGPDRQLYIHWKVRSSPVQTVVRLFGVNIFNVSNEKPNDVAVECVGKKRSREDDLFSLGCSKKQAIINIL

SEQ ID NO: 36045 - DNA, 1370 bp, Arabidopsis thaliana
  misc_feature (1)..(1370): Ceres Seq. ID no. 12324809
  misc_feature: MA Experiment ID: 108434 Result: Down-regulated in Transcription
  misc_feature: MA Experiment 108434 PARAMETER Experiment Name: At_Root_Tips_cDNA_P Parameter: Tissue Value: Root Tips
  misc_feature: MA Experiment ID: 108573 Result: Up-regulated in Transcription
  misc_feature: MA Experiment 108573 PARAMETER Experiment Name: At_Drought_cDNA_P Parameter: Timepoint (hr) Value: 6
  misc_feature: MA Experiment 108573 PARAMETER Experiment Name: At_Drought_cDNA_P Parameter: Tissue Value: Aerial
  misc_feature: MA Experiment 108573 PARAMETER Experiment Name: At_Drought_cDNA_P Parameter: Treatment Value: Drought vs. No Drought
  misc_feature: MA Experiment ID: 108585 Result: Up-regulated in Transcription
  misc_feature: MA Experiment 108585 PARAMETER Experiment Name: At_5mM_NaNP_cDNA_P Parameter: Timepoint (hr) Value: 6
  misc_feature: MA Experiment 108585 PARAMETER Experiment Name: At_5mM_NaNP_cDNA_P Parameter: Tissue Value: Aerial
  misc_feature: MA Experiment 108585 PARAMETER Experiment Name: At_5mM_NaNP_cDNA_P Parameter: Treatment Value: null
  misc_feature: MA Experiment ID: 108595 Result: Down-regulated in Transcription
  misc_feature: MA Experiment 108595 PARAMETER Experiment Name: At_Ler-pi_Ovule_cDNA_P Parameter: Plant Line Value: null
aaaatcagtcacgaaaacccccaaatccacagattaattagggttttcgatttctctgatgaaactgagaagaatctctcattagggttcttcattcttcagagggatttctcatatctctctcattgagcttgctaaagctgaaatctgagtttgaaattggaattcagattcccatcccatgttgacctcttcttgctcttcttcgtctctcctctgccatcgcccagctctctctagttcgcgttccaagtttagggttccttgtcgaactgttttctctcctgctcttaccaagatttcccctttaactgcttcttcaccttctaagtccgccaagcataaatggaagattttgtgttttagaaatgaagattctgctcccgagaatccggagcattttgtgcctgaggaattagttaagccagatcaagattctccatgtacagataaaacagattggaaggcaacttttcaaaaggctgcagatgcagttttgaaggccattgggactcgttggaaggtaccatggactgtcgagaccattgtgcaggtaatgcttctgtgggtagccgctttctggttcattggttcatggatgatcccattcatggctcatatatcaggtttccacaaagaatccctaacatttagaggccaagctttgttcagtctgataaccgatgtaacagaaggcctagccgggattgctatcctccaccgttgcctctccatgttccgtccacttgcaagtgattggttccgctttacccttaaaggaaactggcaactagatgttatcataggctgtttcatgttccctttcgttaaccggctctcccaattaaacctaaacctcttgccactcccaccaacctcaagtccagtctcactctcaagtgtcgagcagtctataatggctagagaccctgtggcaatggcactgtatgcagttgtagtatcaatttgtgcaccggtttgggaagagatagtgttcagagggttcttgttaccgtctctaactaggtacatgccagtttggtgtgcgattcttgtgagttcgattgcatttgctttggcacatttcaatgtgcagaggatgttaccattggtgttccttggagtggtattgggtttgatattcgcaaggtcaaggaacttgttaccttcaatgctgttgcatagcttgtggaacggctttgtattcatggaattgatgcgatgatgactatcttttgtaggtgtcttgtttcttattcttcttgtaattgattcaaagtatgatgttagcttttatttttttataataaatggacagttcaattgtacaaagataaaaccaaaaaaggtcaaaaagaaattctaatttt

SEQ ID NO: 36046 - protein, 347 aa, Arabidopsis thaliana
  peptide (1)..(347): Ceres Seq. ID no. 12324810
  misc_feature (255)..(345): Pfam Name: CAAX amino terminal protease family Pfam Description: CAAX amino terminal protease family
  misc_feature (115)..(346): Homolog of NCBI NO: 22299433 NR Description: ORF_ID:tlr1890~hypothetical protein
  misc_feature (112)..(345): Homolog of NCBI NO: 30683693 NR Description: CAAX amino terminal protease family [Arabidopsis
  misc_feature (112)..(345): Homolog of NCBI NO: 21593106 NR Description: unknown [Arabidopsis thaliana]
  misc_feature (113)..(345): Homolog of NCBI NO: 37522744 NR Description: hypothetical protein gll3175 [Gloeobacter
  misc_feature (244)..(345): Homolog of NCBI NO: 23043203 NR Description: hypothetical protein [Trichodesmium erythraeum
  misc_feature (111)..(345): Homolog of NCBI NO: 16331018 NR Description: unknown protein [Synechocystis sp. PCC 6803]
  misc_feature (113)..(345): Homolog of NCBI NO: 17231277 NR Description: hypothetical protein [Nostoc sp. PCC 7120]
  misc_feature (113)..(345): Homolog of NCBI NO: 23130090 NR Description: hypothetical protein [Nostoc punctiforme]
  misc_feature (55)..(347): Homolog of NCBI NO: 9759339 NR Description: gene_id:MUP24.17~pir||S76167~similar to unknown
  misc_feature (1)..(347): Homolog of NCBI NO: 18424393 NR Description: putative protein
MLTSSCSSSSLLCHRPALSSSRSKFRVPCRTVFSPALTKISPLTASSPSKSAKHKWKILCFRNEDSAPENPEHFVPEELVKPDQDSPCTDKTDWKATFQKAADAVLKAIGTRWKVPWTVETIVQVMLLWVAAFWFIGSWMIPFMAHISGFHKESLTFRGQALFSLITDVTEGLAGIAILHRCLSMFRPLASDWFRFTLKGNWQLDVIIGCFMFPFVNRLSQLNLNLLPLPPTSSPVSLSSVEQSIMARDPVAMALYAVVVSICAPVWEEIVFRGFLLPSLTRYMPVWCAILVSSIAFALAHFNVQRMLPLVFLGVVLGLIFARSRNLLPSMLLHSLWNGFVFMELMR

SEQ ID NO: 36047 - protein, 222 aa, Arabidopsis thaliana
  peptide (1)..(222): Ceres Seq. ID no. 12324811
  misc_feature (130)..(220): Pfam Name: CAAX amino terminal protease family Pfam Description: CAAX amino terminal protease family
  misc_feature (1)..(221): Homolog of NCBI NO: 22299433 NR Description: ORF_ID:tlr1890~hypothetical protein
  misc_feature (1)..(220): Homolog of NCBI NO: 30683693 NR Description: CAAX amino terminal protease family [Arabidopsis
  misc_feature (1)..(220): Homolog of NCBI NO: 21593106 NR Description: unknown [Arabidopsis thaliana]
  misc_feature (1)..(220): Homolog of NCBI NO: 37522744 NR Description: hypothetical protein gll3175 [Gloeobacter
  misc_feature (119)..(220): Homolog of NCBI NO: 23043203 NR Description: hypothetical protein [Trichodesmium erythraeum
  misc_feature (1)..(220): Homolog of NCBI NO: 16331018 NR Description: unknown protein [Synechocystis sp. PCC 6803]
  misc_feature (1)..(220): Homolog of NCBI NO: 17231277 NR Description: hypothetical protein [Nostoc sp. PCC 7120]
  misc_feature (1)..(220): Homolog of NCBI NO: 23130090 NR Description: hypothetical protein [Nostoc punctiforme]
  misc_feature (1)..(222): Homolog of NCBI NO: 9759339 NR Description: gene_id:MUP24.17~pir||S76167~similar to unknown
  misc_feature (1)..(222): Homolog of NCBI NO: 18424393 NR Description: putative protein
MLLWVAAFWFIGSWMIPFMAHISGFHKESLTFRGQALFSLITDVTEGLAGIAILHRCLSMFRPLASDWFRFTLKGNWQLDVIIGCFMFPFVNRLSQLNLNLLPLPPTSSPVSLSSVEQSIMARDPVAMALYAVVVSICAPVWEEIVFRGFLLPSLTRYMPVWCAILVSSIAFALAHFNVQRMLPLVFLGVVLGLIFARSRNLLPSMLLHSLWNGFVFMELMR

SEQ ID NO: 36048 - protein, 208 aa, Arabidopsis thaliana
  peptide (1)..(208): Ceres Seq. ID no. 12324812
  misc_feature (116)..(206): Pfam Name: CAAX amino terminal protease family Pfam Description: CAAX amino terminal protease family
  misc_feature (1)..(207): Homolog of NCBI NO: 22299433 NR Description: ORF_ID:tlr1890~hypothetical protein
  misc_feature (1)..(206): Homolog of NCBI NO: 30683693 NR Description: CAAX amino terminal protease family [Arabidopsis
  misc_feature (1)..(206): Homolog of NCBI NO: 21593106 NR Description: unknown [Arabidopsis thaliana]
  misc_feature (1)..(206): Homolog of NCBI NO: 37522744 NR Description: hypothetical protein gll3175 [Gloeobacter
  misc_feature (105)..(206): Homolog of NCBI NO: 23043203 NR Description: hypothetical protein [Trichodesmium erythraeum
  misc_feature (1)..(206): Homolog of NCBI NO: 16331018 NR Description: unknown protein [Synechocystis sp. PCC 6803]
  misc_feature (1)..(206): Homolog of NCBI NO: 17231277 NR Description: hypothetical protein [Nostoc sp. PCC 7120]
  misc_feature (1)..(206): Homolog of NCBI NO: 23130090 NR Description: hypothetical protein [Nostoc punctiforme]
  misc_feature (1)..(208): Homolog of NCBI NO: 9759339 NR Description: gene_id:MUP24.17~pir||S76167~similar to unknown
  misc_feature (1)..(208): Homolog of NCBI NO: 18424393 NR Description: putative protein
MIPFMAHISGFHKESLTFRGQALFSLITDVTEGLAGIAILHRCLSMFRPLASDWFRFTLKGNWQLDVIIGCFMFPFVNRLSQLNLNLLPLPPTSSPVSLSSVEQSIMARDPVAMALYAVVVSICAPVWEEIVFRGFLLPSLTRYMPVWCAILVSSIAFALAHFNVQRMLPLVFLGVVLGLIFARSRNLLPSMLLHSLWNGFVFMELMR

SEQ ID NO: 36049 - DNA, 795 bp, Arabidopsis thaliana
  misc_feature (1)..(795): Ceres Seq. ID no. 12561477
  misc_feature: MA Experiment ID: 108573 Result: Up-regulated in Transcription
  misc_feature: MA Experiment 108573 PARAMETER Experiment Name: At_Drought_cDNA_P Parameter: Timepoint (hr) Value: 6
  misc_feature: MA Experiment 108573 PARAMETER Experiment Name: At_Drought_cDNA_P Parameter: Tissue Value: Aerial
  misc_feature: MA Experiment 108573 PARAMETER Experiment Name: At_Drought_cDNA_P Parameter: Treatment Value: Drought vs. No Drought
  misc_feature: MA Experiment ID: 108577 Result: Down-regulated in Transcription
  misc_feature: MA Experiment 108577 PARAMETER Experiment Name: At_42deg_Heat_cDNA_P Parameter: Temperature (deg C) Value: 42 vs. 22
  misc_feature: MA Experiment 108577 PARAMETER Experiment Name: At_42deg_Heat_cDNA_P Parameter: Timepoint (hr) Value: 6
  misc_feature: MA Experiment 108577 PARAMETER Experiment Name: At_42deg_Heat_cDNA_P Parameter: Tissue Value: Aerial
  misc_feature: MA Experiment ID: 108595 Result: Down-regulated in Transcription
  misc_feature: MA Experiment 108595 PARAMETER Experiment Name: At_Ler-pi_Ovule_cDNA_P Parameter: Plant Line Value: null
  misc_feature: MA Experiment ID: 108605 Result: Up-regulated in Transcription
  misc_feature: MA Experiment 108605 PARAMETER Experiment Name: At_100uM_ABA_cDNA_P Parameter: Timepoint (hr) Value: 6
  misc_feature: MA Experiment 108605 PARAMETER Experiment Name: At_100uM_ABA_cDNA_P Parameter: Tissue Value: Aerial
  misc_feature: MA Experiment 108605 PARAMETER Experiment Name: At_100uM_ABA_cDNA_P Parameter: Treatment Value: 100uM ABA vs. No Treatment
  misc_feature: MA Experiment ID: 20000224 Result: Down-regulated in Transcription
  misc_feature: MA Experiment ID: 20000227 Result: Down-regulated in Transcription
  misc_feature: MA Experiment 20000227 PARAMETER Experiment Name: At_Root-Tips-vs-Tops_P Parameter: Tissue Value: Root Tips vs. Root Tops
atgattaatgtctgaaaaatttgatatttgaagcgaatcaacaacaacagtcgggttcgtgaaaaaaaaagatttgatcggctaaacttggtcggtttatcgtggaaggacttgtcaatggcagacgtacctggatacctgcgcacttgtttggatatggggaagatagctttcttagcaatccttgtatctacagggattgtgttgcagattctggcttgtgctctgttcaataactggtggccaatgctaagtgttataatgtatgtgctcctcccaatgcctttgctcttctttggtggatcagacagtacatctctattcaacgagtcagataatagttggatcaatgcagccaagttcttgactggtgcatcagcagttggaagcgtcgcgataccatcgattctaaaacacgccggactcatcggttggggcgcattagcccttgatctctcatcctacgttgtcttcctcgtggctattttgggttacatttgcataggagatgccagtgacaactattacagctacatttaaaaagacacacacaaattcatcatcatttgtttaaacctcaacaaagtctcagccttttatcacttccccgttcgattgatgcttcgaaacgaaaacatcttgtttctatggaatgactcactgattggattttcacaagtttaagagtttgtgtgtcaagtgtatgtatgaatgattttttttttgggtggttttgttacgttttgatgtatagaacatatttattatttggtggaatatatataaattttcttt

SEQ ID NO: 36050 - protein, 140 aa, Arabidopsis thaliana; identical to SEQ ID NO: 27802
  peptide (1)..(140): Ceres Seq. ID no. 12561478
  misc_feature (27)..(136): Homolog of NCBI NO: 13386094 NR Description: RIKEN cDNA 1520402O14 [Mus musculus]
  misc_feature (13)..(124): Homolog of NCBI NO: 19113819 NR Description: Protein with similarity to Drosophila yakuba NADH
  misc_feature (16)..(105): Homolog of NCBI NO: 6322504 NR Description: Vacuolar Protein Sorting; Vps55p [Saccharomyces
  misc_feature (55)..(124): Homolog of NCBI NO: 34905898 NR Description: P0458E05.25 [Oryza sativa (japonica
  misc_feature (23)..(124): Homolog of NCBI NO: 18399269 NR Description: expressed protein
  misc_feature (17)..(124): Homolog of NCBI NO: 16648828 NR Description: AT3g11530/F24K9_21 [Arabidopsis thaliana]
  misc_feature (17)..(124): Homolog of NCBI NO: 12322900 NR Description: unknown protein; 72859-71336 [Arabidopsis
  misc_feature (1)..(139): Homolog of NCBI NO: 25518386 NR Description: hypothetical protein F5D14.18 - Arabidopsis
  misc_feature (1)..(140): Homolog of NCBI NO: 21554354 NR Description: unknown [Arabidopsis thaliana]
  misc_feature (1)..(140): Homolog of NCBI NO: 18398420 NR Description: Expressed protein

SEQ ID NO: 36051 - protein, 127 aa, Arabidopsis thaliana; identical to SEQ ID NO: 27803
  peptide (1)..(127): Ceres Seq. ID no. 12561479
  misc_feature (14)..(123): Homolog of NCBI NO: 13386094 NR Description: RIKEN cDNA 1520402O14 [Mus musculus]
  misc_feature (1)..(111): Homolog of NCBI NO: 19113819 NR Description: Protein with similarity to Drosophila yakuba NADH
  misc_feature (3)..(92): Homolog of NCBI NO: 6322504 NR Description: Vacuolar Protein Sorting; Vps55p [Saccharomyces
  misc_feature (42)..(111): Homolog of NCBI NO: 34905898 NR Description: P0458E05.25 [Oryza sativa (japonica
  misc_feature (10)..(111): Homolog of NCBI NO: 18399269 NR Description: expressed protein
  misc_feature (4)..(111): Homolog of NCBI NO: 16648828 NR Description: AT3g11530/F24K9_21 [Arabidopsis thaliana]
  misc_feature (4)..(111): Homolog of NCBI NO: 12322900 NR Description: unknown protein; 72859-71336 [Arabidopsis
  misc_feature (1)..(126): Homolog of NCBI NO: 25518386 NR Description: hypothetical protein F5D14.18 - Arabidopsis
  misc_feature (1)..(127): Homolog of NCBI NO: 21554354 NR Description: unknown [Arabidopsis thaliana]
  misc_feature (1)..(127): Homolog of NCBI NO: 18398420 NR Description: Expressed protein

SEQ ID NO: 36052 - protein, 97 aa, Arabidopsis thaliana; identical to SEQ ID NO: 27804
  peptide (1)..(97): Ceres Seq. ID no. 12561480
  misc_feature (1)..(93): Homolog of NCBI NO: 13386094 NR Description: RIKEN cDNA 1520402O14 [Mus musculus]
  misc_feature (1)..(81): Homolog of NCBI NO: 19113819 NR Description: Protein with similarity to Drosophila yakuba NADH
  misc_feature (1)..(62): Homolog of NCBI NO: 6322504 NR Description: Vacuolar Protein Sorting; Vps55p [Saccharomyces
  misc_feature (12)..(81): Homolog of NCBI NO: 34905898 NR Description: P0458E05.25 [Oryza sativa (japonica
  misc_feature (1)..(81): Homolog of NCBI NO: 18399269 NR Description: expressed protein
  misc_feature (1)..(81): Homolog of NCBI NO: 16648828 NR Description: AT3g11530/F24K9_21 [Arabidopsis thaliana]
  misc_feature (1)..(81): Homolog of NCBI NO: 12322900 NR Description: unknown protein; 72859-71336 [Arabidopsis
  misc_feature (1)..(96): Homolog of NCBI NO: 25518386 NR Description: hypothetical protein F5D14.18 - Arabidopsis
  misc_feature (1)..(97): Homolog of NCBI NO: 21554354 NR Description: unknown [Arabidopsis thaliana]
  misc_feature (1)..(97): Homolog of NCBI NO: 18398420 NR Description: Expressed protein

SEQ ID NO: 36053 - DNA, 753 bp, Arabidopsis thaliana
  misc_feature (1)..(753): Ceres Seq. ID no. 13621980
  misc_feature: MA Experiment ID: 20000496 Result: Down-regulated in Transcription
  misc_feature: MA Experiment 20000496 PARAMETER Experiment Name: At_Guard_Cells_P Parameter: Harvest Date Value: 7/19/2002
  misc_feature: MA Experiment 20000496 PARAMETER Experiment Name: At_Guard_Cells_P Parameter: Organism Value: Canola
  misc_feature: MA Experiment 20000496 PARAMETER Experiment Name: At_Guard_Cells_P Parameter: Tissue Value: Guard Cells vs. Leaves
  misc_feature: Phenotype: ROSETTE LEAVES Curled-Curled 3
  misc_feature: Phenotype: ROSETTE LEAVES Disorganized Rosette-Disorganized Rosette
  misc_feature: Phenotype: ROSETTE LEAVES Other
  misc_feature: Phenotype: WHOLE PLANT Color-Dark Green
  misc_feature: Phenotype: INFLORESCENCE Other
  misc_feature: Phenotype: WHOLE PLANT Color-Dark Green
  misc_feature: Phenotype: WHOLE PLANT Size-Small
  misc_feature: Phenotype: INFLORESCENCE Strength-Strong
  misc_feature: Phenotype: INFLORESCENCE Other
  misc_feature: Phenotype: FERTILITY Fertility-Reduced
  misc_feature: Phenotype: WHOLE PLANT Color-Dark Green
  misc_feature: Phenotype: WHOLE PLANT Size-Small
  misc_feature: Phenotype: INFLORESCENCE Strength-Strong
  misc_feature: Phenotype: INFLORESCENCE Other
  misc_feature: Phenotype: FERTILITY Fertility-Reduced
  misc_feature: Phenotype: WHOLE PLANT Color-Dark Green
  misc_feature: Phenotype: WHOLE PLANT Size-Small
  misc_feature: Phenotype: INFLORESCENCE Strength-Strong
  misc_feature: Phenotype: INFLORESCENCE Other
  misc_feature: Phenotype: FERTILITY Fertility-Reduced
  misc_feature: Phenotype: WHOLE PLANT Color-Dark Green
  misc_feature: Phenotype: WHOLE PLANT Size-Small
  misc_feature: Phenotype: INFLORESCENCE Strength-Strong
  misc_feature: Phenotype: INFLORESCENCE Other
  misc_feature: Phenotype: FERTILITY Fertility-Reduced
aagtctacaaaccaaaagcacgctacagaagaagaggaagaagaagaagaagcagagacaacaagaagaagaagaaacagtctcatctcgccggagaagaagaaagatgtcgtggcaatcatacgtcgatgaccatctcatgtgcgaggtcgaaggcaaccacctcacacacgccgccatcttcggccaagacggcagtgtctgggctcagagctcagctttccctcagttgaagcctgcagagatagcaggaatcaacaaagactttgaagaagccggacatcttgccccaaccgggctattccttggcggtgagaagtacatggttgtccaaggtgaggctggagccgtcatccgagggaaaaagggacctggtggagtcactatcaagaagactactcaagctctagtctttggtatctatgatgaaccgatgaccggagggcaatgcaacttggtcgtggagaggctcggcgattaccttatcgagtctggtctctaagttcactcaaagtgcttcaaacaaatttcatttttcgggttctttcttcactagagaagcacccttctgccatgtattgtgatttgattgttgttgtgcatcaaacaaagttattatactcttaaaaagaacaaagaaacaatcatatttgttatggttttgatcctctcctatgatggctcttatgtttttctcttgtactgtatttcgtaatgtataattacgctttggaataaaaatttgagtttgtg

SEQ ID NO: 36054 - protein, 166 aa, Arabidopsis thaliana
  peptide (1)..(166): Ceres Seq. ID no. 13621981
  misc_feature (37)..(161): Pfam Name: Profilin Pfam Description: Profilin
  misc_feature (36)..(166): Homolog of NCBI NO: 16555785 NR Description: profilin [Capsicum annuum]
  misc_feature (36)..(166): Homolog of NCBI NO: 34922934 NR Description: Profilin (Allergen Pru p 4.02)
  misc_feature (36)..(166): Homolog of NCBI NO: 15809696 NR Description: profilin [Litchi chinensis]
  misc_feature (36)..(166): Homolog of NCBI NO: 12230421 NR Description: Profilin 1
  misc_feature (36)..(166): Homolog of NCBI NO: 1346802 NR Description: PROFILIN 1
  misc_feature (37)..(166): Homolog of NCBI NO: 2781152 NR Description: Profilin I From Arabidopsis Thaliana
  misc_feature (36)..(166): Homolog of NCBI NO: 15224838 NR Description: profilin 1 [Arabidopsis thaliana]
  misc_feature (36)..(166): Homolog of NCBI NO: 9965571 NR Description: profilin [Arabidopsis thaliana]
  misc_feature (36)..(166): Homolog of NCBI NO: 21554627 NR Description: profilin 2 [Arabidopsis thaliana]
  misc_feature (36)..(166): Homolog of NCBI NO: 15233538 NR Description: profilin 2 [Arabidopsis thaliana]
SLQTKSTLQKKRKKKKKQRQQEEEETVSSRRRRRKMSWQSYVDDHLMCEVEGNHLTHAAIFGQDGSVWAQSSAFPQLKPAEIAGINKDFEEAGHLAPTGLFLGGEKYMVVQGEAGAVIRGKKGPGGVTIKKTTQALVFGIYDEPMTGGQCNLVVERLGDYLIESGL

SEQ ID NO: 36055 - protein, 131 aa, Arabidopsis thaliana; identical to SEQ ID NO: 30808
  peptide (1)..(131): Ceres Seq. ID no. 13621982
  misc_feature (2)..(126): Pfam Name: Profilin Pfam Description: Profilin
  misc_feature (1)..(131): Homolog of NCBI NO: 16555785 NR Description: profilin [Capsicum annuum]
  misc_feature (1)..(131): Homolog of NCBI NO: 34922934 NR Description: Profilin (Allergen Pru p 4.02)
  misc_feature (1)..(131): Homolog of NCBI NO: 15809696 NR Description: profilin [Litchi chinensis]
  misc_feature (1)..(131): Homolog of NCBI NO: 12230421 NR Description: Profilin 1
  misc_feature (1)..(131): Homolog of NCBI NO: 1346802 NR Description: PROFILIN 1
  misc_feature (2)..(131): Homolog of NCBI NO: 2781152 NR Description: Profilin I From Arabidopsis Thaliana
  misc_feature (1)..(131): Homolog of NCBI NO: 15224838 NR Description: profilin 1 [Arabidopsis thaliana]
  misc_feature (1)..(131): Homolog of NCBI NO: 9965571 NR Description: profilin [Arabidopsis thaliana]
  misc_feature (1)..(131): Homolog of NCBI NO: 21554627 NR Description: profilin 2 [Arabidopsis thaliana]
  misc_feature (1)..(131): Homolog of NCBI NO: 15233538 NR Description: profilin 2 [Arabidopsis thaliana]

SEQ ID NO: 36056 - protein, 120 aa, Arabidopsis thaliana; identical to SEQ ID NO: 30809
  peptide (1)..(120): Ceres Seq. ID no. 13621983
  misc_feature (1)..(115): Pfam Name: Profilin Pfam Description: Profilin
  misc_feature (1)..(120): Homolog of NCBI NO: 16555785 NR Description: profilin [Capsicum annuum]
  misc_feature (1)..(120): Homolog of NCBI NO: 34922934 NR Description: Profilin (Allergen Pru p 4.02)
  misc_feature (1)..(120): Homolog of NCBI NO: 15809696 NR Description: profilin [Litchi chinensis]
  misc_feature (1)..(120): Homolog of NCBI NO: 12230421 NR Description: Profilin 1
  misc_feature (1)..(120): Homolog of NCBI NO: 1346802 NR Description: PROFILIN 1
  misc_feature (1)..(120): Homolog of NCBI NO: 2781152 NR Description: Profilin I From Arabidopsis Thaliana
  misc_feature (1)..(120): Homolog of NCBI NO: 15224838 NR Description: profilin 1 [Arabidopsis thaliana]
  misc_feature (1)..(120): Homolog of NCBI NO: 9965571 NR Description: profilin [Arabidopsis thaliana]
  misc_feature (1)..(120): Homolog of NCBI NO: 21554627 NR Description: profilin 2 [Arabidopsis thaliana]
  misc_feature (1)..(120): Homolog of NCBI NO: 15233538 NR Description: profilin 2 [Arabidopsis thaliana]

SEQ ID NO: 36057 - DNA, 860 bp, Arabidopsis thaliana
  misc_feature (1)..(860): Ceres Seq. ID no. 12393628
  misc_feature: MA Experiment ID: 20000227 Result: Down-regulated in Transcription
  misc_feature: MA Experiment 20000227 PARAMETER Experiment Name: At_Root-Tips-vs-Tops_P Parameter: Tissue Value: Root Tips vs. Root Tops
  misc_feature: MA Experiment ID: 20000439 Result: Down-regulated in Transcription
  misc_feature: MA Experiment 20000439 PARAMETER Experiment Name: At_Roots__P Parameter: Age (day) Value: 14 vs. 21
  misc_feature: MA Experiment 20000439 PARAMETER Experiment Name: At_Roots__P Parameter: Organism Value: A. thaliana
  misc_feature: MA Experiment 20000439 PARAMETER Experiment Name: At_Roots__P Parameter: Tissue Value: Roots vs. Whole Plant
  misc_feature: MA Experiment ID: 20000794 Result: Down-regulated in Transcription
  misc_feature: MA Experiment 20000794 PARAMETER Experiment Name: At_Petals_P Parameter: Age (day) Value: 23-25 days
  misc_feature: MA Experiment 20000794 PARAMETER Experiment Name: At_Petals_P Parameter: Plant Line Value: WS
  misc_feature: MA Experiment 20000794 PARAMETER Experiment Name: At_Petals_P Parameter: Tissue Value: Petals vs. Whole plant
  misc_feature: MA Experiment ID: 20001557 Result: Down-regulated in Transcription
  misc_feature: MA Experiment 20001557 PARAMETER Experiment Name: At_Drought_Soil_Dry_P Parameter: Age (day) Value: 27
  misc_feature: MA Experiment 20001557 PARAMETER Experiment Name: At_Drought_Soil_Dry_P Parameter: Organism Value: A. thaliana
  misc_feature: MA Experiment 20001557 PARAMETER Experiment Name: At_Drought_Soil_Dry_P Parameter: Plant Line Value: WS
  misc_feature: MA Experiment 20001557 PARAMETER Experiment Name: At_Drought_Soil_Dry_P Parameter: Post Timepoint (hr) Value: 3
  misc_feature: MA Experiment 20001557 PARAMETER Experiment Name: At_Drought_Soil_Dry_P Parameter: Post-Treatment Value: Re-Water vs. No Drought
  misc_feature: MA Experiment 20001557 PARAMETER Experiment Name: At_Drought_Soil_Dry_P Parameter: Timepoint (day) Value: 13
  misc_feature: MA Experiment 20001557 PARAMETER Experiment Name: At_Drought_Soil_Dry_P Parameter: Treatment Value: Drought vs. No Drought
gcacagtatgtgttttgacttcttcgcgtcggcgatattatccagaaacagtagtgtcgaagaagaagaagaagaagaaggagagattctgagtttagggttttgtttgtgttgcttcgaattgagcagctatggcttccgtgttgctacttcttctggtgttcgtgtttgatctcattgcttttggtcttgctgttgctgcagagcaacgaagaaccacctggcaaatttctagagaatcaagagatttgagctactgtgtgtatgacaaggacatagcaacgggtctcggagtcggttctttcttggtcttattagcgagtcagctcttaataatggtggcgagccgatgtttatgctgtggaagagcattgacaccaagtggttcaagatcttgggcaatttttctcttcatcaccacctgggttttcttcttcatagcacaagtgtgtttacttgctggctctgtacgaaacgcttaccatacaaagtaccgtgtctactttggtaacacttccccttcttgtcgatcactgaggaaaggcgtgtttggggctggagcagcattcatagtgctcacggggattgtctccgagctttactatgtgaccctttcgagggccaaagactttcaaccttcaagagatcccggtatccgaatgagtagcctgtagaacttacacctgctttgtagatttagaatagttatgttcattgttgttatcatcttactatcttaggtcattgttgttatgattttaatagtatggaggaaactaacattattttcaatttcttaaaatatatgtacctatcaaaaacgatagattgaaaacaataaagaaccataaagttgatat

SEQ ID NO: 36058 - protein, 180 aa, Arabidopsis thaliana
  peptide (1)..(180): Ceres Seq. ID no. 12393629
  misc_feature (2)..(179): Homolog of NCBI NO: 18391509 NR Description: expressed protein
  misc_feature (3)..(178): Homolog of NCBI NO: 22748411 NR Description: hypothetical protein [Oryza sativa (japonica
  misc_feature (1)..(165): Homolog of NCBI NO: 38344206 NR Description: OSJNBa0064G10.22 [Oryza sativa (japonica
  misc_feature (1)..(166): Homolog of NCBI NO: 18404242 NR Description: expressed protein
  misc_feature (1)..(166): Homolog of NCBI NO: 34394069 NR Description: unknown protein [Oryza sativa (japonica
  misc_feature (1)..(170): Homolog of NCBI NO: 18400781 NR Description: expressed protein
  misc_feature (1)..(158): Homolog of NCBI NO: 18416991 NR Description: Expressed protein
  misc_feature (1)..(179): Homolog of NCBI NO: 38016521 NR Description: fiber protein Fb34 [Gossypium barbadense]
  misc_feature (1)..(180): Homolog of NCBI NO: 21554630 NR Description: unknown [Arabidopsis thaliana]
  misc_feature (1)..(180): Homolog of NCBI NO: 18407003 NR Description: Expressed protein
MASVLLLLLVFVFDLIAFGLAVAAEQRRTTWQISRESRDLSYCVYDKDIATGLGVGSFLVLLASQLLIMVASRCLCCGRALTPSGSRSWAIFLFITTWVFFFIAQVCLLAGSVRNAYHTKYRVYFGNTSPSCRSLRKGVFGAGAAFIVLTGIVSELYYVTLSRAKDFQPSRDPGIRMSSL

SEQ ID NO: 36059 - protein, 112 aa, Arabidopsis thaliana
  peptide (1)..(112): Ceres Seq. ID no. 12393630
  misc_feature (1)..(111): Homolog of NCBI NO: 18391509 NR Description: expressed protein
  misc_feature (1)..(110): Homolog of NCBI NO: 22748411 NR Description: hypothetical protein [Oryza sativa (japonica
  misc_feature (1)..(97): Homolog of NCBI NO: 38344206 NR Description: OSJNBa0064G10.22 [Oryza sativa (japonica
  misc_feature (1)..(98): Homolog of NCBI NO: 18404242 NR Description: expressed protein
  misc_feature (1)..(98): Homolog of NCBI NO: 34394069 NR Description: unknown protein [Oryza sativa (japonica
  misc_feature (1)..(102): Homolog of NCBI NO: 18400781 NR Description: expressed protein
  misc_feature (1)..(90): Homolog of NCBI NO: 18416991 NR Description: Expressed protein
  misc_feature (1)..(111): Homolog of NCBI NO: 38016521 NR Description: fiber protein Fb34 [Gossypium barbadense]
  misc_feature (1)..(112): Homolog of NCBI NO: 21554630 NR Description: unknown [Arabidopsis thaliana]
  misc_feature (1)..(112): Homolog of NCBI NO: 18407003 NR Description: Expressed protein
MVASRCLCCGRALTPSGSRSWAIFLFITTWVFFFIAQVCLLAGSVRNAYHTKYRVYFGNTSPSCRSLRKGVFGAGAAFIVLTGIVSELYYVTLSRAKDFQPSRDPGIRMSSL

SEQ ID NO: 36060 - DNA, 1894 bp, Arabidopsis thaliana
  misc_feature (1)..(1894): Ceres Seq. ID no. 12338010
  misc_feature: MA Experiment ID: 108434 Result: Down-regulated in Transcription
  misc_feature: MA Experiment 108434 PARAMETER Experiment Name: At_Root_Tips_cDNA_P Parameter: Tissue Value: Root Tips
  misc_feature: MA Experiment ID: 108435 Result: Up-regulated in Transcription
  misc_feature: MA Experiment 108435 PARAMETER Experiment Name: At_stm_Mutants_cDNA_P Parameter: Plant Line Value: wt Landsburg vs stm
  misc_feature: MA Experiment 108435 PARAMETER Experiment Name: At_stm_Mutants_cDNA_P Parameter: Tissue Value: Shoot Apical Meristem Region
  misc_feature: MA Experiment ID: 108464 Result: Up-regulated in Transcription
  misc_feature: MA Experiment 108464 PARAMETER Experiment Name: At_Germinating_Seeds_cDNA_P Parameter: Age (day) Value: 4 vs. 0
  misc_feature: MA Experiment 108464 PARAMETER Experiment Name: At_Germinating_Seeds_cDNA_P Parameter: Tissue Value: Germinating Seeds
  misc_feature: MA Experiment ID: 108469 Result: Down-regulated in Transcription
  misc_feature: MA Experiment ID: 108488 Result: Up-regulated in Transcription
  misc_feature: MA Experiment ID: 108489 Result: Up-regulated in Transcription
  misc_feature: MA Experiment ID: 108501 Result: Up-regulated in Transcription
  misc_feature: MA Experiment 108501 PARAMETER Experiment Name: At_ap2_floral_buds_cDNA_P Parameter: Plant Line Value: ap2 (Ler.)
  misc_feature: MA Experiment 108501 PARAMETER Experiment Name: At_ap2_floral_buds_cDNA_P Parameter: Tissue Value: Closed Flower
  misc_feature: MA Experiment ID: 108569 Result: Up-regulated in Transcription
  misc_feature: MA Experiment 108569 PARAMETER Experiment Name: At_0.001%_MeJA__cDNA_P Parameter: Timepoint (hr) Value: 6
  misc_feature: MA Experiment 108569 PARAMETER Experiment Name: At_0.001%_MeJA__cDNA_P Parameter: Tissue Value: Aerial
  misc_feature: MA Experiment 108569 PARAMETER Experiment Name: At_0.001%_MeJA__cDNA_P Parameter: Treatment Value: 0.001% MeJA vs. No Treatment
  misc_feature: MA Experiment ID: 20000068 Result: Up-regulated in Transcription
  misc_feature: MA Experiment ID: 20000069 Result: Up-regulated in Transcription
  misc_feature: MA Experiment 20000069 PARAMETER Experiment Name: At_100uM_ABA_Mutants_cDNA_P Parameter: Plant Line Value: CS23
  misc_feature: MA Experiment 20000069 PARAMETER Experiment Name: At_100uM_ABA_Mutants_cDNA_P Parameter: Timepoint (hr) Value: 6
  misc_feature: MA Experiment 20000069 PARAMETER Experiment Name: At_100uM_ABA_Mutants_cDNA_P Parameter: Tissue Value: Aerial
  misc_feature: MA Experiment 20000069 PARAMETER Experiment Name: At_100uM_ABA_Mutants_cDNA_P Parameter: Treatment Value: 100uM ABA vs. No Treatment
  misc_feature: MA Experiment ID: 20000070 Result: Up-regulated in Transcription
  misc_feature: MA Experiment 20000070 PARAMETER Experiment Name: At_100uM_ABA_Mutants_cDNA_P Parameter: Plant Line Value: CS24
  misc_feature: MA Experiment 20000070 PARAMETER Experiment Name: At_100uM_ABA_Mutants_cDNA_P Parameter: Timepoint (hr) Value: 6
  misc_feature: MA Experiment 20000070 PARAMETER Experiment Name: At_100uM_ABA_Mutants_cDNA_P Parameter: Tissue Value: Aerial
  misc_feature: MA Experiment 20000070 PARAMETER Experiment Name: At_100uM_ABA_Mutants_cDNA_P Parameter: Treatment Value: 100uM ABA vs. No Treatment
  misc_feature: MA Experiment ID: 20000071 Result: Up-regulated in Transcription
  misc_feature: MA Experiment 20000071 PARAMETER Experiment Name: At_100uM_ABA_Mutants_cDNA_P Parameter: Plant Line Value: CS8104
  misc_feature: MA Experiment 20000071 PARAMETER Experiment Name: At_100uM_ABA_Mutants_cDNA_P Parameter: Timepoint (hr) Value: 6
  misc_feature: MA Experiment 20000071 PARAMETER Experiment Name: At_100uM_ABA_Mutants_cDNA_P Parameter: Tissue Value: Aerial
  misc_feature: MA Experiment 20000071 PARAMETER Experiment Name: At_100uM_ABA_Mutants_cDNA_P Parameter: Treatment Value: 100uM ABA vs. No Treatment
  misc_feature: MA Experiment ID: 20000086 Result: Up-regulated in Transcription
  misc_feature: MA Experiment 20000086 PARAMETER Experiment Name: At_100uM_ABA_Mutants_cDNA_P Parameter: Plant Line Value: CS22
  misc_feature: MA Experiment 20000086 PARAMETER Experiment Name: At_100uM_ABA_Mutants_cDNA_P Parameter: Timepoint (hr) Value: 6
  misc_feature: MA Experiment 20000086 PARAMETER Experiment Name: At_100uM_ABA_Mutants_cDNA_P Parameter: Tissue Value: Aerial
  misc_feature: MA Experiment 20000086 PARAMETER Experiment Name: At_100uM_ABA_Mutants_cDNA_P Parameter: Treatment Value: 100uM ABA vs. No Treatment
  misc_feature: MA Experiment ID: 20000088 Result: Up-regulated in Transcription
  misc_feature: MA Experiment 20000088 PARAMETER Experiment Name: At_100uM_ABA_Mutants_cDNA_P Parameter: Plant Line Value: Landsberg
  misc_feature: MA Experiment 20000088 PARAMETER Experiment Name: At_100uM_ABA_Mutants_cDNA_P Parameter: Timepoint (hr) Value: 6
  misc_feature: MA Experiment 20000088 PARAMETER Experiment Name: At_100uM_ABA_Mutants_cDNA_P Parameter: Tissue Value: Aerial
  misc_feature: MA Experiment 20000088 PARAMETER Experiment Name: At_100uM_ABA_Mutants_cDNA_P Parameter: Treatment Value: 100uM ABA vs. No Treatment
  misc_feature: MA Experiment ID: 20000113 Result: Down-regulated in Transcription
  misc_feature: MA Experiment 20000113 PARAMETER Experiment Name: At_42deg_Heat_cDNA_P Parameter: Temperature (deg C) Value: 42 vs. 22
  misc_feature: MA Experiment 20000113 PARAMETER Experiment Name: At_42deg_Heat_cDNA_P Parameter: Timepoint (hr) Value: 8
  misc_feature: MA Experiment 20000113 PARAMETER Experiment Name: At_42deg_Heat_cDNA_P Parameter: Tissue Value: Aerial
  misc_feature: MA Experiment ID: 20000184 Result: Down-regulated in Transcription
  misc_feature: MA Experiment 20000184 PARAMETER Experiment Name: At_Shoots__P Parameter: Age (day) Value: 7
  misc_feature: MA Experiment 20000184 PARAMETER Experiment Name: At_Shoots__P Parameter: Tissue Value: Shoots vs. Whole Plant
  misc_feature: MA Experiment ID: 20000185 Result: Down-regulated in Transcription
  misc_feature: MA Experiment 20000185 PARAMETER Experiment Name: At_Roots__P Parameter: Age (day) Value: 7 vs. 21
  misc_feature: MA Experiment 20000185 PARAMETER Experiment Name: At_Roots__P Parameter: Organism Value: A. thaliana
  misc_feature: MA Experiment 20000185 PARAMETER Experiment Name: At_Roots__P Parameter: Tissue Value: Roots vs. Whole Plant
  misc_feature: MA Experiment ID: 20000211 Result: Up-regulated in Transcription
  misc_feature: MA Experiment 20000211 PARAMETER Experiment Name: At_0.001percent_MeJA__P Parameter: Age (day) Value: 14
  misc_feature: MA Experiment 20000211 PARAMETER Experiment Name: At_0.001percent_MeJA__P Parameter: Organism Value: A. thaliana
  misc_feature: MA Experiment 20000211 PARAMETER Experiment Name: At_0.001percent_MeJA__P Parameter: Plant Line Value: WS
  misc_feature: MA Experiment 20000211 PARAMETER Experiment Name: At_0.001percent_MeJA__P Parameter: Timepoint (hr) Value: 1
  misc_feature: MA Experiment 20000211 PARAMETER Experiment Name: At_0.001percent_MeJA__P Parameter: Tissue Value: Aerial
  misc_feature: MA Experiment 20000211 PARAMETER Experiment Name: At_0.001percent_MeJA__P Parameter: Treatment Value: 0.001percent MeJA vs. No Treatment
  misc_feature: MA Experiment ID: 20000224 Result: Up-regulated in Transcription
  misc_feature: MA Experiment ID: 20000234 Result: Up-regulated in Transcription
  misc_feature: MA Experiment 20000234 PARAMETER Experiment Name: At_Siliques_P Parameter: Age (day) Value: 21
  misc_feature: MA Experiment 20000234 PARAMETER Experiment Name: At_Siliques_P Parameter: Organism Value: A. thaliana
  misc_feature: MA Experiment 20000234 PARAMETER Experiment Name: At_Siliques_P Parameter: Plant Line Value: WS
  misc_feature: MA Experiment 20000234 PARAMETER Experiment Name: At_Siliques_P Parameter: Tissue Value: Less Than 5mm Siliques vs. Whole Plant
  misc_feature: MA Experiment ID: 20000264 Result: Up-regulated in Transcription
  misc_feature: MA Experiment 20000264 PARAMETER Experiment Name: At_Open_Flower_P Parameter: Age (day) Value: 21
  misc_feature: MA Experiment 20000264 PARAMETER Experiment Name: At_Open_Flower_P Parameter: Plant Line Value: WS
  misc_feature: MA Experiment 20000264 PARAMETER Experiment Name: At_Open_Flower_P Parameter: Tissue Value: Open Flower vs. Whole Plant
  misc_feature: MA Experiment ID: 20000265 Result: Up-regulated in Transcription
  misc_feature: MA Experiment 20000265 PARAMETER Experiment Name: At_Open_Flower_P Parameter: Age (day) Value: 21
  misc_feature: MA Experiment 20000265 PARAMETER Experiment Name: At_Open_Flower_P Parameter: Plant Line Value: WS
  misc_feature: MA Experiment 20000265 PARAMETER Experiment Name: At_Open_Flower_P Parameter: Tissue Value: Closed Flower vs. Whole Plant
  misc_feature: MA Experiment ID: 20000286 Result: Up-regulated in Transcription
  misc_feature: MA Experiment 20000286 PARAMETER Experiment Name: At_Open_Flower_P Parameter: Age (day) Value: 21
  misc_feature: MA Experiment 20000286 PARAMETER Experiment Name: At_Open_Flower_P Parameter: Plant Line Value: WS
  misc_feature: MA Experiment 20000286 PARAMETER Experiment Name: At_Open_Flower_P Parameter: Tissue Value: Half Open vs. Whole Plant
  misc_feature: MA Experiment ID: 20000308 Result: Up-regulated in Transcription
  misc_feature: MA Experiment 20000308 PARAMETER Experiment Name: At_100mM_NaCl__P Parameter: Age (day) Value: 17
  misc_feature: MA Experiment 20000308 PARAMETER Experiment Name: At_100mM_NaCl__P Parameter: Organism Value: A. thaliana
  misc_feature: MA Experiment 20000308 PARAMETER Experiment Name: At_100mM_NaCl__P Parameter: Plant Line Value: WS
  misc_feature: MA Experiment 20000308 PARAMETER Experiment Name: At_100mM_NaCl__P Parameter: Timepoint (hr) Value: 72
  misc_feature: MA Experiment 20000308 PARAMETER Experiment Name: At_100mM_NaCl__P Parameter: Tissue Value: Whole Plant
  misc_feature: MA Experiment 20000308 PARAMETER Experiment Name: At_100mM_NaCl__P Parameter: Treatment Value: 100mM NaCl vs. No Treatment
  misc_feature: MA Experiment ID: 20000439 Result: Down-regulated in Transcription
  misc_feature: MA Experiment 20000439 PARAMETER Experiment Name: At_Roots__P Parameter: Age (day) Value: 14 vs. 21
  misc_feature: MA Experiment 20000439 PARAMETER Experiment Name: At_Roots__P Parameter: Organism Value: A. thaliana
  misc_feature: MA Experiment 20000439 PARAMETER Experiment Name: At_Roots__P Parameter: Tissue Value: Roots vs. Whole Plant
  misc_feature: MA Experiment ID: 20000455 Result: Up-regulated in Transcription
  misc_feature: MA Experiment 20000455 PARAMETER Experiment Name: At_100uM_ABA_P Parameter: Age (day) Value: 16
  misc_feature: MA Experiment 20000455 PARAMETER Experiment Name: At_100uM_ABA_P Parameter: Organism Value: A. thaliana
  misc_feature: MA Experiment 20000455 PARAMETER Experiment Name: At_100uM_ABA_P Parameter: Plant Line Value: WS
  misc_feature: MA Experiment 20000455 PARAMETER Experiment Name: At_100uM_ABA_P Parameter: Timepoint (hr) Value: 48
  misc_feature: MA Experiment 20000455 PARAMETER Experiment Name: At_100uM_ABA_P Parameter: Tissue Value: Aerial
  misc_feature: MA Experiment 20000455 PARAMETER Experiment Name: At_100uM_ABA_P Parameter: Treatment Value: 100uM ABA vs. No Treatment
  misc_feature: MA Experiment ID: 20000495 Result: Up-regulated in Transcription
  misc_feature: MA Experiment 20000495 PARAMETER Experiment Name: At_Guard_Cells_P Parameter: Harvest Date Value: 8/2/2002
  misc_feature: MA Experiment 20000495 PARAMETER Experiment Name: At_Guard_Cells_P Parameter: Organism Value: A. thaliana
  misc_feature: MA Experiment 20000495 PARAMETER Experiment Name: At_Guard_Cells_P Parameter: Tissue Value: Guard Cells vs. Leaves
  misc_feature: MA Experiment ID: 20000794 Result: Down-regulated in Transcription
  misc_feature: MA Experiment 20000794 PARAMETER Experiment Name: At_Petals_P Parameter: Age (day) Value: 23-25 days
  misc_feature: MA Experiment 20000794 PARAMETER Experiment Name: At_Petals_P Parameter: Plant Line Value: WS
  misc_feature: MA Experiment 20000794 PARAMETER Experiment Name: At_Petals_P Parameter: Tissue Value: Petals vs. Whole plant
  misc_feature: MA Experiment ID: 20001248 Result: Down-regulated in Transcription
  misc_feature: MA Experiment 20001248 PARAMETER Experiment Name: At_Far-red-induction_P Parameter: Age (day) Value: 7
  misc_feature: MA Experiment 20001248 PARAMETER Experiment Name: At_Far-red-induction_P Parameter: Light Value: Far-red vs. White
  misc_feature: MA Experiment 20001248 PARAMETER Experiment Name: At_Far-red-induction_P Parameter: Organism Value: A. thaliana
  misc_feature: MA Experiment 20001248 PARAMETER Experiment Name: At_Far-red-induction_P Parameter: Plant Line Value: Columbia
  misc_feature: MA Experiment 20001248 PARAMETER Experiment Name: At_Far-red-induction_P Parameter: Timepoint (hr) Value: 4
  misc_feature: MA Experiment 20001248 PARAMETER Experiment Name: At_Far-red-induction_P Parameter: Tissue Value: Whole Plant
  misc_feature: MA Experiment ID: 20001450 Result: Down-regulated in Transcription
  misc_feature: MA Experiment 20001450 PARAMETER Experiment Name: At_Far-red-induction_P Parameter: Age (day) Value: 7
  misc_feature: MA Experiment 20001450 PARAMETER Experiment Name: At_Far-red-induction_P Parameter: Light Value: Far-red vs. White
  misc_feature: MA Experiment 20001450 PARAMETER Experiment Name: At_Far-red-induction_P Parameter: Organism Value: A. thaliana
  misc_feature: MA Experiment 20001450 PARAMETER Experiment Name: At_Far-red-induction_P Parameter: Plant Line Value: Columbia
  misc_feature: MA Experiment 20001450 PARAMETER Experiment Name: At_Far-red-induction_P Parameter: Timepoint (hr) Value: 8
  misc_feature: MA Experiment 20001450 PARAMETER Experiment Name: At_Far-red-induction_P Parameter: Tissue Value: Whole Plant
  misc_feature: MA Experiment ID: 20001451 Result: Down-regulated in Transcription
  misc_feature: MA Experiment 20001451 PARAMETER Experiment Name: At_Far-red-induction_P Parameter: Age (day) Value: 7
  misc_feature: MA Experiment 20001451 PARAMETER Experiment Name: At_Far-red-induction_P Parameter: Light Value: Far-red vs. White
  misc_feature: MA Experiment 20001451 PARAMETER Experiment Name: At_Far-red-induction_P Parameter: Organism Value: A. thaliana
  misc_feature: MA Experiment 20001451 PARAMETER Experiment Name: At_Far-red-induction_P Parameter: Plant Line Value: Columbia
  misc_feature: MA Experiment 20001451 PARAMETER Experiment Name: At_Far-red-induction_P Parameter: Timepoint (hr) Value: 24
  misc_feature: MA Experiment 20001451 PARAMETER Experiment Name: At_Far-red-induction_P Parameter: Tissue Value: Whole Plant
  misc_feature: MA Experiment ID: 20001555 Result: Up-regulated in Transcription
  misc_feature: MA Experiment 20001555 PARAMETER Experiment Name: At_Drought_Soil_Dry_P Parameter: Age (day) Value: 24
  misc_feature: MA Experiment 20001555 PARAMETER Experiment Name: At_Drought_Soil_Dry_P Parameter: Organism Value: A. thaliana
  misc_feature: MA Experiment 20001555 PARAMETER Experiment Name: At_Drought_Soil_Dry_P Parameter: Plant Line Value: WS
  misc_feature: MA Experiment 20001555 PARAMETER Experiment Name: At_Drought_Soil_Dry_P Parameter: Post Timepoint (hr) Value: None
  misc_feature: MA Experiment 20001555 PARAMETER Experiment Name: At_Drought_Soil_Dry_P Parameter: Post-Treatment Value: None
  misc_feature: MA Experiment 20001555 PARAMETER Experiment Name: At_Drought_Soil_Dry_P Parameter: Timepoint (day) Value: 10
  misc_feature: MA Experiment 20001555 PARAMETER Experiment Name: At_Drought_Soil_Dry_P Parameter: Treatment Value: Drought vs. No Drought
  misc_feature: MA Experiment ID: 20001556 Result: Up-regulated in Transcription
  misc_feature: MA Experiment 20001556 PARAMETER Experiment Name: At_Drought_Soil_Dry_P Parameter: Age (day) Value: 26
  misc_feature: MA Experiment 20001556 PARAMETER Experiment Name: At_Drought_Soil_Dry_P Parameter: Organism Value: A. thaliana
  misc_feature: MA Experiment 20001556 PARAMETER Experiment Name: At_Drought_Soil_Dry_P Parameter: Plant Line Value: WS
  misc_feature: MA Experiment 20001556 PARAMETER Experiment Name: At_Drought_Soil_Dry_P Parameter: Post Timepoint (hr) Value: None
  misc_feature: MA Experiment 20001556 PARAMETER Experiment Name: At_Drought_Soil_Dry_P Parameter: Post-Treatment Value: None
  misc_feature: MA Experiment 20001556 PARAMETER Experiment Name: At_Drought_Soil_Dry_P Parameter: Timepoint (day) Value: 12
  misc_feature: MA Experiment 20001556 PARAMETER Experiment Name: At_Drought_Soil_Dry_P Parameter: Treatment Value: Drought vs. No Drought
  misc_feature: MA Experiment ID: 20001558 Result: Down-regulated in Transcription
  misc_feature: MA Experiment 20001558 PARAMETER Experiment Name: At_Drought_Soil_Dry_P Parameter: Age (day) Value: 27
  misc_feature: MA Experiment 20001558 PARAMETER Experiment Name: At_Drought_Soil_Dry_P Parameter: Organism Value: A. thaliana
  misc_feature: MA Experiment 20001558 PARAMETER Experiment Name: At_Drought_Soil_Dry_P Parameter: Plant Line Value: WS
  misc_feature: MA Experiment 20001558 PARAMETER Experiment Name: At_Drought_Soil_Dry_P Parameter: Post Timepoint (hr) Value: 6
  misc_feature: MA Experiment 20001558 PARAMETER Experiment Name: At_Drought_Soil_Dry_P Parameter: Post-Treatment Value: Re-Water vs. No Drought
  misc_feature: MA Experiment 20001558 PARAMETER Experiment Name: At_Drought_Soil_Dry_P Parameter: Timepoint (day) Value: 13
  misc_feature: MA Experiment 20001558 PARAMETER Experiment Name: At_Drought_Soil_Dry_P Parameter: Treatment Value: Drought vs. No Drought
  misc_feature: MA Experiment ID: 20001559 Result: Up-regulated in Transcription
  misc_feature: MA Experiment 20001559 PARAMETER Experiment Name: At_Drought_Soil_Dry_P Parameter: Age (day) Value: 28
  misc_feature: MA Experiment 20001559 PARAMETER Experiment Name: At_Drought_Soil_Dry_P Parameter: Organism Value: A. thaliana
  misc_feature: MA Experiment 20001559 PARAMETER Experiment Name: At_Drought_Soil_Dry_P Parameter: Plant Line Value: WS
  misc_feature: MA Experiment 20001559 PARAMETER Experiment Name: At_Drought_Soil_Dry_P Parameter: Post Timepoint (hr) Value: 29
  misc_feature: MA Experiment 20001559 PARAMETER Experiment Name: At_Drought_Soil_Dry_P Parameter: Post-Treatment Value: Re-Water vs. No Drought
  misc_feature: MA Experiment 20001559 PARAMETER Experiment Name: At_Drought_Soil_Dry_P Parameter: Timepoint (day) Value: 14
  misc_feature: MA Experiment 20001559 PARAMETER Experiment Name: At_Drought_Soil_Dry_P Parameter: Treatment Value: Drought vs. No Drought
  misc_feature: MA Experiment ID: 20001761 Result: Up-regulated in Transcription
  misc_feature: MA Experiment 20001761 PARAMETER Experiment Name: At_50mM_NH4NO3_L-to-H_P Parameter: Timepoint (hr) Value: 4
  misc_feature: MA Experiment 20001761 PARAMETER Experiment Name: At_50mM_NH4NO3_L-to-H_P Parameter: Tissue Value: Siliques
  misc_feature: MA Experiment 20001761 PARAMETER Experiment Name: At_50mM_NH4NO3_L-to-H_P Parameter: Treatment Value: 50mM NH4NO3 vs 100mM Mannitol
  misc_feature: MA Experiment ID: 20001774 Result: Up-regulated in Transcription
  misc_feature: MA Experiment 20001774 PARAMETER Experiment Name: At_Far-red-enriched-adult_P Parameter: Age (day) Value: 31
  misc_feature: MA Experiment 20001774 PARAMETER Experiment Name: At_Far-red-enriched-adult_P Parameter: Light Value: Far-red enriched vs. White
  misc_feature: MA Experiment 20001774 PARAMETER Experiment Name: At_Far-red-enriched-adult_P Parameter: Organism Value: A. thaliana
  misc_feature: MA Experiment 20001774 PARAMETER Experiment Name: At_Far-red-enriched-adult_P Parameter: Plant Line Value: Columbia
  misc_feature: MA Experiment 20001774 PARAMETER Experiment Name: At_Far-red-enriched-adult_P Parameter: Timepoint (hr) Value: 72
  misc_feature: MA Experiment 20001774 PARAMETER Experiment Name: At_Far-red-enriched-adult_P Parameter: Tissue Value: Aerial
  misc_feature: MA Experiment ID: 20001904 Result: Up-regulated in Transcription
  misc_feature: MA Experiment 20001904 PARAMETER Experiment Name: At_Drought_Reproduction_P Parameter: Age (day) Value: 37
  misc_feature: MA Experiment 20001904 PARAMETER Experiment Name: At_Drought_Reproduction_P Parameter: Organism Value: A. thaliana
  misc_feature: MA Experiment 20001904 PARAMETER Experiment Name: At_Drought_Reproduction_P Parameter: Plant Line Value: WS
  misc_feature: MA Experiment 20001904 PARAMETER Experiment Name: At_Drought_Reproduction_P Parameter: Timepoint (day) Value: 7
  misc_feature: MA Experiment 20001904 PARAMETER Experiment Name: At_Drought_Reproduction_P Parameter: Tissue Value: Rosettes
  misc_feature: MA Experiment 20001904 PARAMETER Experiment Name: At_Drought_Reproduction_P Parameter: Treatment Value: Drought vs. No Drought
  misc_feature: MA Experiment ID: 20001906 Result: Down-regulated in Transcription
  misc_feature: MA Experiment 20001906 PARAMETER Experiment Name: At_Drought_Reproduction_P Parameter: Age (day) Value: 35
  misc_feature: MA Experiment 20001906 PARAMETER Experiment Name: At_Drought_Reproduction_P Parameter: Organism Value: A. thaliana
  misc_feature: MA Experiment 20001906 PARAMETER Experiment Name: At_Drought_Reproduction_P Parameter: Plant Line Value: WS
  misc_feature: MA Experiment 20001906 PARAMETER Experiment Name: At_Drought_Reproduction_P Parameter: Timepoint (day) Value: 5
  misc_feature: MA Experiment 20001906 PARAMETER Experiment Name: At_Drought_Reproduction_P Parameter: Tissue Value: Siliques
  misc_feature: MA Experiment 20001906 PARAMETER Experiment Name: At_Drought_Reproduction_P Parameter: Treatment Value: Drought vs. No Drought
  misc_feature: MA Experiment ID: 20001908 Result: Down-regulated in Transcription
  misc_feature: MA Experiment 20001908 PARAMETER Experiment Name: At_Drought_Reproduction_P Parameter: Age (day) Value: 40
  misc_feature: MA Experiment 20001908 PARAMETER Experiment Name: At_Drought_Reproduction_P Parameter: Organism Value: A. thaliana
  misc_feature: MA Experiment 20001908 PARAMETER Experiment Name: At_Drought_Reproduction_P Parameter: Plant Line Value: WS
  misc_feature: MA Experiment 20001908 PARAMETER Experiment Name: At_Drought_Reproduction_P Parameter: Timepoint (day) Value: 10
  misc_feature: MA Experiment 20001908 PARAMETER Experiment Name: At_Drought_Reproduction_P Parameter: Tissue Value: Siliques
  misc_feature: MA Experiment 20001908 PARAMETER Experiment Name: At_Drought_Reproduction_P Parameter: Treatment Value: Drought vs. No Drought
aacaaattcctacaccaatatctttagctagagagaaaaaaagagtgaggaaactagagagagagaccacccaataatggtgaggttcgagaaggttcatttagtgttagggttagctctggttctaactctggtcggagctccgaccaaagcccaaggacctgtttgcggtgcaggcctgcctgacaaatttagcagattaaacttccctgaaggcttcatttggggaaccgcaacagcagcatttcaggttgaaggagctgttaatgaaggttgcagaggtccaagcatgtgggatactttcactaagaagttcccacatagatgtgaaaatcataacgctgatgttgctgtggatttctatcatcgttacaaggaagatatccagttgatgaaagaccttaacactgatgcttttagactttctattgcgtggcccagaatattcccccatggaaggatgtctaagggaataagcaaagtgggagtccaattctaccacgacctcatcgatgagcttctcaaaaacaatataataccattagttacagtctttcattgggatactccccaagacttggaagatgaatatggtggtttcttaagtggtcgcatcgtgcaagattttaccgaatatgcgaatttcactttccacgaatatggacacaaagtgaaacattggatcacatttaacgagccatgggtgtttagtcgtgccggttacgacaacggaaagaaagctccgggacgttgttcgccgtacatccccggttatggacagcattgtcaggatgggcggtctggatacgaagcttatcaagtcagtcacaacttactcttgtcgcatgcttacgctgttgacgcattcagaaactgcaaacagtgtgctggaggtaaaattggaattgcacacagtccagcttggttcgaaccacaagaccttgagcatgttggaggttccattgaacgtgtgcttgatttcatcctaggatggcatttggctccaacaacttatggagattatccacaatcgatgaaggatcgtgtcggtcatagattgccaaaattcacagaagctgagaagaagttgctaaagggttctacagattacgtaggaatgaattactatacttcagtgtttgcaaaagaaattagccctgatcctaagagtccgagttggacgactgattctcttgttgattgggatagcaagagtgtggatggatacaaaattggtagcaagccgtttaatggtaaactggatgtgtattcaaaaggtttgagataccttttgaagtatattaaggataactatggcgacccagaagttatcattgccgagaatggatacggagaagaccttggagagaagcacaatgacgtaaactttgggacacaagatcacaacagaaaatattatatccaaaggcatctcttgagtatgcacgacgccatttgcaaggacaaagtgaacgttacgggatactttgtgtggtctttgatggacaactttgagtggcaagatgggtacaaggcgaggttcggactttactacatcgatttccagaacaacttgacccgtcaccaaaaagtttcgggcaaatggtattccgaattcctcaaaccacagtttccaacctccaagctgagggaagaactctagatgatcaagaatcctatcgggacaaaataattgagtacaagagtcttgaagatgttgttgaggataatatcagtttgtgtgttctatggatcgttttcatctaccggtccttcctatgttagaaggacttgtgagttgttcgagttttaataatatcaataaatgtcttcttttttaatatatgttgagttaataattaaatctgcttatcgaaaagaacagataaaatag

SEQ ID NO: 36061 - protein, 528 aa, Arabidopsis thaliana [sequence omitted]

SEQ ID NO: 36062 - protein, 457 aa, Arabidopsis thaliana
  peptide (1)..(457): Ceres Seq. ID no. 12338012
  misc_feature (1)..(444): Homolog of NCBI NO: 25289457 NR Description: probable beta-glucosidase (EC 3.2.1.21) ATA27
  misc_feature (1)..(436): Homolog of NCBI NO: 1076442 NR Description: beta-glucosidase (EC 3.2.1.21) - rape
  misc_feature (1)..(444): Homolog of NCBI NO: 15222905 NR Description: glycosyl hydrolase family 1,
  misc_feature (1)..(444): Homolog of NCBI NO: 25404995 NR Description: protein T4O12.15 [imported] - Arabidopsis
  misc_feature (1)..(457): Homolog of NCBI NO: 16604493 NR Description: AT3g21370/MHC9_5 [Arabidopsis thaliana]
  misc_feature (1)..(457): Homolog of NCBI NO: 22331243 NR Description: glycosyl hydrolase family 1
  misc_feature (1)..(457): Homolog of NCBI NO: 12043529 NR Description: beta-glucosidase 1 [Arabidopsis thaliana]
  misc_feature (1)..(457): Homolog of NCBI NO: 23397037 NR Description: putative beta-glucosidase [Arabidopsis thaliana]
  misc_feature (1)..(457): Homolog of NCBI NO: 12229686 NR Description: Beta-glucosidase homolog precursor
  misc_feature (1)..(457): Homolog of NCBI NO: 15218992 NR Description: glycosyl hydrolase family 1, beta-glucosidase
MWDTFTKKFPHRCENHNADVAVDFYHRYKEDIQLMKDLNTDAFRLSIAWPRIFPHGRMSKGISKVGVQFYHDLIDELLKNNIIPLVTVFHWDTPQDLEDEYGGFLSGRIVQDFTEYANFTFHEYGHKVKHWITFNEPWVFSRAGYDNGKKAPGRCSPYIPGYGQHCQDGRSGYEAYQVSHNLLLSHAYAVDAFRNCKQCAGGKIGIAHSPAWFEPQDLEHVGGSIERVLDFILGWHLAPTTYGDYPQSMKDRVGHRLPKFTEAEKKLLKGSTDYVGMNYYTSVFAKEISPDPKSPSWTTDSLVDWDSKSVDGYKIGSKPFNGKLDVYSKGLRYLLKYIKDNYGDPEVIIAENGYGEDLGEKHNDVNFGTQDHNRKYYIQRHLLSMHDAICKDKVNVTGYFVWSLMDNFEWQDGYKARFGLYYIDFQNNLTRHQKVSGKWYSEFLKPQFPTSKLREEL

SEQ ID NO: 36063 - protein, 423 aa, Arabidopsis thaliana
  peptide (1)..(423): Ceres Seq. ID no. 12338013
  misc_feature (1)..(410): Homolog of NCBI NO: 25289457 NR Description: probable beta-glucosidase (EC 3.2.1.21) ATA27
  misc_feature (1)..(402): Homolog of NCBI NO: 1076442 NR Description: beta-glucosidase (EC 3.2.1.21) - rape
  misc_feature (1)..(410): Homolog of NCBI NO: 15222905 NR Description: glycosyl hydrolase family 1,
  misc_feature (1)..(410): Homolog of NCBI NO: 25404995 NR Description: protein T4O12.15 [imported] - Arabidopsis
  misc_feature (1)..(423): Homolog of NCBI NO: 16604493 NR Description: AT3g21370/MHC9_5 [Arabidopsis thaliana]
  misc_feature (1)..(423): Homolog of NCBI NO: 22331243 NR Description: glycosyl hydrolase family 1
  misc_feature (1)..(423): Homolog of NCBI NO: 12043529 NR Description: beta-glucosidase 1 [Arabidopsis thaliana]
  misc_feature (1)..(423): Homolog of NCBI NO: 23397037 NR Description: putative beta-glucosidase [Arabidopsis thaliana]
  misc_feature (1)..(423): Homolog of NCBI NO: 12229686 NR Description: Beta-glucosidase homolog precursor
  misc_feature (1)..(423): Homolog of NCBI NO: 15218992 NR Description: glycosyl hydrolase family 1, beta-glucosidase
MKDLNTDAFRLSIAWPRIFPHGRMSKGISKVGVQFYHDLIDELLKNNIIPLVTVFHWDTPQDLEDEYGGFLSGRIVQDFTEYANFTFHEYGHKVKHWITFNEPWVFSRAGYDNGKKAPGRCSPYIPGYGQHCQDGRSGYEAYQVSHNLLLSHAYAVDAFRNCKQCAGGKIGIAHSPAWFEPQDLEHVGGSIERVLDFILGWHLAPTTYGDYPQSMKDRVGHRLPKFTEAEKKLLKGSTDYVGMNYYTSVFAKEISPDPKSPSWTTDSLVDWDSKSVDGYKIGSKPFNGKLDVYSKGLRYLLKYIKDNYGDPEVIIAENGYGEDLGEKHNDVNFGTQDHNRKYYIQRHLLSMHDAICKDKVNVTGYFVWSLMDNFEWQDGYKARFGLYYIDFQNNLTRHQKVSGKWYSEFLKPQFPTSKLREEL

SEQ ID NO: 36064 - DNA, 1227 bp, Arabidopsis thaliana
  misc_feature (1)..(1227): Ceres Seq. ID no. 12334796
  misc_feature: MA Experiment ID: 108434 Result: Up-regulated in Transcription
  misc_feature: MA Experiment 108434 PARAMETER Experiment Name: At_Root_Tips_cDNA_P Parameter: Tissue Value: Root Tips
  misc_feature: MA Experiment ID: 108463 Result: Down-regulated in Transcription
  misc_feature: MA Experiment 108463 PARAMETER Experiment Name: At_Germinating_Seeds_cDNA_P Parameter: Age (day) Value: 3 vs. 0
  misc_feature: MA Experiment 108463 PARAMETER Experiment Name: At_Germinating_Seeds_cDNA_P Parameter: Tissue Value: Germinating Seeds
acactttggatagctgccgccgaagttttgtgcaatggcgacgaaaccgacgtttcagctgttttcttcttctcaaggttctggtctaggtttagggttccttgattcatcagagccagctcttcctccacctcctcctcctgttgaagtattatccttcgaggtgtcttcctccactgatttcgaagtggataaattgactatcggcgagatcactcttttgaagggtcgtgtgagcactaaagaggtttttggattgcctaattcagatttggttcctggagtctatgaaggcgggcttaagctttgggaaggatcgattgatcttgttaaagctcttgagaaagaatcacaaaccggaaacttatcattttccggaaagcgggttctcgagcttggatgtggtcatgcacttccaggaatctatgcgtgtctcaagggttcagatgctgttcatttccaggacttcaatgctgaggttcttcgatgtctcaccattccgaatctgaatgctaatctgtctgagaagtcttcctctgtctcagtaagtgaaacagaagtacgcttctttgctggtgagtggagtgaagttcatcaggttcttccactagttaatagtgatggtgagactaataagaagggtggttatgacatcattctaatggctgagacgatatattccatctccgctcagaaaagtcaatatgaattgattaaaaggtgtctggcgtatcctgatggagcagtgtatatggctgcaaagaagtactatttcggggtcggtggagggacaaggcaattcttgtctatgatagagaaagacggtgctcttgcttcaacgttggtgtctcaagtcacagatggttcctcaaatgtcagagaggtatggaagctttcgtacaagtaagtcgaagctatactggaattcagtgtccaacgatctgattttagtggatttgggttgctcataaaaatgagtggaaattcaaaatctctcatccatgtgtttagcttatagactctcctgactgtgttataataattgcttagtttttcattttggtacattttctggcttaacgaaaggcttatgtgatctgccgttgattctcaccggaccaaagttccaaactaagctttagttggagtcgcagtttatatattgtaaatctctcacatgattagttatgcttttgagaataaatccaccagctcgacctgtcttgc

SEQ ID NO: 36065 - protein, 290 aa, Arabidopsis thaliana
  peptide (1)..(290): Ceres Seq. ID no. 12334797
  misc_feature (198)..(290): Homolog of NCBI NO: 38346224 NR Description: OJ990528_30.4 [Oryza sativa (japonica
  misc_feature (26)..(194): Homolog of NCBI NO: 38346224 NR Description: OJ990528_30.4 [Oryza sativa (japonica
  misc_feature (198)..(290): Homolog of NCBI NO: 16226903 NR Description: At2g43320/T1O24.6 [Arabidopsis thaliana]
  misc_feature (26)..(196): Homolog of NCBI NO: 16226903 NR Description: At2g43320/T1O24.6 [Arabidopsis thaliana]
  misc_feature (198)..(290): Homolog of NCBI NO: 18406207 NR Description: expressed protein
  misc_feature (26)..(196): Homolog of NCBI NO: 18406207 NR Description: expressed protein
  misc_feature (161)..(271): Homolog of NCBI NO: 7485012 NR Description: hypothetical protein - Arabidopsis thaliana
  misc_feature (1)..(148): Homolog of NCBI NO: 7485012 NR Description: hypothetical protein - Arabidopsis thaliana
  misc_feature (1)..(290): Homolog of NCBI NO: 21554662 NR Description: unknown [Arabidopsis thaliana]
  misc_feature (1)..(290): Homolog of NCBI NO: 18414120 NR Description: expressed protein
  misc_feature (198)..(290): Homolog of NCBI NO: 38346224 NR Description: OJ990528_30.4 [Oryza sativa (japonica
  misc_feature (26)..(194): Homolog of NCBI NO: 38346224 NR Description: OJ990528_30.4 [Oryza sativa (japonica
  misc_feature (198)..(290): Homolog of NCBI NO: 16226903 NR Description: At2g43320/T1O24.6 [Arabidopsis thaliana]
  misc_feature (26)..(196): Homolog of NCBI NO: 16226903 NR Description: At2g43320/T1O24.6 [Arabidopsis thaliana]
  misc_feature (198)..(290): Homolog of NCBI NO: 18406207 NR Description: expressed protein
  misc_feature (26)..(196): Homolog of NCBI NO: 18406207 NR Description: expressed protein
  misc_feature (161)..(271): Homolog of NCBI NO: 7485012 NR Description: hypothetical protein - Arabidopsis thaliana
  misc_feature (1)..(148): Homolog of NCBI NO: 7485012 NR Description: hypothetical protein - Arabidopsis thaliana
  misc_feature (1)..(290): Homolog of NCBI NO: 21554662 NR Description: unknown [Arabidopsis thaliana]
  misc_feature (1)..(290): Homolog of NCBI NO: 18414120 NR Description: expressed protein
MATKPTFQLFSSSQGSGLGLGFLDSSEPALPPPPPPVEVLSFEVSSSTDFEVDKLTIGEITLLKGRVSTKEVFGLPNSDLVPGVYEGGLKLWEGSIDLVKALEKESQTGNLSFSGKRVLELGCGHALPGIYACLKGSDAVHFQDFNAEVLRCLTIPNLNANLSEKSSSVSVSETEVRFFAGEWSEVHQVLPLVNSDGETNKKGGYDIILMAETIYSISAQKSQYELIKRCLAYPDGAVYMAAKKYYFGVGGGTRQFLSMIEKDGALASTLVSQVTDGSSNVREVWKLSYK

SEQ ID NO: 36066 - DNA, 1289 bp, Arabidopsis thaliana
  misc_feature (1)..(1289): Ceres Seq. ID no. 12321766
  misc_feature: MA Experiment ID: 108577 Result: Up-regulated in Transcription
  misc_feature: MA Experiment 108577 PARAMETER Experiment Name: At_42deg_Heat_cDNA_P Parameter: Temperature (deg C) Value: 42 vs. 22
  misc_feature: MA Experiment 108577 PARAMETER Experiment Name: At_42deg_Heat_cDNA_P Parameter: Timepoint (hr) Value: 6
  misc_feature: MA Experiment 108577 PARAMETER Experiment Name: At_42deg_Heat_cDNA_P Parameter: Tissue Value: Aerial
  misc_feature: MA Experiment ID: 20000794 Result: Down-regulated in Transcription
  misc_feature: MA Experiment 20000794 PARAMETER Experiment Name: At_Petals_P Parameter: Age (day) Value: 23-25 days
  misc_feature: MA Experiment 20000794 PARAMETER Experiment Name: At_Petals_P Parameter: Plant Line Value: WS
  misc_feature: MA Experiment 20000794 PARAMETER Experiment Name: At_Petals_P Parameter: Tissue Value: Petals vs. Whole plant
  misc_feature: MA Experiment ID: 20001557 Result: Up-regulated in Transcription
  misc_feature: MA Experiment 20001557 PARAMETER Experiment Name: At_Drought_Soil_Dry_P Parameter: Age (day) Value: 27
  misc_feature: MA Experiment 20001557 PARAMETER Experiment Name: At_Drought_Soil_Dry_P Parameter: Organism Value: A. thaliana
  misc_feature: MA Experiment 20001557 PARAMETER Experiment Name: At_Drought_Soil_Dry_P Parameter: Plant Line Value: WS
  misc_feature: MA Experiment 20001557 PARAMETER Experiment Name: At_Drought_Soil_Dry_P Parameter: Post Timepoint (hr) Value: 3
  misc_feature: MA Experiment 20001557 PARAMETER Experiment Name: At_Drought_Soil_Dry_P Parameter: Post-Treatment Value: Re-Water vs. No Drought
  misc_feature: MA Experiment 20001557 PARAMETER Experiment Name: At_Drought_Soil_Dry_P Parameter: Timepoint (day) Value: 13
  misc_feature: MA Experiment 20001557 PARAMETER Experiment Name: At_Drought_Soil_Dry_P Parameter: Treatment Value: Drought vs. No Drought
  misc_feature: MA Experiment ID: 20001558 Result: Up-regulated in Transcription
  misc_feature: MA Experiment 20001558 PARAMETER Experiment Name: At_Drought_Soil_Dry_P Parameter: Age (day) Value: 27
  misc_feature: MA Experiment 20001558 PARAMETER Experiment Name: At_Drought_Soil_Dry_P Parameter: Organism Value: A. thaliana
  misc_feature: MA Experiment 20001558 PARAMETER Experiment Name: At_Drought_Soil_Dry_P Parameter: Plant Line Value: WS
  misc_feature: MA Experiment 20001558 PARAMETER Experiment Name: At_Drought_Soil_Dry_P Parameter: Post Timepoint (hr) Value: 6
  misc_feature: MA Experiment 20001558 PARAMETER Experiment Name: At_Drought_Soil_Dry_P Parameter: Post-Treatment Value: Re-Water vs. No Drought
  misc_feature: MA Experiment 20001558 PARAMETER Experiment Name: At_Drought_Soil_Dry_P Parameter: Timepoint (day) Value: 13
  misc_feature: MA Experiment 20001558 PARAMETER Experiment Name: At_Drought_Soil_Dry_P Parameter: Treatment Value: Drought vs. No Drought
  misc_feature: MA Experiment ID: 20001757 Result: Up-regulated in Transcription
  misc_feature: MA Experiment 20001757 PARAMETER Experiment Name: At_50mM_NH4NO3_L-to-H_P Parameter: Timepoint (hr) Value: 6
  misc_feature: MA Experiment 20001757 PARAMETER Experiment Name: At_50mM_NH4NO3_L-to-H_P Parameter: Tissue Value: Leaf
  misc_feature: MA Experiment 20001757 PARAMETER Experiment Name: At_50mM_NH4NO3_L-to-H_P Parameter: Treatment Value: 50mM NH4NO3 vs 100mM Mannitol
gagagttctggtttctgcatctctctccttcttcgtttagactttagccattgaaggtcgcttcgattcgaaatcatggcggccgtaccgagaggcctcctttctcgaatcaatcagtttctatcaatacggtctataactccttcatcctctgaatctcttcctcattgtagtagcttctttctcctccgacgattcagctccgatactgggttgatggacggtggtggatctgatattatcggggctcagacccgaatcattgaggcgaaacaaggtgagatgtctagtagatccaagaggactgggatcatcgccgttaagtgtgggatgactgcgctctgggacaaatggggaaagaggattccgatttctattctttgggttgatgataatatcgtctctcaggttaaaactgttgagaaagaaggcatttttgcgttacagatcggatgtgggcaaaagaaaccgaagcatttgtcaaaagctgtggtggggcatttcagagcacaaggtgtgccgttaaagaggaagttgagggaatttcctgtgactgaagacgctcttcttcctgttggtacttcactcggtgtccgccattttgttccgggacagtacgttgatgtcactgggatcactcgaggaaaaggttttcagggatgcatgaaaagacatggtttcagtggaatgccggcatcacatggtgcttcattgtcccatcgaagcgggggttccacagggcaaagagatgctcctggaaaggtgttcaagggcagaaagatggctgggagaatgggtgcagatcagaggacagtaaagaacgtttgggtctacaagatcgatcctgcgaggaacctcatgtgggtgagaggacaagttcctggtgcagaaggaaactttgtgttcataaaagatgcatggtgcaagaaaccagacatctcaaagcttccgtttccaacttacttagctccagaagatgaagatccatcagaattagaaccgttggttgcagatcttggagaagttgacccatttatgttggcagagtgatgaaaacagcatgatcttgatctttatttgggcttttacaatgattagagaccagaaagaagctgtggaagtgaaggaatcacagagctaaagctttttgcagatgaatttgtctttttcttattttagttgtttggatgtatgatttgaaaacgattaaatagaggaatttaggcttgctcgcatttgttatatcacaatgcttaagagtttgcaataagcaatgaggaaaacacaag

SEQ ID NO: 36067 - protein, 324 aa, Arabidopsis thaliana
  peptide (1)..(324): Ceres Seq. ID no. 12321767
  misc_feature (83)..(279): Pfam Name: Ribosomal protein L3 Pfam Description: Ribosomal protein L3
  misc_feature (76)..(305): Homolog of NCBI NO: 13470551 NR Description: 50S ribosomal protein L3 [Mesorhizobium loti]
  misc_feature (76)..(281): Homolog of NCBI NO: 23502110 NR Description: ribosomal protein L3 [Brucella suis 1330]
  misc_feature (76)..(281): Homolog of NCBI NO: 17987040 NR Description: LSU ribosomal protein L3P [Brucella melitensis]
  misc_feature (76)..(286): Homolog of NCBI NO: 22956505 NR Description: hypothetical protein [Rhodobacter sphaeroides]
  misc_feature (76)..(294): Homolog of NCBI NO: 23014088 NR Description: hypothetical protein [Magnetospirillum
  misc_feature (66)..(294): Homolog of NCBI NO: 16125497 NR Description: ribosomal protein L3 [Caulobacter crescentus
  misc_feature (76)..(297): Homolog of NCBI NO: 23108389 NR Description: hypothetical protein [Novosphingobium
  misc_feature (191)..(324): Homolog of NCBI NO: 21450877 NR Description: putative ribosomal protein L3 [Arabidopsis
  misc_feature (1)..(324): Homolog of NCBI NO: 34902796 NR Description: unnamed protein product [Oryza sativa (japonica
  misc_feature (1)..(324): Homolog of NCBI NO: 18401521 NR Description: ribosomal protein L3; protein id: At3g17465.1
MAAVPRGLLSRINQFLSIRSITPSSSESLPHCSSFFLLRRFSSDTGLMDGGGSDIIGAQTRIIEAKQGEMSSRSKRTGIIAVKCGMTALWDKWGKRIPISILWVDDNIVSQVKTVEKEGIFALQIGCGQKKPKHLSKAVVGHFRAQGVPLKRKLREFPVTEDALLPVGTSLGVRHFVPGQYVDVTGITRGKGFQGCMKRHGFSGMPASHGASLSHRSGGSTGQRDAPGKVFKGRKMAGRMGADQRTVKNVWVYKIDPARNLMWVRGQVPGAEGNFVFIKDAWCKKPDISKLPFPTYLAPEDEDPSELEPLVADLGEVDPFMLAE

SEQ ID NO: 36068 - protein, 277 aa, Arabidopsis thaliana
  peptide (1)..(277): Ceres Seq. ID no. 12321768
  misc_feature (36)..(232): Pfam Name: Ribosomal protein L3 Pfam Description: Ribosomal protein L3
  misc_feature (29)..(258): Homolog of NCBI NO: 13470551 NR Description: 50S ribosomal protein L3 [Mesorhizobium loti]
  misc_feature (29)..(234): Homolog of NCBI NO: 23502110 NR Description: ribosomal protein L3 [Brucella suis 1330]
  misc_feature (29)..(234): Homolog of NCBI NO: 17987040 NR Description: LSU ribosomal protein L3P [Brucella melitensis]
  misc_feature (29)..(239): Homolog of NCBI NO: 22956505 NR Description: hypothetical protein [Rhodobacter sphaeroides]
  misc_feature (29)..(247): Homolog of NCBI NO: 23014088 NR Description: hypothetical protein [Magnetospirillum
  misc_feature (19)..(247): Homolog of NCBI NO: 16125497 NR Description: ribosomal protein L3 [Caulobacter crescentus
  misc_feature (29)..(250): Homolog of NCBI NO: 23108389 NR Description: hypothetical protein [Novosphingobium
  misc_feature (144)..(277): Homolog of NCBI NO: 21450877 NR Description: putative ribosomal protein L3 [Arabidopsis
  misc_feature (1)..(277): Homolog of NCBI NO: 34902796 NR Description: unnamed protein product [Oryza sativa (japonica
  misc_feature (1)..(277): Homolog of NCBI NO: 18401521 NR Description: ribosomal protein L3; protein id: At3g17465.1
MDGGGSDIIGAQTRIIEAKQGEMSSRSKRTGIIAVKCGMTALWDKWGKRIPISILWVDDNIVSQVKTVEKEGIFALQIGCGQKKPKHLSKAVVGHFRAQGVPLKRKLREFPVTEDALLPVGTSLGVRHFVPGQYVDVTGITRGKGFQGCMKRHGFSGMPASHGASLSHRSGGSTGQRDAPGKVFKGRKMAGRMGADQRTVKNVWVYKIDPARNLMWVRGQVPGAEGNFVFIKDAWCKKPDISKLPFPTYLAPEDEDPSELEPLVADLGEVDPFMLAE

SEQ ID NO: 36069 - protein, 255 aa, Arabidopsis thaliana
  peptide (1)..(255): Ceres Seq. ID no. 12321769
  misc_feature (14)..(210): Pfam Name: Ribosomal protein L3 Pfam Description: Ribosomal protein L3
  misc_feature (7)..(236): Homolog of NCBI NO: 13470551 NR Description: 50S ribosomal protein L3 [Mesorhizobium loti]
  misc_feature (7)..(212): Homolog of NCBI NO: 23502110 NR Description: ribosomal protein L3 [Brucella suis 1330]
  misc_feature (7)..(212): Homolog of NCBI NO: 17987040 NR Description: LSU ribosomal protein L3P [Brucella melitensis]
  misc_feature (7)..(217): Homolog of NCBI NO: 22956505 NR Description: hypothetical protein [Rhodobacter sphaeroides]
  misc_feature (7)..(225): Homolog of NCBI NO: 23014088 NR Description: hypothetical protein [Magnetospirillum
  misc_feature (1)..(225): Homolog of NCBI NO: 16125497 NR Description: ribosomal protein L3 [Caulobacter crescentus
  misc_feature (7)..(228): Homolog of NCBI NO: 23108389 NR Description: hypothetical protein [Novosphingobium
  misc_feature (122)..(255): Homolog of NCBI NO: 21450877 NR Description: putative ribosomal protein L3 [Arabidopsis
  misc_feature (1)..(255): Homolog of NCBI NO: 34902796 NR Description: unnamed protein product [Oryza sativa (japonica
  misc_feature (1)..(255): Homolog of NCBI NO: 18401521 NR Description: ribosomal protein L3; protein id: At3g17465.1
MSSRSKRTGIIAVKCGMTALWDKWGKRIPISILWVDDNIVSQVKTVEKEGIFALQIGCGQKKPKHLSKAVVGHFRAQGVPLKRKLREFPVTEDALLPVGTSLGVRHFVPGQYVDVTGITRGKGFQGCMKRHGFSGMPASHGASLSHRSGGSTGQRDAPGKVFKGRKMAGRMGADQRTVKNVWVYKIDPARNLMWVRGQVPGAEGNFVFIKDAWCKKPDISKLPFPTYLAPEDEDPSELEPLVADLGEVDPFMLAE

SEQ ID NO: 36070 - DNA, 964 bp, Arabidopsis thaliana
  misc_feature (1)..(964): Ceres Seq. ID no. 13647095
  misc_feature: MA Experiment ID: 108434 Result: Down-regulated in Transcription
  misc_feature: MA Experiment 108434 PARAMETER Experiment Name: At_Root_Tips_cDNA_P Parameter: Tissue Value: Root Tips
  misc_feature: MA Experiment ID: 108461 Result: Up-regulated in Transcription
  misc_feature: MA Experiment 108461 PARAMETER Experiment Name: At_Germinating_Seeds_cDNA_P Parameter: Age (day) Value: 1 vs. 0
  misc_feature: MA Experiment 108461 PARAMETER Experiment Name: At_Germinating_Seeds_cDNA_P Parameter: Tissue Value: Germinating Seeds
  misc_feature: MA Experiment ID: 108462 Result: Up-regulated in Transcription
  misc_feature: MA Experiment 108462 PARAMETER Experiment Name: At_Germinating_Seeds_cDNA_P Parameter: Age (day) Value: 2 vs. 0
  misc_feature: MA Experiment 108462 PARAMETER Experiment Name: At_Germinating_Seeds_cDNA_P Parameter: Tissue Value: Germinating Seeds
  misc_feature: MA Experiment ID: 108488 Result: Up-regulated in Transcription
  misc_feature: MA Experiment ID: 108594 Result: Down-regulated in Transcription
  misc_feature: MA Experiment 108594 PARAMETER Experiment Name: At_Ler-rhl_Root_cDNA_P Parameter: Plant Line Value: null
  misc_feature: MA Experiment ID: 108595 Result: Down-regulated in Transcription
  misc_feature: MA Experiment 108595 PARAMETER Experiment Name: At_Ler-pi_Ovule_cDNA_P Parameter: Plant Line Value: null
  misc_feature: MA Experiment ID: 20000090 Result: Down-regulated in Transcription
  misc_feature: MA Experiment ID: 20000307 Result: Up-regulated in Transcription
  misc_feature: MA Experiment 20000307 PARAMETER Experiment Name: At_Germinating_Seeds_Sub_P Parameter: Age (hr) Value: 24 vs. 0
  misc_feature: MA Experiment 20000307 PARAMETER Experiment Name: At_Germinating_Seeds_Sub_P Parameter: Organism Value: A. thaliana
  misc_feature: MA Experiment 20000307 PARAMETER Experiment Name: At_Germinating_Seeds_Sub_P Parameter: Plant Line Value: WS
  misc_feature: MA Experiment 20000307 PARAMETER Experiment Name: At_Germinating_Seeds_Sub_P Parameter: Tissue Value: Germinating Seeds
  misc_feature: MA Experiment ID: 20000314 Result: Down-regulated in Transcription
  misc_feature: MA Experiment 20000314 PARAMETER Experiment Name: At_14day_Shoots-Roots_Sub_P Parameter: Age (day) Value: 14
  misc_feature: MA Experiment 20000314 PARAMETER Experiment Name: At_14day_Shoots-Roots_Sub_P Parameter: Organism Value: A. thaliana
  misc_feature: MA Experiment 20000314 PARAMETER Experiment Name: At_14day_Shoots-Roots_Sub_P Parameter: Plant Line Value: WS
  misc_feature: MA Experiment 20000314 PARAMETER Experiment Name: At_14day_Shoots-Roots_Sub_P Parameter: Tissue Value: Roots vs. Whole Plant
  misc_feature: MA Experiment ID: 20000328 Result: Up-regulated in Transcription
  misc_feature: MA Experiment 20000328 PARAMETER Experiment Name: At_42deg_Heat_Sub_P Parameter: Age (day) Value: 14
  misc_feature: MA Experiment 20000328 PARAMETER Experiment Name: At_42deg_Heat_Sub_P Parameter: Organism Value: A. thaliana
  misc_feature: MA Experiment 20000328 PARAMETER Experiment Name: At_42deg_Heat_Sub_P Parameter: Plant Line Value: WS
  misc_feature: MA Experiment 20000328 PARAMETER Experiment Name: At_42deg_Heat_Sub_P Parameter: Temperature (deg C) Value: 42 vs. 22
  misc_feature: MA Experiment 20000328 PARAMETER Experiment Name: At_42deg_Heat_Sub_P Parameter: Timepoint (hr) Value: 6
  misc_feature: MA Experiment 20000328 PARAMETER Experiment Name: At_42deg_Heat_Sub_P Parameter: Tissue Value: Aerial
  misc_feature: MA Experiment ID: 20001807 Result: Up-regulated in Transcription
  misc_feature: MA Experiment 20001807 PARAMETER Experiment Name: At_50mM_NH4NO3_L-to-H_Sub_P Parameter: Timepoint (hr) Value: 6
  misc_feature: MA Experiment 20001807 PARAMETER Experiment Name: At_50mM_NH4NO3_L-to-H_Sub_P Parameter: Tissue Value: Leaf
  misc_feature: MA Experiment 20001807 PARAMETER Experiment Name: At_50mM_NH4NO3_L-to-H_Sub_P Parameter: Treatment Value: 50mM NH4NO3 vs 100mM Mannitol
atcataactcacactctctcttcaatcctttcctttcattgtagttaaacaaagattacgattatggccacatcagctatccaacaatcctccttcgccggccaaacggctctcaagccctccagcgacctcatccaaaaggtgggcgtcttgggcggtggccgtgtgaccatgcgtcgtaccgtcaagtctactccccaaagcatttggtatggaccagaccgtcccaagtacttgggaccattctcggagaacacaccgtcttacttaactggagaataccccggagactacggttgggacaccgctggactctcggctgacccggagacattcgctaagaaccgtgagcttgaagtaatccacagcagatgggctatgttgggtgctctcggatgcacattccctgagattctctccaagaacggtgttaaattcggagaagccgtgtggttcaaggcaggctctcagattttctcagaaggaggtcttgattacctcggaaaccctaacttgatccacgcgcaaagcatcttaagccatttgggctgttcaagttgtgctcatggggttcattgaaggctacagaatcggaggtggaccactcggagaaggacttgacccgctttaycccggaggtgcgttcgacccattgaacttggctgaggatccagaggctttctctgagctgaaggtgaaggagctcaagaacggtcgtcttgccatgttctctatgtttggattctttgtccaagccattgttactggtaaaggycccattgagaacttrtttgatcatttggctgatcctgtggctaacaacgcctggtyttacgctactaactttgtccccggaaagtaawtatcttttawgtatttgcytmataatctctcygctttgtaaactygtgattgtgtaatattgacgtttgatgygaatttggcacttaatgatgtttcttgg

SEQ ID NO: 36071 - protein, 171 aa, Arabidopsis thaliana
  peptide (1)..(171): Ceres Seq. ID no. 15218720
  misc_feature (64)..(159): Pfam Name: Chlorophyll A-B binding protein Pfam Description: Chlorophyll A-B binding protein
  misc_feature (64)..(159): Pfam Name: Chlorophyll A-B binding protein Pfam Description: Chlorophyll A-B binding protein
  misc_feature (1)..(163): Homolog of NCBI NO: 1345698 NR Description: Chlorophyll A-B binding protein 151, chloroplast
  misc_feature (1)..(159): Homolog of NCBI NO: 3560529 NR Description: light harvesting chlorophyll A/B binding protein
  misc_feature (1)..(163): Homolog of NCBI NO: 15232249 NR Description: light harvesting chlorophyll A/B binding protein,
  misc_feature (1)..(159): Homolog of NCBI NO: 15224471 NR Description: light-harvesting chlorophyll a/b binding protein
  misc_feature (1)..(159): Homolog of NCBI NO: 3560529 NR Description: light harvesting chlorophyll A/B binding protein
  misc_feature (1)..(159): Homolog of NCBI NO: 15224471 NR Description: light-harvesting chlorophyll a/b binding protein
  misc_feature (1)..(159): Homolog of NCBI NO: 25299029 NR Description: chlorophyll a/b-binding protein Lhcb2
  misc_feature (1)..(159): Homolog of NCBI NO: 15224465 NR Description: light-harvesting chlorophyll a/b binding protein
  misc_feature (1)..(159): Homolog of NCBI NO: 25299022 NR Description: chlorophyll a/b-binding protein Lhcb2
  misc_feature (1)..(163): Homolog of NCBI NO: 15232249 NR Description: light harvesting chlorophyll A/B binding protein,
  misc_feature (1)..(163): Homolog of NCBI NO: 1345698 NR Description: Chlorophyll A-B binding protein 151, chloroplast
  misc_feature (1)..(159): Homolog of NCBI NO: 25299022 NR Description: chlorophyll a/b-binding protein Lhcb2
  misc_feature (1)..(159): Homolog of NCBI NO: 25299029 NR Description: chlorophyll a/b-binding protein Lhcb2
  misc_feature (1)..(159): Homolog of NCBI NO: 15224465 NR Description: light-harvesting chlorophyll a/b binding protein
MATSAIQQSSFAGQTALKPSSDLIQKVGVLGGGRVTMRRTVKSTPQSIWYGPDRPKYLGPFSENTPSYLTGEYPGDYGWDTAGLSADPETFAKNRELEVIHSRWAMLGALGCTFPEILSKNGVKFGEAVWFKAGSQIFSEGGLDYLGNPNLIHAQSILSHLGCSSCAHGVH

SEQ ID NO: 36072 - protein, 135 aa, Arabidopsis thaliana
  peptide (1)..(135): Ceres Seq. ID no. 15218721
  misc_feature (28)..(123): Pfam Name: Chlorophyll A-B binding protein Pfam Description: Chlorophyll A-B binding protein
  misc_feature (28)..(123): Pfam Name: Chlorophyll A-B binding protein Pfam Description: Chlorophyll A-B binding protein
  misc_feature (1)..(127): Homolog of NCBI NO: 1345698 NR Description: Chlorophyll A-B binding protein 151, chloroplast
  misc_feature (1)..(123): Homolog of NCBI NO: 3560529 NR Description: light harvesting chlorophyll A/B binding protein
  misc_feature (1)..(127): Homolog of NCBI NO: 15232249 NR Description: light harvesting chlorophyll A/B binding protein,
  misc_feature (1)..(123): Homolog of NCBI NO: 15224471 NR Description: light-harvesting chlorophyll a/b binding protein
  misc_feature (1)..(123): Homolog of NCBI NO: 3560529 NR Description: light harvesting chlorophyll A/B binding protein
  misc_feature (1)..(123): Homolog of NCBI NO: 15224471 NR Description: light-harvesting chlorophyll a/b binding protein
  misc_feature (1)..(123): Homolog of NCBI NO: 25299029 NR Description: chlorophyll a/b-binding protein Lhcb2
  misc_feature (1)..(123): Homolog of NCBI NO: 15224465 NR Description: light-harvesting chlorophyll a/b binding protein
  misc_feature (1)..(123): Homolog of NCBI NO: 25299022 NR Description: chlorophyll a/b-binding protein Lhcb2
  misc_feature (1)..(127): Homolog of NCBI NO: 15232249 NR Description: light harvesting chlorophyll A/B binding protein,
  misc_feature (1)..(127): Homolog of NCBI NO: 1345698 NR Description: Chlorophyll A-B binding protein 151, chloroplast
  misc_feature (1)..(123): Homolog of NCBI NO: 25299022 NR Description: chlorophyll a/b-binding protein Lhcb2
  misc_feature (1)..(123): Homolog of NCBI NO: 25299029 NR Description: chlorophyll a/b-binding protein Lhcb2
  misc_feature (1)..(123): Homolog of NCBI NO: 15224465 NR Description: light-harvesting chlorophyll a/b binding protein
MRRTVKSTPQSIWYGPDRPKYLGPFSENTPSYLTGEYPGDYGWDTAGLSADPETFAKNRELEVIHSRWAMLGALGCTFPEILSKNGVKFGEAVWFKAGSQIFSEGGLDYLGNPNLIHAQSILSHLGCSSCAHGVH

SEQ ID NO: 36073 - protein, 98 aa, Arabidopsis thaliana
  peptide (1)..(98): Ceres Seq. ID no. 15218722
  misc_feature (1)..(65): Pfam Name: Chlorophyll A-B binding protein Pfam Description: Chlorophyll A-B binding protein
  misc_feature (1)..(65): Pfam Name: Chlorophyll A-B binding protein Pfam Description: Chlorophyll A-B binding protein
  misc_feature (1)..(98): Homolog of NCBI NO: 1345698 NR Description: Chlorophyll A-B binding protein 151, chloroplast
  misc_feature (1)..(98): Homolog of NCBI NO: 3560529 NR Description: light harvesting chlorophyll A/B binding protein
  misc_feature (1)..(98): Homolog of NCBI NO: 15232249 NR Description: light harvesting chlorophyll A/B binding protein,
  misc_feature (1)..(97): Homolog of NCBI NO: 15224471 NR Description: light-harvesting chlorophyll a/b binding protein
  misc_feature (1)..(98): Homolog of NCBI NO: 3560529 NR Description: light harvesting chlorophyll A/B binding protein
  misc_feature (1)..(97): Homolog of NCBI NO: 15224471 NR Description: light-harvesting chlorophyll a/b binding protein
  misc_feature (1)..(98): Homolog of NCBI NO: 25299029 NR Description: chlorophyll a/b-binding protein Lhcb2
  misc_feature (1)..(98): Homolog of NCBI NO: 15224465 NR Description: light-harvesting chlorophyll a/b binding protein
  misc_feature (1)..(98): Homolog of NCBI NO: 25299022 NR Description: chlorophyll a/b-binding protein Lhcb2
  misc_feature (1)..(98): Homolog of NCBI NO: 15232249 NR Description: light harvesting chlorophyll A/B binding protein,
  misc_feature (1)..(98): Homolog of NCBI NO: 1345698 NR Description: Chlorophyll A-B binding protein 151, chloroplast
  misc_feature (1)..(98): Homolog of NCBI NO: 25299022 NR Description: chlorophyll a/b-binding protein Lhcb2
  misc_feature (1)..(98): Homolog of NCBI NO: 25299029 NR Description: chlorophyll a/b-binding protein Lhcb2
  misc_feature (1)..(98): Homolog of NCBI NO: 15224465 NR Description: light-harvesting chlorophyll a/b binding protein
  misc_feature (22)..(22): Xaa is any aa, unknown or other
  misc_feature (70)..(70): Xaa is any aa, unknown or other
  misc_feature (75)..(75): Xaa is any aa, unknown or other
  misc_feature (89)..(89): Xaa is any aa, unknown or other
MGFIEGYRIGGGPLGEGLDPLXPGGAFDPLNLAEDPEAFSELKVKELKNGRLAMFSMFGFFVQAIVTGKXPIENXFDHLADPVANNAWXYATNFVPGK

SEQ ID NO: 36074 - DNA, 939 bp, Arabidopsis thaliana
  misc_feature (1)..(939): Ceres Seq. ID no. 12333678
  misc_feature: MA Experiment ID: 108433 Result: Up-regulated in Transcription
  misc_feature: MA Experiment 108433 PARAMETER Experiment Name: At_rhl_Mutant2_cDNA_P Parameter: Age (day) Value: 7
  misc_feature: MA Experiment 108433 PARAMETER Experiment Name: At_rhl_Mutant2_cDNA_P Parameter: Organism Value: A. thaliana
  misc_feature: MA Experiment 108433 PARAMETER Experiment Name: At_rhl_Mutant2_cDNA_P Parameter: Plant Line Value: rhl Mutant vs. wt landsburg
  misc_feature: MA Experiment 108433 PARAMETER Experiment Name: At_rhl_Mutant2_cDNA_P Parameter: Tissue Value: Roots
  misc_feature: MA Experiment ID: 108434 Result: Down-regulated in Transcription
  misc_feature: MA Experiment 108434 PARAMETER Experiment Name: At_Root_Tips_cDNA_P Parameter: Tissue Value: Root Tips
  misc_feature: MA Experiment ID: 108461 Result: Up-regulated in Transcription
  misc_feature: MA Experiment 108461 PARAMETER Experiment Name: At_Germinating_Seeds_cDNA_P Parameter: Age (day) Value: 1 vs. 0
  misc_feature: MA Experiment 108461 PARAMETER Experiment Name: At_Germinating_Seeds_cDNA_P Parameter: Tissue Value: Germinating Seeds
  misc_feature: MA Experiment ID: 108462 Result: Up-regulated in Transcription
  misc_feature: MA Experiment 108462 PARAMETER Experiment Name: At_Germinating_Seeds_cDNA_P Parameter: Age (day) Value: 2 vs. 0
  misc_feature: MA Experiment 108462 PARAMETER Experiment Name: At_Germinating_Seeds_cDNA_P Parameter: Tissue Value: Germinating Seeds
  misc_feature: MA Experiment ID: 108463 Result: Up-regulated in Transcription
  misc_feature: MA Experiment 108463 PARAMETER Experiment Name: At_Germinating_Seeds_cDNA_P Parameter: Age (day) Value: 3 vs. 0
  misc_feature: MA Experiment 108463 PARAMETER Experiment Name: At_Germinating_Seeds_cDNA_P Parameter: Tissue Value: Germinating Seeds
  misc_feature: MA Experiment ID: 108464 Result: Up-regulated in Transcription
  misc_feature: MA Experiment 108464 PARAMETER Experiment Name: At_Germinating_Seeds_cDNA_P Parameter: Age (day) Value: 4 vs. 0
  misc_feature: MA Experiment 108464 PARAMETER Experiment Name: At_Germinating_Seeds_cDNA_P Parameter: Tissue Value: Germinating Seeds
  misc_feature: MA Experiment ID: 108488 Result: Up-regulated in Transcription
  misc_feature: MA Experiment ID: 108561 Result: Down-regulated in Transcription
  misc_feature: MA Experiment 108561 PARAMETER Experiment Name: At_100uM_ABA_cDNA_P Parameter: Timepoint (hr) Value: 6
  misc_feature: MA Experiment 108561 PARAMETER Experiment Name: At_100uM_ABA_cDNA_P Parameter: Tissue Value: Aerial
  misc_feature: MA Experiment 108561 PARAMETER Experiment Name: At_100uM_ABA_cDNA_P Parameter: Treatment Value: 100uM ABA vs. No Treatment
  misc_feature: MA Experiment ID: 108572 Result: Down-regulated in Transcription
  misc_feature: MA Experiment 108572 PARAMETER Experiment Name: At_Drought_cDNA_P Parameter: Timepoint (hr) Value: 1
  misc_feature: MA Experiment 108572 PARAMETER Experiment Name: At_Drought_cDNA_P Parameter: Tissue Value: Aerial
  misc_feature: MA Experiment 108572 PARAMETER Experiment Name: At_Drought_cDNA_P Parameter: Treatment Value: Drought vs. No Drought
  misc_feature: MA Experiment ID: 108573 Result: Down-regulated in Transcription
  misc_feature: MA Experiment 108573 PARAMETER Experiment Name: At_Drought_cDNA_P Parameter: Timepoint (hr) Value: 6
  misc_feature: MA Experiment 108573 PARAMETER Experiment Name: At_Drought_cDNA_P Parameter: Tissue Value: Aerial
  misc_feature: MA Experiment 108573 PARAMETER Experiment Name: At_Drought_cDNA_P Parameter: Treatment Value: Drought vs. No Drought
  misc_feature: MA Experiment ID: 108595 Result: Down-regulated in Transcription
  misc_feature: MA Experiment 108595 PARAMETER Experiment Name: At_Ler-pi_Ovule_cDNA_P Parameter: Plant Line Value: null
  misc_feature: MA Experiment ID: 108605 Result: Down-regulated in Transcription
  misc_feature: MA Experiment 108605 PARAMETER Experiment Name: At_100uM_ABA_cDNA_P Parameter: Timepoint (hr) Value: 6
  misc_feature: MA Experiment 108605 PARAMETER Experiment Name: At_100uM_ABA_cDNA_P Parameter: Tissue Value: Aerial
  misc_feature: MA Experiment 108605 PARAMETER Experiment Name: At_100uM_ABA_cDNA_P Parameter: Treatment Value: 100uM ABA vs. No Treatment
  misc_feature: MA Experiment ID: 108607 Result: Down-regulated in Transcription
  misc_feature: MA Experiment 108607 PARAMETER Experiment Name: At_100uM_ABA_cDNA_P Parameter: Timepoint (hr) Value: 4
  misc_feature: MA Experiment 108607 PARAMETER Experiment Name: At_100uM_ABA_cDNA_P Parameter: Tissue Value: Aerial
  misc_feature: MA Experiment 108607 PARAMETER Experiment Name: At_100uM_ABA_cDNA_P Parameter: Treatment Value: 100uM ABA vs. No Treatment
  misc_feature: MA Experiment ID: 108608 Result: Down-regulated in Transcription
  misc_feature: MA Experiment 108608 PARAMETER Experiment Name: At_100uM_ABA_cDNA_P Parameter: Timepoint (hr) Value: 1
  misc_feature: MA Experiment 108608 PARAMETER Experiment Name: At_100uM_ABA_cDNA_P Parameter: Tissue Value: Aerial
  misc_feature: MA Experiment 108608 PARAMETER Experiment Name: At_100uM_ABA_cDNA_P Parameter: Treatment Value: 100uM ABA vs. No Treatment
  misc_feature: MA Experiment ID: 108609 Result: Down-regulated in Transcription
  misc_feature: MA Experiment 108609 PARAMETER Experiment Name: At_100uM_ABA_cDNA_P Parameter: Timepoint (hr) Value: 24
  misc_feature: MA Experiment 108609 PARAMETER Experiment Name: At_100uM_ABA_cDNA_P Parameter: Tissue Value: Aerial
  misc_feature: MA Experiment 108609 PARAMETER Experiment Name: At_100uM_ABA_cDNA_P Parameter: Treatment Value: 100uM ABA vs. No Treatment
  misc_feature: MA Experiment ID: 20000069 Result: Down-regulated in Transcription
  misc_feature: MA Experiment 20000069 PARAMETER Experiment Name: At_100uM_ABA_Mutants_cDNA_P Parameter: Plant Line Value: CS23
  misc_feature: MA Experiment 20000069 PARAMETER Experiment Name: At_100uM_ABA_Mutants_cDNA_P Parameter: Timepoint (hr) Value: 6
  misc_feature: MA Experiment 20000069 PARAMETER Experiment Name: At_100uM_ABA_Mutants_cDNA_P Parameter: Tissue Value: Aerial
  misc_feature: MA Experiment 20000069 PARAMETER Experiment Name: At_100uM_ABA_Mutants_cDNA_P Parameter: Treatment Value: 100uM ABA vs. No Treatment
  misc_feature: MA Experiment ID: 20000070 Result: Down-regulated in Transcription
  misc_feature: MA Experiment 20000070 PARAMETER Experiment Name: At_100uM_ABA_Mutants_cDNA_P Parameter: Plant Line Value: CS24
  misc_feature: MA Experiment 20000070 PARAMETER Experiment Name: At_100uM_ABA_Mutants_cDNA_P Parameter: Timepoint (hr) Value: 6
  misc_feature: MA Experiment 20000070 PARAMETER Experiment Name: At_100uM_ABA_Mutants_cDNA_P Parameter: Tissue Value: Aerial
  misc_feature: MA Experiment 20000070 PARAMETER Experiment Name: At_100uM_ABA_Mutants_cDNA_P Parameter: Treatment Value: 100uM ABA vs. No Treatment
  misc_feature: MA Experiment ID: 20000071 Result: Down-regulated in Transcription
  misc_feature: MA Experiment 20000071 PARAMETER Experiment Name: At_100uM_ABA_Mutants_cDNA_P Parameter: Plant Line Value: CS8104
  misc_feature: MA Experiment 20000071 PARAMETER Experiment Name: At_100uM_ABA_Mutants_cDNA_P Parameter: Timepoint (hr) Value: 6
  misc_feature: MA Experiment 20000071 PARAMETER Experiment Name: At_100uM_ABA_Mutants_cDNA_P Parameter: Tissue Value: Aerial
  misc_feature: MA Experiment 20000071 PARAMETER Experiment Name: At_100uM_ABA_Mutants_cDNA_P Parameter: Treatment Value: 100uM ABA vs. No Treatment
  misc_feature: MA Experiment ID: 20000072 Result: Down-regulated in Transcription
  misc_feature: MA Experiment 20000072 PARAMETER Experiment Name: At_100uM_ABA_Mutants_cDNA_P Parameter: Plant Line Value: CS8105
  misc_feature: MA Experiment 20000072 PARAMETER Experiment Name: At_100uM_ABA_Mutants_cDNA_P Parameter: Timepoint (hr) Value: 6
  misc_feature: MA Experiment 20000072 PARAMETER Experiment Name: At_100uM_ABA_Mutants_cDNA_P Parameter: Tissue Value: Aerial
  misc_feature: MA Experiment 20000072 PARAMETER Experiment Name: At_100uM_ABA_Mutants_cDNA_P Parameter: Treatment Value: 100uM ABA vs. No Treatment
  misc_feature: MA Experiment ID: 20000086 Result: Down-regulated in Transcription
  misc_feature: MA Experiment 20000086 PARAMETER Experiment Name: At_100uM_ABA_Mutants_cDNA_P Parameter: Plant Line Value: CS22
  misc_feature: MA Experiment 20000086 PARAMETER Experiment Name: At_100uM_ABA_Mutants_cDNA_P Parameter: Timepoint (hr) Value: 6
  misc_feature: MA Experiment 20000086 PARAMETER Experiment Name: At_100uM_ABA_Mutants_cDNA_P Parameter: Tissue Value: Aerial
  misc_feature: MA Experiment 20000086 PARAMETER Experiment Name: At_100uM_ABA_Mutants_cDNA_P Parameter: Treatment Value: 100uM ABA vs. No Treatment
  misc_feature: MA Experiment ID: 20000087 Result: Down-regulated in Transcription
  misc_feature: MA Experiment 20000087 PARAMETER Experiment Name: At_100uM_ABA_Mutants_cDNA_P Parameter: Plant Line Value: WS
  misc_feature: MA Experiment 20000087 PARAMETER Experiment Name: At_100uM_ABA_Mutants_cDNA_P Parameter: Timepoint (hr) Value: 6
  misc_feature: MA Experiment 20000087 PARAMETER Experiment Name: At_100uM_ABA_Mutants_cDNA_P Parameter: Tissue Value: Aerial
  misc_feature: MA Experiment 20000087 PARAMETER Experiment Name: At_100uM_ABA_Mutants_cDNA_P Parameter: Treatment Value: 100uM ABA vs. No Treatment
  misc_feature: MA Experiment ID: 20000088 Result: Down-regulated in Transcription
  misc_feature: MA Experiment 20000088 PARAMETER Experiment Name: At_100uM_ABA_Mutants_cDNA_P Parameter: Plant Line Value: Landsberg
  misc_feature: MA Experiment 20000088 PARAMETER Experiment Name: At_100uM_ABA_Mutants_cDNA_P Parameter: Timepoint (hr) Value: 6
  misc_feature: MA Experiment 20000088 PARAMETER Experiment Name: At_100uM_ABA_Mutants_cDNA_P Parameter: Tissue Value: Aerial
  misc_feature: MA Experiment 20000088 PARAMETER Experiment Name: At_100uM_ABA_Mutants_cDNA_P Parameter: Treatment Value: 100uM ABA vs. No Treatment
  misc_feature: MA Experiment ID: 20000117 Result: Down-regulated in Transcription
  misc_feature: MA Experiment 20000117 PARAMETER Experiment Name: At_100uM_ABA_Mutants_cDNA_P Parameter: Plant Line Value: Columbia
  misc_feature: MA Experiment 20000117 PARAMETER Experiment Name: At_100uM_ABA_Mutants_cDNA_P Parameter: Timepoint (hr) Value: 6
  misc_feature: MA Experiment 20000117 PARAMETER Experiment Name: At_100uM_ABA_Mutants_cDNA_P Parameter: Tissue Value: Aerial
  misc_feature: MA Experiment 20000117 PARAMETER Experiment Name: At_100uM_ABA_Mutants_cDNA_P Parameter: Treatment Value: 100uM ABA vs. No Treatment
  misc_feature: MA Experiment ID: 20000166 Result: Down-regulated in Transcription
  misc_feature: MA Experiment 20000166 PARAMETER Experiment Name: At_100uM_ABA_P Parameter: Age (day) Value: 14
  misc_feature: MA Experiment 20000166 PARAMETER Experiment Name: At_100uM_ABA_P Parameter: Organism Value: A. thaliana
  misc_feature: MA Experiment 20000166 PARAMETER Experiment Name: At_100uM_ABA_P Parameter: Plant Line Value: WS
  misc_feature: MA Experiment 20000166 PARAMETER Experiment Name: At_100uM_ABA_P Parameter: Timepoint (hr) Value: 1
  misc_feature: MA Experiment 20000166 PARAMETER Experiment Name: At_100uM_ABA_P Parameter: Tissue Value: Aerial
  misc_feature: MA Experiment 20000166 PARAMETER Experiment Name: At_100uM_ABA_P Parameter: Treatment Value: 100uM ABA vs. No Treatment
  misc_feature: MA Experiment ID: 20000169 Result: Down-regulated in Transcription
  misc_feature: MA Experiment 20000169 PARAMETER Experiment Name: At_100uM_ABA_P Parameter: Age (day) Value: 14
  misc_feature: MA Experiment 20000169 PARAMETER Experiment Name: At_100uM_ABA_P Parameter: Organism Value: A. thaliana
  misc_feature: MA Experiment 20000169 PARAMETER Experiment Name: At_100uM_ABA_P Parameter: Plant Line Value: WS
  misc_feature: MA Experiment 20000169 PARAMETER Experiment Name: At_100uM_ABA_P Parameter: Timepoint (hr) Value: 6
  misc_feature: MA Experiment 20000169 PARAMETER Experiment Name: At_100uM_ABA_P Parameter: Tissue Value: Aerial
  misc_feature: MA Experiment 20000169 PARAMETER Experiment Name: At_100uM_ABA_P Parameter: Treatment Value: 100uM ABA vs. No Treatment
  misc_feature: MA Experiment ID: 20000179 Result: Up-regulated in Transcription
  misc_feature: MA Experiment 20000179 PARAMETER Experiment Name: At_Germinating_Seeds_P Parameter: Age (hr) Value: 6 vs. 0
  misc_feature: MA Experiment 20000179 PARAMETER Experiment Name: At_Germinating_Seeds_P Parameter: Tissue Value: Germinating Seeds
  misc_feature: MA Experiment ID: 20000180 Result: Up-regulated in Transcription
  misc_feature: MA Experiment 20000180 PARAMETER Experiment Name: At_Germinating_Seeds_P Parameter: Age (hr) Value: 24 vs. 0
  misc_feature: MA Experiment 20000180 PARAMETER Experiment Name: At_Germinating_Seeds_P Parameter: Tissue Value: Germinating Seeds
  misc_feature: MA Experiment ID: 20000185 Result: Down-regulated in Transcription
  misc_feature: MA Experiment 20000185 PARAMETER Experiment Name: At_Roots__P Parameter: Age (day) Value: 7 vs. 21
  misc_feature: MA Experiment 20000185 PARAMETER Experiment Name: At_Roots__P Parameter: Organism Value: A. thaliana
  misc_feature: MA Experiment 20000185 PARAMETER Experiment Name: At_Roots__P Parameter: Tissue Value: Roots vs. Whole Plant
  misc_feature: MA Experiment ID: 20000234 Result: Down-regulated in Transcription
  misc_feature: MA Experiment 20000234 PARAMETER Experiment Name: At_Siliques_P Parameter: Age (day) Value: 21
  misc_feature: MA Experiment 20000234 PARAMETER Experiment Name: At_Siliques_P Parameter: Organism Value: A. thaliana
  misc_feature: MA Experiment 20000234 PARAMETER Experiment Name: At_Siliques_P Parameter: Plant Line Value: WS
  misc_feature: MA Experiment 20000234 PARAMETER Experiment Name: At_Siliques_P Parameter: Tissue Value: Less Than 5mm Siliques vs. Whole Plant
  misc_feature: MA Experiment ID: 20000264 Result: Down-regulated in Transcription
  misc_feature: MA Experiment 20000264 PARAMETER Experiment Name: At_Open_Flower_P Parameter: Age (day) Value: 21
  misc_feature: MA Experiment 20000264 PARAMETER Experiment Name: At_Open_Flower_P Parameter: Plant Line Value: WS
  misc_feature: MA Experiment 20000264 PARAMETER Experiment Name: At_Open_Flower_P Parameter: Tissue Value: Open Flower vs. Whole Plant
  misc_feature: MA Experiment ID: 20000265 Result: Down-regulated in Transcription
  misc_feature: MA Experiment 20000265 PARAMETER Experiment Name: At_Open_Flower_P Parameter: Age (day) Value: 21
  misc_feature: MA Experiment 20000265 PARAMETER Experiment Name: At_Open_Flower_P Parameter: Plant Line Value: WS
  misc_feature: MA Experiment 20000265 PARAMETER Experiment Name: At_Open_Flower_P Parameter: Tissue Value: Closed Flower vs. Whole Plant
  misc_feature: MA Experiment ID: 20000286 Result: Down-regulated in Transcription
  misc_feature: MA Experiment 20000286 PARAMETER Experiment Name: At_Open_Flower_P Parameter: Age (day) Value: 21
  misc_feature: MA Experiment 20000286 PARAMETER Experiment Name: At_Open_Flower_P Parameter: Plant Line Value: WS
  misc_feature: MA Experiment 20000286 PARAMETER Experiment Name: At_Open_Flower_P Parameter: Tissue Value: Half Open vs. Whole Plant
  misc_feature: MA Experiment ID: 20000436 Result: Down-regulated in Transcription
  misc_feature: MA Experiment 20000436 PARAMETER Experiment Name: At_Drought_P Parameter: Age (day) Value: 7
  misc_feature: MA Experiment 20000436 PARAMETER Experiment Name: At_Drought_P Parameter: Organism Value: A. thaliana
  misc_feature: MA Experiment 20000436 PARAMETER Experiment Name: At_Drought_P Parameter: Plant Line Value: WS
  misc_feature: MA Experiment 20000436 PARAMETER Experiment Name: At_Drought_P Parameter: Timepoint (hr) Value: 12
  misc_feature: MA Experiment 20000436 PARAMETER Experiment Name: At_Drought_P Parameter: Tissue Value: Whole Plant
  misc_feature: MA Experiment 20000436 PARAMETER Experiment Name: At_Drought_P Parameter: Treatment Value: Drought vs. No Drought
  misc_feature: MA Experiment ID: 20000437 Result: Down-regulated in Transcription
  misc_feature: MA Experiment 20000437 PARAMETER Experiment Name: At_Drought_P Parameter: Age (day) Value: 8
  misc_feature: MA Experiment 20000437 PARAMETER Experiment Name: At_Drought_P Parameter: Organism Value: A. thaliana
  misc_feature: MA Experiment 20000437 PARAMETER Experiment Name: At_Drought_P Parameter: Plant Line Value: WS
  misc_feature: MA Experiment 20000437 PARAMETER Experiment Name: At_Drought_P Parameter: Timepoint (hr) Value: 24
  misc_feature: MA Experiment 20000437 PARAMETER Experiment Name: At_Drought_P Parameter: Tissue Value: Whole Plant
  misc_feature: MA Experiment 20000437 PARAMETER Experiment Name: At_Drought_P Parameter: Treatment Value: Drought vs. No Drought
  misc_feature: MA Experiment ID: 20000439 Result: Down-regulated in Transcription
  misc_feature: MA Experiment 20000439 PARAMETER Experiment Name: At_Roots__P Parameter: Age (day) Value: 14 vs. 21
  misc_feature: MA Experiment 20000439 PARAMETER Experiment Name: At_Roots__P Parameter: Organism Value: A. thaliana
  misc_feature: MA Experiment 20000439 PARAMETER Experiment Name: At_Roots__P Parameter: Tissue Value: Roots vs. Whole Plant
  misc_feature: MA Experiment ID: 20000441 Result: Up-regulated in Transcription
  misc_feature: MA Experiment 20000441 PARAMETER Experiment Name: At_1uM_BR-BRZ__P Parameter: Tissue Value: Shoot Apices
  misc_feature: MA Experiment 20000441 PARAMETER Experiment Name: At_1uM_BR-BRZ__P Parameter: Treatment Value: 1uM BR vs. No Treatment
  misc_feature: MA Experiment ID: 20000443 Result: Up-regulated in Transcription
  misc_feature: MA Experiment 20000443 PARAMETER Experiment Name: At_1uM_BR-BRZ__P Parameter: Tissue Value: Shoot Apices
  misc_feature: MA Experiment 20000443 PARAMETER Experiment Name: At_1uM_BR-BRZ__P Parameter: Treatment Value: 1uM BRZ vs. No Treatment
  misc_feature: MA Experiment ID: 20000453 Result: Down-regulated in Transcription
  misc_feature: MA Experiment 20000453 PARAMETER Experiment Name: At_100uM_ABA_P Parameter: Age (day) Value: 15
  misc_feature: MA Experiment 20000453 PARAMETER Experiment Name: At_100uM_ABA_P Parameter: Organism Value: A. thaliana
  misc_feature: MA Experiment 20000453 PARAMETER Experiment Name: At_100uM_ABA_P Parameter: Plant Line Value: WS
  misc_feature: MA Experiment 20000453 PARAMETER Experiment Name: At_100uM_ABA_P Parameter: Timepoint (hr) Value: 24
  misc_feature: MA Experiment 20000453 PARAMETER Experiment Name: At_100uM_ABA_P Parameter: Tissue Value: Aerial
  misc_feature: MA Experiment 20000453 PARAMETER Experiment Name: At_100uM_ABA_P Parameter: Treatment Value: 100uM ABA vs. No Treatment
  misc_feature: MA Experiment ID: 20000495 Result: Down-regulated in Transcription
  misc_feature: MA Experiment 20000495 PARAMETER Experiment Name: At_Guard_Cells_P Parameter: Harvest Date Value: 8/2/2002
  misc_feature: MA Experiment 20000495 PARAMETER Experiment Name: At_Guard_Cells_P Parameter: Organism Value: A. thaliana
  misc_feature: MA Experiment 20000495 PARAMETER Experiment Name: At_Guard_Cells_P Parameter: Tissue Value: Guard Cells vs. Leaves
  misc_feature: MA Experiment ID: 20000576 Result: Down-regulated in Transcription
  misc_feature: MA Experiment 20000576 PARAMETER Experiment Name: At_100uM_ABA_Mutants__P Parameter: Organism Value: A. thaliana
  misc_feature: MA Experiment 20000576 PARAMETER Experiment Name: At_100uM_ABA_Mutants__P Parameter: Plant Line Value: CS23
  misc_feature: MA Experiment 20000576 PARAMETER Experiment Name: At_100uM_ABA_Mutants__P Parameter: Timepoint (hr) Value: 6
  misc_feature: MA Experiment 20000576 PARAMETER Experiment Name: At_100uM_ABA_Mutants__P Parameter: Tissue Value: Whole Plant
  misc_feature: MA Experiment 20000576 PARAMETER Experiment Name: At_100uM_ABA_Mutants__P Parameter: Treatment Value: 1uM ABA vs. No Treatment
  misc_feature: MA Experiment ID: 20000794 Result: Down-regulated in Transcription
  misc_feature: MA Experiment 20000794 PARAMETER Experiment Name: At_Petals_P Parameter: Age (day) Value: 23-25 days
  misc_feature: MA Experiment 20000794 PARAMETER Experiment Name: At_Petals_P Parameter: Plant Line Value: WS
  misc_feature: MA Experiment 20000794 PARAMETER Experiment Name: At_Petals_P Parameter: Tissue Value: Petals vs. Whole plant
  misc_feature: MA Experiment ID: 20001248 Result: Down-regulated in Transcription
  misc_feature: MA Experiment 20001248 PARAMETER Experiment Name: At_Far-red-induction_P Parameter: Age (day) Value: 7
  misc_feature: MA Experiment 20001248 PARAMETER Experiment Name: At_Far-red-induction_P Parameter: Light Value: Far-red vs. White
  misc_feature: MA Experiment 20001248 PARAMETER Experiment Name: At_Far-red-induction_P Parameter: Organism Value: A. thaliana
  misc_feature: MA Experiment 20001248 PARAMETER Experiment Name: At_Far-red-induction_P Parameter: Plant Line Value: Columbia
  misc_feature: MA Experiment 20001248 PARAMETER Experiment Name: At_Far-red-induction_P Parameter: Timepoint (hr) Value: 4
  misc_feature: MA Experiment 20001248 PARAMETER Experiment Name: At_Far-red-induction_P Parameter: Tissue Value: Whole Plant
  misc_feature: MA Experiment ID: 20001450 Result: Down-regulated in Transcription
  misc_feature: MA Experiment 20001450 PARAMETER Experiment Name: At_Far-red-induction_P Parameter: Age (day) Value: 7
  misc_feature: MA Experiment 20001450 PARAMETER Experiment Name: At_Far-red-induction_P Parameter: Light Value: Far-red vs. White
  misc_feature: MA Experiment 20001450 PARAMETER Experiment Name: At_Far-red-induction_P Parameter: Organism Value: A. thaliana
  misc_feature: MA Experiment 20001450 PARAMETER Experiment Name: At_Far-red-induction_P Parameter: Plant Line Value: Columbia
  misc_feature: MA Experiment 20001450 PARAMETER Experiment Name: At_Far-red-induction_P Parameter: Timepoint (hr) Value: 8
  misc_feature: MA Experiment 20001450 PARAMETER Experiment Name: At_Far-red-induction_P Parameter: Tissue Value: Whole Plant
  misc_feature: MA Experiment ID: 20001451 Result: Down-regulated in Transcription
  misc_feature: MA Experiment 20001451 PARAMETER Experiment Name: At_Far-red-induction_P Parameter: Age (day) Value: 7
  misc_feature: MA Experiment 20001451 PARAMETER Experiment Name: At_Far-red-induction_P Parameter: Light Value: Far-red vs. White
  misc_feature: MA Experiment 20001451 PARAMETER Experiment Name: At_Far-red-induction_P Parameter: Organism Value: A. thaliana
  misc_feature: MA Experiment 20001451 PARAMETER Experiment Name: At_Far-red-induction_P Parameter: Plant Line Value: Columbia
  misc_feature: MA Experiment 20001451 PARAMETER Experiment Name: At_Far-red-induction_P Parameter: Timepoint (hr) Value: 24
  misc_feature: MA Experiment 20001451 PARAMETER Experiment Name: At_Far-red-induction_P Parameter: Tissue Value: Whole Plant
  misc_feature: MA Experiment ID: 20001555 Result: Down-regulated in Transcription
  misc_feature: MA Experiment 20001555 PARAMETER Experiment Name: At_Drought_Soil_Dry_P Parameter: Age (day) Value: 24
  misc_feature: MA Experiment 20001555 PARAMETER Experiment Name: At_Drought_Soil_Dry_P Parameter: Organism Value: A. thaliana
  misc_feature: MA Experiment 20001555 PARAMETER Experiment Name: At_Drought_Soil_Dry_P Parameter: Plant Line Value: WS
  misc_feature: MA Experiment 20001555 PARAMETER Experiment Name: At_Drought_Soil_Dry_P Parameter: Post Timepoint (hr) Value: None
  misc_feature: MA Experiment 20001555 PARAMETER Experiment Name: At_Drought_Soil_Dry_P Parameter: Post-Treatment Value: None
  misc_feature: MA Experiment 20001555 PARAMETER Experiment Name: At_Drought_Soil_Dry_P Parameter: Timepoint (day) Value: 10
  misc_feature: MA Experiment 20001555 PARAMETER Experiment Name: At_Drought_Soil_Dry_P Parameter: Treatment Value: Drought vs. No Drought
  misc_feature: MA Experiment ID: 20001556 Result: Down-regulated in Transcription
  misc_feature: MA Experiment 20001556 PARAMETER Experiment Name: At_Drought_Soil_Dry_P Parameter: Age (day) Value: 26
  misc_feature: MA Experiment 20001556 PARAMETER Experiment Name: At_Drought_Soil_Dry_P Parameter: Organism Value: A. thaliana
  misc_feature: MA Experiment 20001556 PARAMETER Experiment Name: At_Drought_Soil_Dry_P Parameter: Plant Line Value: WS
  misc_feature: MA Experiment 20001556 PARAMETER Experiment Name: At_Drought_Soil_Dry_P Parameter: Post Timepoint (hr) Value: None
  misc_feature: MA Experiment 20001556 PARAMETER Experiment Name: At_Drought_Soil_Dry_P Parameter: Post-Treatment Value: None
  misc_feature: MA Experiment 20001556 PARAMETER Experiment Name: At_Drought_Soil_Dry_P Parameter: Timepoint (day) Value: 12
  misc_feature: MA Experiment 20001556 PARAMETER Experiment Name: At_Drought_Soil_Dry_P Parameter: Treatment Value: Drought vs. No Drought
  misc_feature: MA Experiment ID: 20001559 Result: Down-regulated in Transcription
  misc_feature: MA Experiment 20001559 PARAMETER Experiment Name: At_Drought_Soil_Dry_P Parameter: Age (day) Value: 28
  misc_feature: MA Experiment 20001559 PARAMETER Experiment Name: At_Drought_Soil_Dry_P Parameter: Organism Value: A. thaliana
  misc_feature: MA Experiment 20001559 PARAMETER Experiment Name: At_Drought_Soil_Dry_P Parameter: Plant Line Value: WS
  misc_feature: MA Experiment 20001559 PARAMETER Experiment Name: At_Drought_Soil_Dry_P Parameter: Post Timepoint (hr) Value: 29
  misc_feature: MA Experiment 20001559 PARAMETER Experiment Name: At_Drought_Soil_Dry_P Parameter: Post-Treatment Value: Re-Water vs. No Drought
  misc_feature: MA Experiment 20001559 PARAMETER Experiment Name: At_Drought_Soil_Dry_P Parameter: Timepoint (day) Value: 14
  misc_feature: MA Experiment 20001559 PARAMETER Experiment Name: At_Drought_Soil_Dry_P Parameter: Treatment Value: Drought vs. No Drought
  misc_feature: MA Experiment ID: 20001560 Result: Down-regulated in Transcription
  misc_feature: MA Experiment 20001560 PARAMETER Experiment Name: At_Drought_Soil_Dry_P Parameter: Age (day) Value: 28
  misc_feature: MA Experiment 20001560 PARAMETER Experiment Name: At_Drought_Soil_Dry_P Parameter: Organism Value: A. thaliana
  misc_feature: MA Experiment 20001560 PARAMETER Experiment Name: At_Drought_Soil_Dry_P Parameter: Plant Line Value: WS
  misc_feature: MA Experiment 20001560 PARAMETER Experiment Name: At_Drought_Soil_Dry_P Parameter: Post Timepoint (hr) Value: None
  misc_feature: MA Experiment 20001560 PARAMETER Experiment Name: At_Drought_Soil_Dry_P Parameter: Post-Treatment Value: None
  misc_feature: MA Experiment 20001560 PARAMETER Experiment Name: At_Drought_Soil_Dry_P Parameter: Timepoint (day) Value: 14
  misc_feature: MA Experiment 20001560 PARAMETER Experiment Name: At_Drought_Soil_Dry_P Parameter: Treatment Value: Drought vs. No Drought
  misc_feature: MA Experiment ID: 20001757 Result: Up-regulated in Transcription
  misc_feature: MA Experiment 20001757 PARAMETER Experiment Name: At_50mM_NH4NO3_L-to-H_P Parameter: Timepoint (hr) Value: 6
  misc_feature: MA Experiment 20001757 PARAMETER Experiment Name: At_50mM_NH4NO3_L-to-H_P Parameter: Tissue Value: Leaf
  misc_feature: MA Experiment 20001757 PARAMETER Experiment Name: At_50mM_NH4NO3_L-to-H_P Parameter: Treatment Value: 50mM NH4NO3 vs 100mM Mannitol
  misc_feature: MA Experiment ID: 20001904 Result: Down-regulated in Transcription
  misc_feature: MA Experiment 20001904 PARAMETER Experiment Name: At_Drought_Reproduction_P Parameter: Age (day) Value: 37
  misc_feature: MA Experiment 20001904 PARAMETER Experiment Name: At_Drought_Reproduction_P Parameter: Organism Value: A. thaliana
  misc_feature: MA Experiment 20001904 PARAMETER Experiment Name: At_Drought_Reproduction_P Parameter: Plant Line Value: WS
  misc_feature: MA Experiment 20001904 PARAMETER Experiment Name: At_Drought_Reproduction_P Parameter: Timepoint (day) Value: 7
  misc_feature: MA Experiment 20001904 PARAMETER Experiment Name: At_Drought_Reproduction_P Parameter: Tissue Value: Rosettes
  misc_feature: MA Experiment 20001904 PARAMETER Experiment Name: At_Drought_Reproduction_P Parameter: Treatment Value: Drought vs. No Drought
  misc_feature: MA Experiment ID: 20001905 Result: Down-regulated in Transcription
  misc_feature: MA Experiment 20001905 PARAMETER Experiment Name: At_Drought_Reproduction_P Parameter: Age (day) Value: 40
  misc_feature: MA Experiment 20001905 PARAMETER Experiment Name: At_Drought_Reproduction_P Parameter: Organism Value: A. thaliana
  misc_feature: MA Experiment 20001905 PARAMETER Experiment Name: At_Drought_Reproduction_P Parameter: Plant Line Value: WS
  misc_feature: MA Experiment 20001905 PARAMETER Experiment Name: At_Drought_Reproduction_P Parameter: Timepoint (day) Value: 10
  misc_feature: MA Experiment 20001905 PARAMETER Experiment Name: At_Drought_Reproduction_P Parameter: Tissue Value: Rosettes
  misc_feature: MA Experiment 20001905 PARAMETER Experiment Name: At_Drought_Reproduction_P Parameter: Treatment Value: Drought vs. No Drought
  misc_feature: MA Experiment ID: 20001906 Result: Down-regulated in Transcription
  misc_feature: MA Experiment 20001906 PARAMETER Experiment Name: At_Drought_Reproduction_P Parameter: Age (day) Value: 35
  misc_feature: MA Experiment 20001906 PARAMETER Experiment Name: At_Drought_Reproduction_P Parameter: Organism Value: A. thaliana
  misc_feature: MA Experiment 20001906 PARAMETER Experiment Name: At_Drought_Reproduction_P Parameter: Plant Line Value: WS
  misc_feature: MA Experiment 20001906 PARAMETER Experiment Name: At_Drought_Reproduction_P Parameter: Timepoint (day) Value: 5
  misc_feature: MA Experiment 20001906 PARAMETER Experiment Name: At_Drought_Reproduction_P Parameter: Tissue Value: Siliques
  misc_feature: MA Experiment 20001906 PARAMETER Experiment Name: At_Drought_Reproduction_P Parameter: Treatment Value: Drought vs. No Drought
  misc_feature: MA Experiment ID: 20001907 Result: Down-regulated in Transcription
  misc_feature: MA Experiment 20001907 PARAMETER Experiment Name: At_Drought_Reproduction_P Parameter: Age (day) Value: 37
  misc_feature: MA Experiment 20001907 PARAMETER Experiment Name: At_Drought_Reproduction_P Parameter: Organism Value: A. thaliana
  misc_feature: MA Experiment 20001907 PARAMETER Experiment Name: At_Drought_Reproduction_P Parameter: Plant Line Value: WS
  misc_feature: MA Experiment 20001907 PARAMETER Experiment Name: At_Drought_Reproduction_P Parameter: Timepoint (day) Value: 7
  misc_feature: MA Experiment 20001907 PARAMETER Experiment Name: At_Drought_Reproduction_P Parameter: Tissue Value: Siliques
  misc_feature: MA Experiment 20001907 PARAMETER Experiment Name: At_Drought_Reproduction_P Parameter: Treatment Value: Drought vs. No Drought
  misc_feature: MA Experiment ID: 20001911 Result: Down-regulated in Transcription
  misc_feature: MA Experiment 20001911 PARAMETER Experiment Name: At_Drought_Reproduction_P Parameter: Age (day) Value: 40
  misc_feature: MA Experiment 20001911 PARAMETER Experiment Name: At_Drought_Reproduction_P Parameter: Organism Value: A. thaliana
  misc_feature: MA Experiment 20001911 PARAMETER Experiment Name: At_Drought_Reproduction_P Parameter: Plant Line Value: WS
  misc_feature: MA Experiment 20001911 PARAMETER Experiment Name: At_Drought_Reproduction_P Parameter: Timepoint (day) Value: 10
  misc_feature: MA Experiment 20001911 PARAMETER Experiment Name: At_Drought_Reproduction_P Parameter: Tissue Value: Flowers
  misc_feature: MA Experiment 20001911 PARAMETER Experiment Name: At_Drought_Reproduction_P Parameter: Treatment Value: Drought vs. No Drought
aaaaagtacgaaaggaaaatatgagtgaggagaagaggaagcaacacttcgtgctagtacatggtgcgtgccacggcgcatggtgctggtacaaggttaagcctcttctcgaggctttgggccatcgtgtaaccgccttagacctagctgcttccggtatagacacaaccaggtcaatcactgacatttctacatgtgaacaatattctgagccattgatgcagctaatgacttcattgccgaatgatgagaaggttgtactcgttggtcatagctttggaggtttgagtttagccttagccatggataagtttcccgataaaatctctgtctctgtcttcgtgactgcattcatgcccgacaccaaacactcaccatcgttcgtcgaggaaaagtttgcaagcagcatgacaccagaaggatggatgggctctgagctcgagacatatggttcagataattccggcttgtctgtgttcttcagcaccgacttcatgaagcaccgtctctaccaactttctcctgtggaggatcttgagcttggattgcttctaaagaggcctagttcattgtttattaatgaattatcgaagatggagaacttttctgagaaagggtatggatctgttcctcgagcttacattgtgtgcaaagaggacaacattatctcggaagaccatcaacgatggatgatccataattatccggcgaatttagtgattgagatggaagagactgatcatatgccaatgttttgcaaacctcaactactaagtgaccatctattggcaatcgctgacaatttctgttaaataatattttgatgaaaatgtatttggagtggatacaatcaaacgtgttctaaaatggatcttcataaaggttcaaacttatttcttagttcttactatggttgaaatgagaaacctaagtcaatcg

SEQ ID NO: 36075 - protein, 269 aa, Arabidopsis thaliana
  peptide (1)..(269): Ceres Seq. ID no. 12333679
  misc_feature (41)..(263): Pfam Name: alpha/beta hydrolase fold Pfam Description: alpha/beta hydrolase fold
  misc_feature (9)..(265): Homolog of NCBI NO: 15227859 NR Description: putative acetone-cyanohydrin lyase; protein id:
  misc_feature (14)..(268): Homolog of NCBI NO: 15235445 NR Description: hydroxynitrile lyase like protein; protein id:
  misc_feature (11)..(268): Homolog of NCBI NO: 40549303 NR Description: salicylic acid-binding protein 2 [Nicotiana
  misc_feature (13)..(265): Homolog of NCBI NO: 14279437 NR Description: ethylene-induced esterase [Citrus sinensis]
  misc_feature (7)..(268): Homolog of NCBI NO: 15227865 NR Description: putative acetone-cyanohydrin lyase; protein id:
  misc_feature (8)..(268): Homolog of NCBI NO: 15227861 NR Description: putative acetone-cyanohydrin lyase; protein id:
  misc_feature (7)..(268): Homolog of NCBI NO: 27754457 NR Description: putative acetone-cyanohydrin lyase [Arabidopsis
  misc_feature (7)..(268): Homolog of NCBI NO: 15227867 NR Description: putative acetone-cyanohydrin lyase; protein id:
  misc_feature (7)..(268): Homolog of NCBI NO: 21554666 NR Description: putative acetone-cyanohydrin lyase [Arabidopsis
  misc_feature (7)..(269): Homolog of NCBI NO: 15227863 NR Description: putative acetone-cyanohydrin lyase
KVRKENMSEEKRKQHFVLVHGACHGAWCWYKVKPLLEALGHRVTALDLAASGIDTTRSITDISTCEQYSEPLMQLMTSLPNDEKVVLVGHSFGGLSLALAMDKFPDKISVSVFVTAFMPDTKHSPSFVEEKFASSMTPEGWMGSELETYGSDNSGLSVFFSTDFMKHRLYQLSPVEDLELGLLLKRPSSLFINELSKMENFSEKGYGSVPRAYIVCKEDNIISEDHQRWMIHNYPANLVIEMEETDHMPMFCKPQLLSDHLLAIADNFC

SEQ ID NO: 36076 - protein, 263 aa, Arabidopsis thaliana
  peptide (1)..(263): Ceres Seq. ID no. 12333680
  misc_feature (35)..(257): Pfam Name: alpha/beta hydrolase fold Pfam Description: alpha/beta hydrolase fold
  misc_feature (3)..(259): Homolog of NCBI NO: 15227859 NR Description: putative acetone-cyanohydrin lyase; protein id:
  misc_feature (8)..(262): Homolog of NCBI NO: 15235445 NR Description: hydroxynitrile lyase like protein; protein id:
  misc_feature (5)..(262): Homolog of NCBI NO: 40549303 NR Description: salicylic acid-binding protein 2 [Nicotiana
  misc_feature (7)..(259): Homolog of NCBI NO: 14279437 NR Description: ethylene-induced esterase [Citrus sinensis]
  misc_feature (1)..(262): Homolog of NCBI NO: 15227865 NR Description: putative acetone-cyanohydrin lyase; protein id:
  misc_feature (2)..(262): Homolog of NCBI NO: 15227861 NR Description: putative acetone-cyanohydrin lyase; protein id:
  misc_feature (1)..(262): Homolog of NCBI NO: 27754457 NR Description: putative acetone-cyanohydrin lyase [Arabidopsis
  misc_feature (1)..(262): Homolog of NCBI NO: 15227867 NR Description: putative acetone-cyanohydrin lyase; protein id:
  misc_feature (1)..(262): Homolog of NCBI NO: 21554666 NR Description: putative acetone-cyanohydrin lyase [Arabidopsis
  misc_feature (1)..(263): Homolog of NCBI NO: 15227863 NR Description: putative acetone-cyanohydrin lyase
MSEEKRKQHFVLVHGACHGAWCWYKVKPLLEALGHRVTALDLAASGIDTTRSITDISTCEQYSEPLMQLMTSLPNDEKVVLVGHSFGGLSLALAMDKFPDKISVSVFVTAFMPDTKHSPSFVEEKFASSMTPEGWMGSELETYGSDNSGLSVFFSTDFMKHRLYQLSPVEDLELGLLLKRPSSLFINELSKMENFSEKGYGSVPRAYIVCKEDNIISEDHQRWMIHNYPANLVIEMEETDHMPMFCKPQLLSDHLLAIADNFC

SEQ ID NO: 36077 - protein, 197 aa, Arabidopsis thaliana
  peptide (1)..(197): Ceres Seq. ID no. 12333681
  misc_feature (1)..(191): Pfam Name: alpha/beta hydrolase fold Pfam Description: alpha/beta hydrolase fold
  misc_feature (1)..(193): Homolog of NCBI NO: 15227859 NR Description: putative acetone-cyanohydrin lyase; protein id:
  misc_feature (1)..(196): Homolog of NCBI NO: 15235445 NR Description: hydroxynitrile lyase like protein; protein id:
  misc_feature (1)..(196): Homolog of NCBI NO: 40549303 NR Description: salicylic acid-binding protein 2 [Nicotiana
  misc_feature (1)..(193): Homolog of NCBI NO: 14279437 NR Description: ethylene-induced esterase [Citrus sinensis]
  misc_feature (1)..(196): Homolog of NCBI NO: 15227865 NR Description: putative acetone-cyanohydrin lyase; protein id:
  misc_feature (1)..(196): Homolog of NCBI NO: 15227861 NR Description: putative acetone-cyanohydrin lyase; protein id:
  misc_feature (1)..(196): Homolog of NCBI NO: 27754457 NR Description: putative acetone-cyanohydrin lyase [Arabidopsis
  misc_feature (1)..(196): Homolog of NCBI NO: 15227867 NR Description: putative acetone-cyanohydrin lyase; protein id:
  misc_feature (1)..(196): Homolog of NCBI NO: 21554666 NR Description: putative acetone-cyanohydrin lyase [Arabidopsis
  misc_feature (1)..(197): Homolog of NCBI NO: 15227863 NR Description: putative acetone-cyanohydrin lyase
MQLMTSLPNDEKVVLVGHSFGGLSLALAMDKFPDKISVSVFVTAFMPDTKHSPSFVEEKFASSMTPEGWMGSELETYGSDNSGLSVFFSTDFMKHRLYQLSPVEDLELGLLLKRPSSLFINELSKMENFSEKGYGSVPRAYIVCKEDNIISEDHQRWMIHNYPANLVIEMEETDHMPMFCKPQLLSDHLLAIADNFC

SEQ ID NO: 36078 - DNA, 647 bp, Arabidopsis thaliana
  misc_feature (1)..(647): Ceres Seq. ID no. 12334215
  misc_feature: MA Experiment ID: 108501 Result: Up-regulated in Transcription
  misc_feature: MA Experiment 108501 PARAMETER Experiment Name: At_ap2_floral_buds_cDNA_P Parameter: Plant Line Value: ap2 (Ler.)
  misc_feature: MA Experiment 108501 PARAMETER Experiment Name: At_ap2_floral_buds_cDNA_P Parameter: Tissue Value: Closed Flower
  misc_feature: MA Experiment ID: 108595 Result: Up-regulated in Transcription
  misc_feature: MA Experiment 108595 PARAMETER Experiment Name: At_Ler-pi_Ovule_cDNA_P Parameter: Plant Line Value: null
  misc_feature: MA Experiment ID: 20000068 Result: Up-regulated in Transcription
  misc_feature: MA Experiment ID: 20000087 Result: Up-regulated in Transcription
  misc_feature: MA Experiment 20000087 PARAMETER Experiment Name: At_100uM_ABA_Mutants_cDNA_P Parameter: Plant Line Value: WS
  misc_feature: MA Experiment 20000087 PARAMETER Experiment Name: At_100uM_ABA_Mutants_cDNA_P Parameter: Timepoint (hr) Value: 6
  misc_feature: MA Experiment 20000087 PARAMETER Experiment Name: At_100uM_ABA_Mutants_cDNA_P Parameter: Tissue Value: Aerial
  misc_feature: MA Experiment 20000087 PARAMETER Experiment Name: At_100uM_ABA_Mutants_cDNA_P Parameter: Treatment Value: 100uM ABA vs. No Treatment
  misc_feature: MA Experiment ID: 20000182 Result: Up-regulated in Transcription
  misc_feature: MA Experiment 20000182 PARAMETER Experiment Name: At_2mM_SA_P Parameter: Age (day) Value: 14
  misc_feature: MA Experiment 20000182 PARAMETER Experiment Name: At_2mM_SA_P Parameter: Organism Value: A. thaliana
  misc_feature: MA Experiment 20000182 PARAMETER Experiment Name: At_2mM_SA_P Parameter: Plant Line Value: WS
  misc_feature: MA Experiment 20000182 PARAMETER Experiment Name: At_2mM_SA_P Parameter: Timepoint (hr) Value: 6
  misc_feature: MA Experiment 20000182 PARAMETER Experiment Name: At_2mM_SA_P Parameter: Tissue Value: Aerial
  misc_feature: MA Experiment 20000182 PARAMETER Experiment Name: At_2mM_SA_P Parameter: Treatment Value: 2mM SA vs. No Treatment
  misc_feature: MA Experiment ID: 20000184 Result: Down-regulated in Transcription
  misc_feature: MA Experiment 20000184 PARAMETER Experiment Name: At_Shoots__P Parameter: Age (day) Value: 7
  misc_feature: MA Experiment 20000184 PARAMETER Experiment Name: At_Shoots__P Parameter: Tissue Value: Shoots vs. Whole Plant
  misc_feature: MA Experiment ID: 20000185 Result: Down-regulated in Transcription
  misc_feature: MA Experiment 20000185 PARAMETER Experiment Name: At_Roots__P Parameter: Age (day) Value: 7 vs. 21
  misc_feature: MA Experiment 20000185 PARAMETER Experiment Name: At_Roots__P Parameter: Organism Value: A. thaliana
  misc_feature: MA Experiment 20000185 PARAMETER Experiment Name: At_Roots__P Parameter: Tissue Value: Roots vs. Whole Plant
  misc_feature: MA Experiment ID: 20000224 Result: Up-regulated in Transcription
  misc_feature: MA Experiment ID: 20000234 Result: Up-regulated in Transcription
  misc_feature: MA Experiment 20000234 PARAMETER Experiment Name: At_Siliques_P Parameter: Age (day) Value: 21
  misc_feature: MA Experiment 20000234 PARAMETER Experiment Name: At_Siliques_P Parameter: Organism Value: A. thaliana
  misc_feature: MA Experiment 20000234 PARAMETER Experiment Name: At_Siliques_P Parameter: Plant Line Value: WS
  misc_feature: MA Experiment 20000234 PARAMETER Experiment Name: At_Siliques_P Parameter: Tissue Value: Less Than 5mm Siliques vs. Whole Plant
  misc_feature: MA Experiment ID: 20000235 Result: Up-regulated in Transcription
  misc_feature: MA Experiment 20000235 PARAMETER Experiment Name: At_Siliques_P Parameter: Age (day) Value: 21
  misc_feature: MA Experiment 20000235 PARAMETER Experiment Name: At_Siliques_P Parameter: Organism Value: A. thaliana
  misc_feature: MA Experiment 20000235 PARAMETER Experiment Name: At_Siliques_P Parameter: Plant Line Value: WS
  misc_feature: MA Experiment 20000235 PARAMETER Experiment Name: At_Siliques_P Parameter: Tissue Value: 5-10mm Siliques vs. Whole Plant
  misc_feature: MA Experiment ID: 20000264 Result: Up-regulated in Transcription
  misc_feature: MA Experiment 20000264 PARAMETER Experiment Name: At_Open_Flower_P Parameter: Age (day) Value: 21
  misc_feature: MA Experiment 20000264 PARAMETER Experiment Name: At_Open_Flower_P Parameter: Plant Line Value: WS
  misc_feature: MA Experiment 20000264 PARAMETER Experiment Name: At_Open_Flower_P Parameter: Tissue Value: Open Flower vs. Whole Plant
  misc_feature: MA Experiment ID: 20000265 Result: Up-regulated in Transcription
  misc_feature: MA Experiment 20000265 PARAMETER Experiment Name: At_Open_Flower_P Parameter: Age (day) Value: 21
  misc_feature: MA Experiment 20000265 PARAMETER Experiment Name: At_Open_Flower_P Parameter: Plant Line Value: WS
  misc_feature: MA Experiment 20000265 PARAMETER Experiment Name: At_Open_Flower_P Parameter: Tissue Value: Closed Flower vs. Whole Plant
  misc_feature: MA Experiment ID: 20000286 Result: Up-regulated in Transcription
  misc_feature: MA Experiment 20000286 PARAMETER Experiment Name: At_Open_Flower_P Parameter: Age (day) Value: 21
  misc_feature: MA Experiment 20000286 PARAMETER Experiment Name: At_Open_Flower_P Parameter: Plant Line Value: WS
  misc_feature: MA Experiment 20000286 PARAMETER Experiment Name: At_Open_Flower_P Parameter: Tissue Value: Half Open vs. Whole Plant
  misc_feature: MA Experiment ID: 20000438 Result: Down-regulated in Transcription
  misc_feature: MA Experiment 20000438 PARAMETER Experiment Name: At_Shoots__P Parameter: Age (day) Value: 14
  misc_feature: MA Experiment 20000438 PARAMETER Experiment Name: At_Shoots__P Parameter: Tissue Value: Shoots vs. Whole Plant
  misc_feature: MA Experiment ID: 20000439 Result: Down-regulated in Transcription
  misc_feature: MA Experiment 20000439 PARAMETER Experiment Name: At_Roots__P Parameter: Age (day) Value: 14 vs. 21
  misc_feature: MA Experiment 20000439 PARAMETER Experiment Name: At_Roots__P Parameter: Organism Value: A. thaliana
  misc_feature: MA Experiment 20000439 PARAMETER Experiment Name: At_Roots__P Parameter: Tissue Value: Roots vs. Whole Plant
  misc_feature: MA Experiment ID: 20000495 Result: Up-regulated in Transcription
  misc_feature: MA Experiment 20000495 PARAMETER Experiment Name: At_Guard_Cells_P Parameter: Harvest Date Value: 8/2/2002
  misc_feature: MA Experiment 20000495 PARAMETER Experiment Name: At_Guard_Cells_P Parameter: Organism Value: A. thaliana
  misc_feature: MA Experiment 20000495 PARAMETER Experiment Name: At_Guard_Cells_P Parameter: Tissue Value: Guard Cells vs. Leaves
  misc_feature: MA Experiment ID: 20000527 Result: Down-regulated in Transcription
  misc_feature: MA Experiment 20000527 PARAMETER Experiment Name: At_10percent_PEG_P Parameter: Age (day) Value: 20
  misc_feature: MA Experiment 20000527 PARAMETER Experiment Name: At_10percent_PEG_P Parameter: Organism Value: A. thaliana
  misc_feature: MA Experiment 20000527 PARAMETER Experiment Name: At_10percent_PEG_P Parameter: Plant Line Value: WS
  misc_feature: MA Experiment 20000527 PARAMETER Experiment Name: At_10percent_PEG_P Parameter: Timepoint (day) Value: 20
  misc_feature: MA Experiment 20000527 PARAMETER Experiment Name: At_10percent_PEG_P Parameter: Tissue Value: Whole Plant
  misc_feature: MA Experiment 20000527 PARAMETER Experiment Name: At_10percent_PEG_P Parameter: Treatment Value: 10percent PEG vs. No Treatment
  misc_feature: MA Experiment ID: 20000794 Result: Down-regulated in Transcription
  misc_feature: MA Experiment 20000794 PARAMETER Experiment Name: At_Petals_P Parameter: Age (day) Value: 23-25 days
  misc_feature: MA Experiment 20000794 PARAMETER Experiment Name: At_Petals_P Parameter: Plant Line Value: WS
  misc_feature: MA Experiment 20000794 PARAMETER Experiment Name: At_Petals_P Parameter: Tissue Value: Petals vs. Whole plant
  misc_feature: MA Experiment ID: 20001451 Result: Up-regulated in Transcription
  misc_feature: MA Experiment 20001451 PARAMETER Experiment Name: At_Far-red-induction_P Parameter: Age (day) Value: 7
  misc_feature: MA Experiment 20001451 PARAMETER Experiment Name: At_Far-red-induction_P Parameter: Light Value: Far-red vs. White
  misc_feature: MA Experiment 20001451 PARAMETER Experiment Name: At_Far-red-induction_P Parameter: Organism Value: A. thaliana
  misc_feature: MA Experiment 20001451 PARAMETER Experiment Name: At_Far-red-induction_P Parameter: Plant Line Value: Columbia
  misc_feature: MA Experiment 20001451 PARAMETER Experiment Name: At_Far-red-induction_P Parameter: Timepoint (hr) Value: 24
  misc_feature: MA Experiment 20001451 PARAMETER Experiment Name: At_Far-red-induction_P Parameter: Tissue Value: Whole Plant
  misc_feature: MA Experiment ID: 20001457 Result: Up-regulated in Transcription
  misc_feature: MA Experiment 20001457 PARAMETER Experiment Name: At_50mM_NH4NO3_L-to-H_P Parameter: Age (day) Value: Undefined
  misc_feature: MA Experiment 20001457 PARAMETER Experiment Name: At_50mM_NH4NO3_L-to-H_P Parameter: Organism Value: Undefined
  misc_feature: MA Experiment 20001457 PARAMETER Experiment Name: At_50mM_NH4NO3_L-to-H_P Parameter: Plant Line Value: Undefined
  misc_feature: MA Experiment 20001457 PARAMETER Experiment Name: At_50mM_NH4NO3_L-to-H_P Parameter: Timepoint (hr) Value: 0.5
  misc_feature: MA Experiment 20001457 PARAMETER Experiment Name: At_50mM_NH4NO3_L-to-H_P Parameter: Tissue Value: Siliques
  misc_feature: MA Experiment 20001457 PARAMETER Experiment Name: At_50mM_NH4NO3_L-to-H_P Parameter: Treatment Value: 50mM NH4NO3 vs. 100mM Manitol
  misc_feature: MA Experiment ID: 20001556 Result: Up-regulated in Transcription
  misc_feature: MA Experiment 20001556 PARAMETER Experiment Name: At_Drought_Soil_Dry_P Parameter: Age (day) Value: 26
  misc_feature: MA Experiment 20001556 PARAMETER Experiment Name: At_Drought_Soil_Dry_P Parameter: Organism Value: A. thaliana
  misc_feature: MA Experiment 20001556 PARAMETER Experiment Name: At_Drought_Soil_Dry_P Parameter: Plant Line Value: WS
  misc_feature: MA Experiment 20001556 PARAMETER Experiment Name: At_Drought_Soil_Dry_P Parameter: Post Timepoint (hr) Value: None
  misc_feature: MA Experiment 20001556 PARAMETER Experiment Name: At_Drought_Soil_Dry_P Parameter: Post-Treatment Value: None
  misc_feature: MA Experiment 20001556 PARAMETER Experiment Name: At_Drought_Soil_Dry_P Parameter: Timepoint (day) Value: 12
  misc_feature: MA Experiment 20001556 PARAMETER Experiment Name: At_Drought_Soil_Dry_P Parameter: Treatment Value: Drought vs. No Drought
  misc_feature: MA Experiment ID: 20001768 Result: Up-regulated in Transcription
  misc_feature: MA Experiment 20001768 PARAMETER Experiment Name: At_Far-red-enriched-adult_P Parameter: Age (day) Value: 28
  misc_feature: MA Experiment 20001768 PARAMETER Experiment Name: At_Far-red-enriched-adult_P Parameter: Light Value: Far-red enriched vs. White
  misc_feature: MA Experiment 20001768 PARAMETER Experiment Name: At_Far-red-enriched-adult_P Parameter: Organism Value: A. thaliana
  misc_feature: MA Experiment 20001768 PARAMETER Experiment Name: At_Far-red-enriched-adult_P Parameter: Plant Line Value: Columbia
  misc_feature: MA Experiment 20001768 PARAMETER Experiment Name: At_Far-red-enriched-adult_P Parameter: Timepoint (hr) Value: 1
  misc_feature: MA Experiment 20001768 PARAMETER Experiment Name: At_Far-red-enriched-adult_P Parameter: Tissue Value: Aerial
  misc_feature: MA Experiment ID: 20001773 Result: Up-regulated in Transcription
  misc_feature: MA Experiment 20001773 PARAMETER Experiment Name: At_Far-red-enriched-adult_P Parameter: Age (day) Value: 30
  misc_feature: MA Experiment 20001773 PARAMETER Experiment Name: At_Far-red-enriched-adult_P Parameter: Light Value: Far-red enriched vs. White
  misc_feature: MA Experiment 20001773 PARAMETER Experiment Name: At_Far-red-enriched-adult_P Parameter: Organism Value: A. thaliana
  misc_feature: MA Experiment 20001773 PARAMETER Experiment Name: At_Far-red-enriched-adult_P Parameter: Plant Line Value: Columbia
  misc_feature: MA Experiment 20001773 PARAMETER Experiment Name: At_Far-red-enriched-adult_P Parameter: Timepoint (hr) Value: 48
  misc_feature: MA Experiment 20001773 PARAMETER Experiment Name: At_Far-red-enriched-adult_P Parameter: Tissue Value: Aerial
tcgaaaatcatcaatacaaacttagtagtgtattctttatacgtataataacatcccttgtgatcaaacaagtaaaccattcaaaagatgaaaggaagaattttgattttgagtttgctcataatgagtctggtcatggcacaagttcaagtagaagcaaagatctgctgcccttccaaccaagctagaaatggctatagtgtatgccgtataaggttttccaagggaaggtgtatgcaagtgagtggatgccaaaactctgatacatgccctcgaggttgggtaaacgccattctcgaaaactcagctgatgctaccaatgagcactgcaagttagggtgtgaaacttctgtgtgtggtgccatgaacactctccagaactctgatgcaagtgaaattgtgaatggagcgtcggaacaatgtgccaagggatgttctattttctgtaccaagagctatgtagtcccacctgggccgcctaaactgttgtaatggtcgtatatgtgaaaaaacaaatgctagactcttgctattctggtttgtgtgtgtgtgtgtgcatgtgtcgtagaaggtttgttcgatcactagattgtacatgccctctacttcctataacctaaataaagagttaaacgtacgtgtctttt

SEQ ID NO: 36079 - protein, 134 aa, Arabidopsis thaliana
  peptide (1)..(134): Ceres Seq. ID no. 12334216
  misc_feature (25)..(67): Pfam Name: Plant thionin Pfam Description: Plant thionin
  misc_feature (1)..(122): Homolog of NCBI NO: 1076464 NR Description: thionin variant Thi2Ca11 - Abyssinian crambe
  misc_feature (1)..(122): Homolog of NCBI NO: 1076463 NR Description: thionin variant Thi2Ca10 - Abyssinian crambe
  misc_feature (1)..(122): Homolog of NCBI NO: 1076466 NR Description: thionin variant Thi2Ca2 - Abyssinian crambe
  misc_feature (1)..(121): Homolog of NCBI NO: 21553588 NR Description: thionin Thi2.2 [Arabidopsis thaliana]
  misc_feature (1)..(121): Homolog of NCBI NO: 15239447 NR Description: thionin Thi2.2
  misc_feature (1)..(121): Homolog of NCBI NO: 1181533 NR Description: thionin
  misc_feature (1)..(122): Homolog of NCBI NO: 15218931 NR Description: thionin, putative
  misc_feature (17)..(134): Homolog of NCBI NO: 25294219 NR Description: thionin, 63255-62748 [imported] - Arabidopsis
  misc_feature (13)..(134): Homolog of NCBI NO: 21554677 NR Description: thionin [Arabidopsis thaliana]
  misc_feature (1)..(134): Homolog of NCBI NO: 18410037 NR Description: thionin
MKGRILILSLLIMSLVMAQVQVEAKICCPSNQARNGYSVCRIRFSKGRCMQVSGCQNSDTCPRGWVNAILENSADATNEHCKLGCETSVCGAMNTLQNSDASEIVNGASEQCAKGCSIFCTKSYVVPPGPPKLL

SEQ ID NO: 36080 - protein, 122 aa, Arabidopsis thaliana
  peptide (1)..(122): Ceres Seq. ID no. 12334217
  misc_feature (13)..(55): Pfam Name: Plant thionin Pfam Description: Plant thionin
  misc_feature (1)..(110): Homolog of NCBI NO: 1076464 NR Description: thionin variant Thi2Ca11 - Abyssinian crambe
  misc_feature (1)..(110): Homolog of NCBI NO: 1076463 NR Description: thionin variant Thi2Ca10 - Abyssinian crambe
  misc_feature (1)..(110): Homolog of NCBI NO: 1076466 NR Description: thionin variant Thi2Ca2 - Abyssinian crambe
  misc_feature (1)..(109): Homolog of NCBI NO: 21553588 NR Description: thionin Thi2.2 [Arabidopsis thaliana]
  misc_feature (1)..(109): Homolog of NCBI NO: 15239447 NR Description: thionin Thi2.2
  misc_feature (1)..(109): Homolog of NCBI NO: 1181533 NR Description: thionin
  misc_feature (1)..(110): Homolog of NCBI NO: 15218931 NR Description: thionin, putative
  misc_feature (5)..(122): Homolog of NCBI NO: 25294219 NR Description: thionin, 63255-62748 [imported] - Arabidopsis
  misc_feature (1)..(122): Homolog of NCBI NO: 21554677 NR Description: thionin [Arabidopsis thaliana]
  misc_feature (1)..(122): Homolog of NCBI NO: 18410037 NR Description: thionin
MSLVMAQVQVEAKICCPSNQARNGYSVCRIRFSKGRCMQVSGCQNSDTCPRGWVNAILENSADATNEHCKLGCETSVCGAMNTLQNSDASEIVNGASEQCAKGCSIFCTKSYVVPPGPPKLL

SEQ ID NO: 36081 - protein, 118 aa, Arabidopsis thaliana
  peptide (1)..(118): Ceres Seq. ID no. 12334218
  misc_feature (9)..(51): Pfam Name: Plant thionin Pfam Description: Plant thionin
  misc_feature (1)..(106): Homolog of NCBI NO: 1076464 NR Description: thionin variant Thi2Ca11 - Abyssinian crambe
  misc_feature (1)..(106): Homolog of NCBI NO: 1076463 NR Description: thionin variant Thi2Ca10 - Abyssinian crambe
  misc_feature (1)..(106): Homolog of NCBI NO: 1076466 NR Description: thionin variant Thi2Ca2 - Abyssinian crambe
  misc_feature (1)..(105): Homolog of NCBI NO: 21553588 NR Description: thionin Thi2.2 [Arabidopsis thaliana]
  misc_feature (1)..(105): Homolog of NCBI NO: 15239447 NR Description: thionin Thi2.2
  misc_feature (1)..(105): Homolog of NCBI NO: 1181533 NR Description: thionin
  misc_feature (1)..(106): Homolog of NCBI NO: 15218931 NR Description: thionin, putative
  misc_feature (1)..(118): Homolog of NCBI NO: 25294219 NR Description: thionin, 63255-62748 [imported] - Arabidopsis
  misc_feature (1)..(118): Homolog of NCBI NO: 21554677 NR Description: thionin [Arabidopsis thaliana]
  misc_feature (1)..(118): Homolog of NCBI NO: 18410037 NR Description: thionin
MAQVQVEAKICCPSNQARNGYSVCRIRFSKGRCMQVSGCQNSDTCPRGWVNAILENSADATNEHCKLGCETSVCGAMNTLQNSDASEIVNGASEQCAKGCSIFCTKSYVVPPGPPKLL

SEQ ID NO: 36082 - DNA, 3323 bp, Arabidopsis thaliana
  misc_feature (1)..(3323): Ceres Seq. ID no. 13488061
  misc_feature: MA Experiment ID: 108434 Result: Down-regulated in Transcription
  misc_feature: MA Experiment 108434 PARAMETER Experiment Name: At_Root_Tips_cDNA_P Parameter: Tissue Value: Root Tips
  misc_feature: MA Experiment ID: 108469 Result: Up-regulated in Transcription
  misc_feature: MA Experiment ID: 108561 Result: Up-regulated in Transcription
  misc_feature: MA Experiment 108561 PARAMETER Experiment Name: At_100uM_ABA_cDNA_P Parameter: Timepoint (hr) Value: 6
  misc_feature: MA Experiment 108561 PARAMETER Experiment Name: At_100uM_ABA_cDNA_P Parameter: Tissue Value: Aerial
  misc_feature: MA Experiment 108561 PARAMETER Experiment Name: At_100uM_ABA_cDNA_P Parameter: Treatment Value: 100uM ABA vs. No Treatment
  misc_feature: MA Experiment ID: 108569 Result: Up-regulated in Transcription
  misc_feature: MA Experiment 108569 PARAMETER Experiment Name: At_0.001%_MeJA__cDNA_P Parameter: Timepoint (hr) Value: 6
  misc_feature: MA Experiment 108569 PARAMETER Experiment Name: At_0.001%_MeJA__cDNA_P Parameter: Tissue Value: Aerial
  misc_feature: MA Experiment 108569 PARAMETER Experiment Name: At_0.001%_MeJA__cDNA_P Parameter: Treatment Value: 0.001% MeJA vs. No Treatment
  misc_feature: MA Experiment ID: 108572 Result: Up-regulated in Transcription
  misc_feature: MA Experiment 108572 PARAMETER Experiment Name: At_Drought_cDNA_P Parameter: Timepoint (hr) Value: 1
  misc_feature: MA Experiment 108572 PARAMETER Experiment Name: At_Drought_cDNA_P Parameter: Tissue Value: Aerial
  misc_feature: MA Experiment 108572 PARAMETER Experiment Name: At_Drought_cDNA_P Parameter: Treatment Value: Drought vs. No Drought
  misc_feature: MA Experiment ID: 108573 Result: Up-regulated in Transcription
  misc_feature: MA Experiment 108573 PARAMETER Experiment Name: At_Drought_cDNA_P Parameter: Timepoint (hr) Value: 6
  misc_feature: MA Experiment 108573 PARAMETER Experiment Name: At_Drought_cDNA_P Parameter: Tissue Value: Aerial
  misc_feature: MA Experiment 108573 PARAMETER Experiment Name: At_Drought_cDNA_P Parameter: Treatment Value: Drought vs. No Drought
  misc_feature: MA Experiment ID: 108574 Result: Up-regulated in Transcription
  misc_feature: MA Experiment 108574 PARAMETER Experiment Name: At_Wounding__cDNA_P Parameter: Timepoint (hr) Value: 1
  misc_feature: MA Experiment 108574 PARAMETER Experiment Name: At_Wounding__cDNA_P Parameter: Tissue Value: Aerial
  misc_feature: MA Experiment 108574 PARAMETER Experiment Name: At_Wounding__cDNA_P Parameter: Treatment Value: Wounding vs. No Wounding
  misc_feature: MA Experiment ID: 108667 Result: Up-regulated in Transcription
  misc_feature: MA Experiment 108667 PARAMETER Experiment Name: At_2mM_SA_cDNA_P Parameter: Plant Line Value: WS
  misc_feature: MA Experiment 108667 PARAMETER Experiment Name: At_2mM_SA_cDNA_P Parameter: Timepoint (hr) Value: 1
  misc_feature: MA Experiment 108667 PARAMETER Experiment Name: At_2mM_SA_cDNA_P Parameter: Treatment Value: 2mM SA vs. No Treatment
  misc_feature: MA Experiment ID: 108668 Result: Up-regulated in Transcription
  misc_feature: MA Experiment 108668 PARAMETER Experiment Name: At_2mM_SA_cDNA_P Parameter: Plant Line Value: WS
  misc_feature: MA Experiment 108668 PARAMETER Experiment Name: At_2mM_SA_cDNA_P Parameter: Timepoint (hr) Value: 6
  misc_feature: MA Experiment 108668 PARAMETER Experiment Name: At_2mM_SA_cDNA_P Parameter: Treatment Value: 2mM SA vs. No Treatment
  misc_feature: MA Experiment ID: 20000069 Result: Up-regulated in Transcription
  misc_feature: MA Experiment 20000069 PARAMETER Experiment Name: At_100uM_ABA_Mutants_cDNA_P Parameter: Plant Line Value: CS23
  misc_feature: MA Experiment 20000069 PARAMETER Experiment Name: At_100uM_ABA_Mutants_cDNA_P Parameter: Timepoint (hr) Value: 6
  misc_feature: MA Experiment 20000069 PARAMETER Experiment Name: At_100uM_ABA_Mutants_cDNA_P Parameter: Tissue Value: Aerial
  misc_feature: MA Experiment 20000069 PARAMETER Experiment Name: At_100uM_ABA_Mutants_cDNA_P Parameter: Treatment Value: 100uM ABA vs. No Treatment
  misc_feature: MA Experiment ID: 20000072 Result: Up-regulated in Transcription
  misc_feature: MA Experiment 20000072 PARAMETER Experiment Name: At_100uM_ABA_Mutants_cDNA_P Parameter: Plant Line Value: CS8105
  misc_feature: MA Experiment 20000072 PARAMETER Experiment Name: At_100uM_ABA_Mutants_cDNA_P Parameter: Timepoint (hr) Value: 6
  misc_feature: MA Experiment 20000072 PARAMETER Experiment Name: At_100uM_ABA_Mutants_cDNA_P Parameter: Tissue Value: Aerial
  misc_feature: MA Experiment 20000072 PARAMETER Experiment Name: At_100uM_ABA_Mutants_cDNA_P Parameter: Treatment Value: 100uM ABA vs. No Treatment
  misc_feature: MA Experiment ID: 20000086 Result: Up-regulated in Transcription
  misc_feature: MA Experiment 20000086 PARAMETER Experiment Name: At_100uM_ABA_Mutants_cDNA_P Parameter: Plant Line Value: CS22
  misc_feature: MA Experiment 20000086 PARAMETER Experiment Name: At_100uM_ABA_Mutants_cDNA_P Parameter: Timepoint (hr) Value: 6
  misc_feature: MA Experiment 20000086 PARAMETER Experiment Name: At_100uM_ABA_Mutants_cDNA_P Parameter: Tissue Value: Aerial
  misc_feature: MA Experiment 20000086 PARAMETER Experiment Name: At_100uM_ABA_Mutants_cDNA_P Parameter: Treatment Value: 100uM ABA vs. No Treatment
  misc_feature: MA Experiment ID: 20000087 Result: Up-regulated in Transcription
  misc_feature: MA Experiment 20000087 PARAMETER Experiment Name: At_100uM_ABA_Mutants_cDNA_P Parameter: Plant Line Value: WS
  misc_feature: MA Experiment 20000087 PARAMETER Experiment Name: At_100uM_ABA_Mutants_cDNA_P Parameter: Timepoint (hr) Value: 6
  misc_feature: MA Experiment 20000087 PARAMETER Experiment Name: At_100uM_ABA_Mutants_cDNA_P Parameter: Tissue Value: Aerial
  misc_feature: MA Experiment 20000087 PARAMETER Experiment Name: At_100uM_ABA_Mutants_cDNA_P Parameter: Treatment Value: 100uM ABA vs. No Treatment
  misc_feature: MA Experiment ID: 20000182 Result: Up-regulated in Transcription
  misc_feature: MA Experiment 20000182 PARAMETER Experiment Name: At_2mM_SA_P Parameter: Age (day) Value: 14
  misc_feature: MA Experiment 20000182 PARAMETER Experiment Name: At_2mM_SA_P Parameter: Organism Value: A. thaliana
  misc_feature: MA Experiment 20000182 PARAMETER Experiment Name: At_2mM_SA_P Parameter: Plant Line Value: WS
  misc_feature: MA Experiment 20000182 PARAMETER Experiment Name: At_2mM_SA_P Parameter: Timepoint (hr) Value: 6
  misc_feature: MA Experiment 20000182 PARAMETER Experiment Name: At_2mM_SA_P Parameter: Tissue Value: Aerial
  misc_feature: MA Experiment 20000182 PARAMETER Experiment Name: At_2mM_SA_P Parameter: Treatment Value: 2mM SA vs. No Treatment
acttgggatttaaataccacttttttgcttcttgtacccctgcttcatcatcacgcacacctctcttaacttcttcgatctcttctttttctctacacgattcgattgattcaagtatcaatcaatcgaatccgagataagtcatgagtttcttcaaatgggtttcttttgttttgatccttcacttgcttaatccgactctgatttcatgttcctctaatgggttatctcaaataccttcaaagtttcttactttggctaaaaggaatgattttttcgattggatggttggaatcagaaggagaatccatgagaatccagagttaggttatgaggaagtagagacatctaagcttgttagagcagagttggagaagatgggtgtttcttataagtacccagttgctgttactggtgttgttgggtatgttggaactggtcatgctccttttgttgctttaagggctgatatggatgcacttgctatgcaggaaatggtggaatgggaacacaagagtaaggttccagggaagatgcacgcttgtggacatgacgctcacactacgatgcttctcggtgctgcaaaattgctcaaagaacatgaagaagagctacagggcacagtggttctagttttccaaccagctgaggaaggaggaggaggtgcaaagaagattgtggaggctggagtgttggagaatgtgagtgcaatctttggattacatgtcacaaatcaattggcattaggtcaagtgagctcgagagagggtcctatgttggctggtagtggctttttcaaagctaagataagcgggaaaggaggccacgcagctcttccgcagcataccatagatccgatactggcagcttcaaatgttattgttagcttacaacacctcgtttcacgagaggcagatcctttagactctcaggtggttacagttgctaaatttgaaggcggtggtgctttcaatgtgattcctgactctgttactatcggtggtacattccgagctttttcaactaaaagctttatgcaactcaagaaaagaattgagcaggttatcacaaggcaagcgagcgtgaatatgtgtaatgcaacagtggatttcattgaagaggagaaaccttttttcccaccaactgtaaatgacaaagccttacaccagtttttcaagaacgtttcaggcgatatgttagggattgagaattacgtcgagatgcaaccattaatgggatcagaagatttctctttctaccaacaagcaatcccgggacattttagcttcgttggaatgcaaaacaaagctcgttcaccaatggcgagccctcactcgccgtactttgaagttaacgaagaattactaccttatggtgcttcccttcatgcttccatggccacaagatatcttcttgaactaaaagcttcaactctaaataagagtaacaaaaaagatgaactttgatgccaacaaacattggcttctcctattcttctactctgaaaaatgtcaaaacatggtaacagttttttcttttttacagagcctgccatgtaaagattaataaattgttatgcagtgtcaagcttctattaaatccaagaaatgttattactgcaaacaaaaacagatttgggccattgcaatgacagagctgaaacggtcaatttaaacaaatcagattgagagatttcagaagattcgacgcataaacaaatgctaaaattcgagagcttgttaacatgtctaactgataaagattcaatttttctttcttgttttttcttcttcttctttagattcaagttctgatctttgcttctttgaaaatcacaaatcttttcttctgggtttctataaaaaacccattttttgttgttgtcgtacaaacatttcccgtaaagattggatttttgtgtaagcatttgaagatagctaagaaagtgagaagcttttagatgaaagtgatggtaatggagatggaggaatgtgttaaagaaaatggttcatcaacacctaaatctagagtcacaaaccaatctagagctctcttaccgttgcgtctgcttcagattctgttattgtttcttgttttgactcttgggatctctgttgttagtatacacatgatcaagtttttgaagattcaacgtttagatcctgtggctccaattactttgctctctacgtataatcatgagagtgttactttagatagctttattagacctccttccaatgtttggcacacaatgaatgatagtgaattgctttggcgtgcttctatagagccgcaaagaaatggttatccgtttaaacgtgtccctaaattggctttcatgtttcttgccaaaggtcctttaccatttgctccactttgggagaagttctgtaaaggacatgagggtctttattctatctatgttcattcgttgcctagttacaaatcggatttttcgaggtcgtctgtgttttacagaagatatatccctagtcaggctgtggcatggggagagatgagtatgggtgaagcagagaggaggcttttggctaatgcgttgcttgatatctctaatgaatggtttgttctgctgtctgaatcatgcattcctctgcgaggtttcagctttatctatagttatgtctctgaatcaagatatagttttatgggtgctgctgatgaggaaggacctgatggaagaggcagatacaggacagaaatggaacctgagatcacactaagccagtggcgaaaagggtctcagtggtttgaaattaaccggaaactcgctgttgagattgttcaagacactacttactatcccaaattcaaagagttttgtagacctccatgctatgtagatgaacattacttcccaacaatgttgtctatgaaacatcgggttttgcttgctaataggacattgacatggacagattggtcacgtggtggtgctcatccagctacttttggtaaggctgatgtaacggaaagttttctcaagaagcttacaggagccaaatcttgcctctacaatgatcatcagtctcaaatctgttatctctttgccagaaagtttgctccaagcgcattggagcctttactgcaacttgcacccaagattcttgagttaggctctaacatatcttccactcgtcactcttggtatttgttttgagaagttcttgagtttagagtatgatcatggaccgaactgatcattagttaatctcctctttcacaatgatattacaggtattgtgaaggttaaacatattttttgacatgacagattattgaataaagggagttttgagtcc

SEQ ID NO: 36083 - protein, 440 aa, Arabidopsis thaliana
  peptide (1)..(440): Ceres Seq. ID no. 13488062
  misc_feature (45)..(424): Pfam Name: Peptidase family M20/M25/M40 Pfam Description: Peptidase family M20/M25/M40
  misc_feature (45)..(424): Pfam Name: Peptidase family M20/M25/M40 Pfam Description: Peptidase family M20/M25/M40
  misc_feature (51)..(423): Homolog of NCBI NO: 22977510 NR Description: hypothetical protein [Ralstonia metallidurans]
  misc_feature (46)..(422): Homolog of NCBI NO: 18976969 NR Description: iaa-amino acid hydrolase homolog 1 precursor
  misc_feature (9)..(425): Homolog of NCBI NO: 21741848 NR Description: OSJNBa0019D11.19 [Oryza sativa (japonica
  misc_feature (34)..(423): Homolog of NCBI NO: 15219390 NR Description: gr1 protein [Arabidopsis thaliana]
  misc_feature (34)..(423): Homolog of NCBI NO: 3559811 NR Description: gr1-protein [Arabidopsis thaliana]
  misc_feature (51)..(423): Homolog of NCBI NO: 22977510 NR Description: hypothetical protein [Ralstonia metallidurans]
  misc_feature (9)..(425): Homolog of NCBI NO: 21741848 NR Description: OSJNBa0019D11.19 [Oryza sativa (japonica
  misc_feature (34)..(423): Homolog of NCBI NO: 3559811 NR Description: gr1-protein [Arabidopsis thaliana]
  misc_feature (1)..(440): Homolog of NCBI NO: 15218027 NR Description: IAA-Ala hydrolase (IAR3) [Arabidopsis thaliana]
  misc_feature (1)..(440): Homolog of NCBI NO: 2181184 NR Description: JR3 protein [Arabidopsis thaliana]
  misc_feature (1)..(433): Homolog of NCBI NO: 15218029 NR Description: auxin conjugate hydrolase (ILL5); protein id:
  misc_feature (15)..(440): Homolog of NCBI NO: 27948556 NR Description: IAA-amino acid hydrolase [Oryza sativa (indica
  misc_feature (7)..(440): Homolog of NCBI NO: 902791 NR Description: ILL2
  misc_feature (34)..(423): Homolog of NCBI NO: 15219390 NR Description: gr1 protein [Arabidopsis thaliana]
  misc_feature (46)..(422): Homolog of NCBI NO: 18976969 NR Description: iaa-amino acid hydrolase homolog 1 precursor
  misc_feature (7)..(440): Homolog of NCBI NO: 902791 NR Description: ILL2
  misc_feature (15)..(440): Homolog of NCBI NO: 27948556 NR Description: IAA-amino acid hydrolase [Oryza sativa (indica
  misc_feature (1)..(433): Homolog of NCBI NO: 15218029 NR Description: auxin conjugate hydrolase (ILL5); protein id:
  misc_feature (1)..(440): Homolog of NCBI NO: 2181184 NR Description: JR3 protein [Arabidopsis thaliana]
  misc_feature (1)..(440): Homolog of NCBI NO: 15218027 NR Description: IAA-Ala hydrolase (IAR3) [Arabidopsis thaliana]
MSFFKWVSFVLILHLLNPTLISCSSNGLSQIPSKFLTLAKRNDFFDWMVGIRRRIHENPELGYEEVETSKLVRAELEKMGVSYKYPVAVTGVVGYVGTGHAPFVALRADMDALAMQEMVEWEHKSKVPGKMHACGHDAHTTMLLGAAKLLKEHEEELQGTVVLVFQPAEEGGGGAKKIVEAGVLENVSAIFGLHVTNQLALGQVSSREGPMLAGSGFFKAKISGKGGHAALPQHTIDPILAASNVIVSLQHLVSREADPLDSQVVTVAKFEGGGAFNVIPDSVTIGGTFRAFSTKSFMQLKKRIEQVITRQASVNMCNATVDFIEEEKPFFPPTVNDKALHQFFKNVSGDMLGIENYVEMQPLMGSEDFSFYQQAIPGHFSFVGMQNKARSPMASPHSPYFEVNEELLPYGASLHASMATRYLLELKASTLNKSNKKDEL

SEQ ID NO: 36084 - protein, 406 aa, Arabidopsis thaliana
  peptide (1)..(406): Ceres Seq. ID no. 13488063
  misc_feature (160)..(271): Pfam Name: Arabidopsis protein of unknown function, DUF266 Pfam Description: Arabidopsis protein of unknown function, DUF266
  misc_feature (160)..(271): Pfam Name: Arabidopsis protein of unknown function, DUF266 Pfam Description: Arabidopsis protein of unknown function, DUF266
  misc_feature (69)..(390): Homolog of NCBI NO: 15219555 NR Description: expressed protein [Arabidopsis thaliana]
  misc_feature (92)..(393): Homolog of NCBI NO: 34895612 NR Description: OSJNBa0083M16.18 [Oryza sativa (japonica
  misc_feature (85)..(393): Homolog of NCBI NO: 34895606 NR Description: OSJNBa0083M16.15 [Oryza sativa (japonica
  misc_feature (92)..(405): Homolog of NCBI NO: 34907318 NR Description: contains ESTs
  misc_feature (85)..(390): Homolog of NCBI NO: 15221386 NR Description: hypothetical protein [Arabidopsis thaliana]
  misc_feature (69)..(390): Homolog of NCBI NO: 15219555 NR Description: expressed protein [Arabidopsis thaliana]
  misc_feature (85)..(393): Homolog of NCBI NO: 34895606 NR Description: OSJNBa0083M16.15 [Oryza sativa (japonica
  misc_feature (85)..(390): Homolog of NCBI NO: 15221386 NR Description: hypothetical protein [Arabidopsis thaliana]
  misc_feature (8)..(406): Homolog of NCBI NO: 15218028 NR Description: hypothetical protein [Arabidopsis thaliana]
  misc_feature (6)..(390): Homolog of NCBI NO: 18402952 NR Description: expressed protein [Arabidopsis thaliana]
  misc_feature (8)..(390): Homolog of NCBI NO: 21554566 NR Description: unknown [Arabidopsis thaliana]
  misc_feature (6)..(354): Homolog of NCBI NO: 9280235 NR Description: gb|AAD40142.1~gene_id:MXL8.19~strong similarity
  misc_feature (84)..(390): Homolog of NCBI NO: 15218485 NR Description: expressed protein [Arabidopsis thaliana]
  misc_feature (92)..(405): Homolog of NCBI NO: 34907318 NR Description: contains ESTs
  misc_feature (92)..(393): Homolog of NCBI NO: 34895612 NR Description: OSJNBa0083M16.18 [Oryza sativa (japonica
  misc_feature (84)..(390): Homolog of NCBI NO: 15218485 NR Description: expressed protein [Arabidopsis thaliana]
  misc_feature (6)..(354): Homolog of NCBI NO: 9280235 NR Description: gb|AAD40142.1~gene_id:MXL8.19~strong similarity
  misc_feature (8)..(390): Homolog of NCBI NO: 21554566 NR Description: unknown [Arabidopsis thaliana]
  misc_feature (6)..(390): Homolog of NCBI NO: 18402952 NR Description: expressed protein [Arabidopsis thaliana]
  misc_feature (8)..(406): Homolog of NCBI NO: 15218028 NR Description: hypothetical protein [Arabidopsis thaliana]
MKVMVMEMEECVKENGSSTPKSRVTNQSRALLPLRLLQILLLFLVLTLGISVVSIHMIKFLKIQRLDPVAPITLLSTYNHESVTLDSFIRPPSNVWHTMNDSELLWRASIEPQRNGYPFKRVPKLAFMFLAKGPLPFAPLWEKFCKGHEGLYSIYVHSLPSYKSDFSRSSVFYRRYIPSQAVAWGEMSMGEAERRLLANALLDISNEWFVLLSESCIPLRGFSFIYSYVSESRYSFMGAADEEGPDGRGRYRTEMEPEITLSQWRKGSQWFEINRKLAVEIVQDTTYYPKFKEFCRPPCYVDEHYFPTMLSMKHRVLLANRTLTWTDWSRGGAHPATFGKADVTESFLKKLTGAKSCLYNDHQSQICYLFARKFAPSALEPLLQLAPKILELGSNISSTRHSWYLF

SEQ ID NO: 36085 - protein, 403 aa, Arabidopsis thaliana
  peptide (1)..(403): Ceres Seq. ID no. 13488064
  misc_feature (157)..(268): Pfam Name: Arabidopsis protein of unknown function, DUF266 Pfam Description: Arabidopsis protein of unknown function, DUF266
  misc_feature (157)..(268): Pfam Name: Arabidopsis protein of unknown function, DUF266 Pfam Description: Arabidopsis protein of unknown function, DUF266
  misc_feature (66)..(387): Homolog of NCBI NO: 15219555 NR Description: expressed protein [Arabidopsis thaliana]
  misc_feature (89)..(390): Homolog of NCBI NO: 34895612 NR Description: OSJNBa0083M16.18 [Oryza sativa (japonica
  misc_feature (82)..(390): Homolog of NCBI NO: 34895606 NR Description: OSJNBa0083M16.15 [Oryza sativa (japonica
  misc_feature (89)..(402): Homolog of NCBI NO: 34907318 NR Description: contains ESTs
  misc_feature (82)..(387): Homolog of NCBI NO: 15221386 NR Description: hypothetical protein [Arabidopsis thaliana]
  misc_feature (66)..(387): Homolog of NCBI NO: 15219555 NR Description: expressed protein [Arabidopsis thaliana]
  misc_feature (82)..(390): Homolog of NCBI NO: 34895606 NR Description: OSJNBa0083M16.15 [Oryza sativa (japonica
  misc_feature (82)..(387): Homolog of NCBI NO: 15221386 NR Description: hypothetical protein [Arabidopsis thaliana]
  misc_feature (5)..(403): Homolog of NCBI NO: 15218028 NR Description: hypothetical protein [Arabidopsis thaliana]
  misc_feature (3)..(387): Homolog of NCBI NO: 18402952 NR Description: expressed protein [Arabidopsis thaliana]
  misc_feature (5)..(387): Homolog of NCBI NO: 21554566 NR Description: unknown [Arabidopsis thaliana]
  misc_feature (3)..(351): Homolog of NCBI NO: 9280235 NR Description: gb|AAD40142.1~gene_id:MXL8.19~strong similarity
  misc_feature (81)..(387): Homolog of NCBI NO: 15218485 NR Description: expressed protein [Arabidopsis thaliana]
  misc_feature (89)..(402): Homolog of NCBI NO: 34907318 NR Description: contains ESTs
  misc_feature (89)..(390): Homolog of NCBI NO: 34895612 NR Description: OSJNBa0083M16.18 [Oryza sativa (japonica
  misc_feature (81)..(387): Homolog of NCBI NO: 15218485 NR Description: expressed protein [Arabidopsis thaliana]
  misc_feature (3)..(351): Homolog of NCBI NO: 9280235 NR Description: gb|AAD40142.1~gene_id:MXL8.19~strong similarity
  misc_feature (5)..(387): Homolog of NCBI NO: 21554566 NR Description: unknown [Arabidopsis thaliana]
  misc_feature (3)..(387): Homolog of NCBI NO: 18402952 NR Description: expressed protein [Arabidopsis thaliana]
  misc_feature (5)..(403): Homolog of NCBI NO: 15218028 NR Description: hypothetical protein [Arabidopsis thaliana]
MVMEMEECVKENGSSTPKSRVTNQSRALLPLRLLQILLLFLVLTLGISVVSIHMIKFLKIQRLDPVAPITLLSTYNHESVTLDSFIRPPSNVWHTMNDSELLWRASIEPQRNGYPFKRVPKLAFMFLAKGPLPFAPLWEKFCKGHEGLYSIYVHSLPSYKSDFSRSSVFYRRYIPSQAVAWGEMSMGEAERRLLANALLDISNEWFVLLSESCIPLRGFSFIYSYVSESRYSFMGAADEEGPDGRGRYRTEMEPEITLSQWRKGSQWFEINRKLAVEIVQDTTYYPKFKEFCRPPCYVDEHYFPTMLSMKHRVLLANRTLTWTDWSRGGAHPATFGKADVTESFLKKLTGAKSCLYNDHQSQICYLFARKFAPSALEPLLQLAPKILELGSNISSTRHSWYLF

SEQ ID NO: 36086 - DNA, 786 bp, Arabidopsis thaliana
  misc_feature (1)..(786): Ceres Seq. ID no. 13490015
  misc_feature: MA Experiment ID: 108434 Result: Up-regulated in Transcription
  misc_feature: MA Experiment 108434 PARAMETER Experiment Name: At_Root_Tips_cDNA_P Parameter: Tissue Value: Root Tips
  misc_feature: MA Experiment ID: 20000180 Result: Up-regulated in Transcription
  misc_feature: MA Experiment 20000180 PARAMETER Experiment Name: At_Germinating_Seeds_P Parameter: Age (hr) Value: 24 vs. 0
  misc_feature: MA Experiment 20000180 PARAMETER Experiment Name: At_Germinating_Seeds_P Parameter: Tissue Value: Germinating Seeds
tttcttcgtttctttgcaaaagaccagcgataattatgaacaaaggcggtggatccggtggcggatccggtggaggaagcggtccaacggccgccgccgccgccgcggctttacagaagcaaaaggcgttgttacagagagtggagactgacatcacatctgtcgtcgataacttcacgcagatcgtcaatgtttcaagggtgagtgatccgccggtgaagaactcgcaggagacatacatgatggagatgcgagcttctagaatggttcaagcagctgattctcttttgaaactcgtatcagaacttaagcaaacagcgatattttcaggatttgcatcactaaacgatcatgtagaacaaagaatagaagagtttgatcaagaggccgagaagacaaatcgattgttggctagaattgctgatgatgcatctgccaatcttaaagagctcgagtctcactattactcttctgctcagagattgactctagacatctgatattagaatgcctggagacaccagaggaaacagataaaacaattggttcataaaccagaggaaacggccatcgaaggatatgcagtttgaagtcatggacaacgttttggactatcctttcccacattgatcatatttcctctctcaattcgcatattacttagcaatcttaaatgttccagtctgatgaacaagcgtttgatgttttcatcaatcattagtgatttttttgctgttatcctcttgtatgttttgataattacgtgaaattacattctcttaacct

SEQ ID NO: 36087 - protein, 165 aa, Arabidopsis thaliana
  peptide (1)..(165): Ceres Seq. ID no. 13490016
  misc_feature (31)..(157): Pfam Name: Surfeit locus protein 5 Pfam Description: Surfeit locus protein 5
  misc_feature (38)..(158): Homolog of NCBI NO: 6175073 NR Description: Surfeit locus protein 5
  misc_feature (38)..(161): Homolog of NCBI NO: 28866782 NR Description: Surf5b [Gallus gallus]
  misc_feature (31)..(157): Homolog of NCBI NO: 5803183 NR Description: surfeit 5 isoform a; surfeit locus protein 5
  misc_feature (31)..(157): Homolog of NCBI NO: 6755700 NR Description: surfeit gene 5 [Mus musculus]
  misc_feature (31)..(161): Homolog of NCBI NO: 19557695 NR Description: surfeit 5 isoform b; surfeit locus protein 5
  misc_feature (22)..(164): Homolog of NCBI NO: 34895594 NR Description: unnamed protein product [Oryza sativa (japonica
  misc_feature (11)..(164): Homolog of NCBI NO: 21553439 NR Description: unknown [Arabidopsis thaliana]
  misc_feature (11)..(164): Homolog of NCBI NO: 18394361 NR Description: expressed protein [Arabidopsis thaliana]
  misc_feature (12)..(165): Homolog of NCBI NO: 18390833 NR Description: expressed protein [Arabidopsis thaliana]
  misc_feature (1)..(165): Homolog of NCBI NO: 25407014 NR Description: protein T6D22.4 [imported] - Arabidopsis thaliana
SSFLCKRPAIIMNKGGGSGGGSGGGSGPTAAAAAAALQKQKALLQRVETDITSVVDNFTQIVNVSRVSDPPVKNSQETYMMEMRASRMVQAADSLLKLVSELKQTAIFSGFASLNDHVEQRIEEFDQEAEKTNRLLARIADDASANLKELESHYYSSAQRLTLDI

SEQ ID NO: 36088 - protein, 154 aa, Arabidopsis thaliana
  peptide (1)..(154): Ceres Seq. ID no. 13490017
  misc_feature (20)..(146): Pfam Name: Surfeit locus protein 5 Pfam Description: Surfeit locus protein 5
  misc_feature (27)..(147): Homolog of NCBI NO: 6175073 NR Description: Surfeit locus protein 5
  misc_feature (27)..(150): Homolog of NCBI NO: 28866782 NR Description: Surf5b [Gallus gallus]
  misc_feature (20)..(146): Homolog of NCBI NO: 5803183 NR Description: surfeit 5 isoform a; surfeit locus protein 5
  misc_feature (20)..(146): Homolog of NCBI NO: 6755700 NR Description: surfeit gene 5 [Mus musculus]
  misc_feature (20)..(150): Homolog of NCBI NO: 19557695 NR Description: surfeit 5 isoform b; surfeit locus protein 5
  misc_feature (11)..(153): Homolog of NCBI NO: 34895594 NR Description: unnamed protein product [Oryza sativa (japonica
  misc_feature (1)..(153): Homolog of NCBI NO: 21553439 NR Description: unknown [Arabidopsis thaliana]
  misc_feature (1)..(153): Homolog of NCBI NO: 18394361 NR Description: expressed protein [Arabidopsis thaliana]
  misc_feature (1)..(154): Homolog of NCBI NO: 18390833 NR Description: expressed protein [Arabidopsis thaliana]
  misc_feature (1)..(154): Homolog of NCBI NO: 25407014 NR Description: protein T6D22.4 [imported] - Arabidopsis thaliana
MNKGGGSGGGSGGGSGPTAAAAAAALQKQKALLQRVETDITSVVDNFTQIVNVSRVSDPPVKNSQETYMMEMRASRMVQAADSLLKLVSELKQTAIFSGFASLNDHVEQRIEEFDQEAEKTNRLLARIADDASANLKELESHYYSSAQRLTLDI

SEQ ID NO: 36089 - protein, 86 aa, Arabidopsis thaliana
  peptide (1)..(86): Ceres Seq. ID no. 13490018
  misc_feature (1)..(78): Pfam Name: Surfeit locus protein 5 Pfam Description: Surfeit locus protein 5
  misc_feature (1)..(79): Homolog of NCBI NO: 6175073 NR Description: Surfeit locus protein 5
  misc_feature (1)..(82): Homolog of NCBI NO: 28866782 NR Description: Surf5b [Gallus gallus]
  misc_feature (1)..(78): Homolog of NCBI NO: 5803183 NR Description: surfeit 5 isoform a; surfeit locus protein 5
  misc_feature (1)..(78): Homolog of NCBI NO: 6755700 NR Description: surfeit gene 5 [Mus musculus]
  misc_feature (1)..(82): Homolog of NCBI NO: 19557695 NR Description: surfeit 5 isoform b; surfeit locus protein 5
  misc_feature (1)..(85): Homolog of NCBI NO: 34895594 NR Description: unnamed protein product [Oryza sativa (japonica
  misc_feature (1)..(85): Homolog of NCBI NO: 21553439 NR Description: unknown [Arabidopsis thaliana]
  misc_feature (1)..(85): Homolog of NCBI NO: 18394361 NR Description: expressed protein [Arabidopsis thaliana]
  misc_feature (1)..(86): Homolog of NCBI NO: 18390833 NR Description: expressed protein [Arabidopsis thaliana]
  misc_feature (1)..(86): Homolog of NCBI NO: 25407014 NR Description: protein T6D22.4 [imported] - Arabidopsis thaliana
MMEMRASRMVQAADSLLKLVSELKQTAIFSGFASLNDHVEQRIEEFDQEAEKTNRLLARIADDASANLKELESHYYSSAQRLTLDI

SEQ ID NO: 36090 - DNA, 691 bp, Arabidopsis thaliana
  misc_feature (1)..(691): Ceres Seq. ID no. 12369923
  misc_feature: MA Experiment ID: 108461 Result: Up-regulated in Transcription
  misc_feature: MA Experiment 108461 PARAMETER Experiment Name: At_Germinating_Seeds_cDNA_P Parameter: Age (day) Value: 1 vs. 0
  misc_feature: MA Experiment 108461 PARAMETER Experiment Name: At_Germinating_Seeds_cDNA_P Parameter: Tissue Value: Germinating Seeds
  misc_feature: MA Experiment ID: 108462 Result: Up-regulated in Transcription
  misc_feature: MA Experiment 108462 PARAMETER Experiment Name: At_Germinating_Seeds_cDNA_P Parameter: Age (day) Value: 2 vs. 0
  misc_feature: MA Experiment 108462 PARAMETER Experiment Name: At_Germinating_Seeds_cDNA_P Parameter: Tissue Value: Germinating Seeds
  misc_feature: MA Experiment ID: 108463 Result: Up-regulated in Transcription
  misc_feature: MA Experiment 108463 PARAMETER Experiment Name: At_Germinating_Seeds_cDNA_P Parameter: Age (day) Value: 3 vs. 0
  misc_feature: MA Experiment 108463 PARAMETER Experiment Name: At_Germinating_Seeds_cDNA_P Parameter: Tissue Value: Germinating Seeds
  misc_feature: MA Experiment ID: 108464 Result: Up-regulated in Transcription
  misc_feature: MA Experiment 108464 PARAMETER Experiment Name: At_Germinating_Seeds_cDNA_P Parameter: Age (day) Value: 4 vs. 0
  misc_feature: MA Experiment 108464 PARAMETER Experiment Name: At_Germinating_Seeds_cDNA_P Parameter: Tissue Value: Germinating Seeds
  misc_feature: MA Experiment ID: 108595 Result: Up-regulated in Transcription
  misc_feature: MA Experiment 108595 PARAMETER Experiment Name: At_Ler-pi_Ovule_cDNA_P Parameter: Plant Line Value: null
  misc_feature: MA Experiment ID: 20000112 Result: Up-regulated in Transcription
  misc_feature: MA Experiment 20000112 PARAMETER Experiment Name: At_42deg_Heat_cDNA_P Parameter: Temperature (deg C) Value: 42 vs. 22
  misc_feature: MA Experiment 20000112 PARAMETER Experiment Name: At_42deg_Heat_cDNA_P Parameter: Timepoint (hr) Value: 2
  misc_feature: MA Experiment 20000112 PARAMETER Experiment Name: At_42deg_Heat_cDNA_P Parameter: Tissue Value: Aerial
  misc_feature: MA Experiment ID: 20000180 Result: Up-regulated in Transcription
  misc_feature: MA Experiment 20000180 PARAMETER Experiment Name: At_Germinating_Seeds_P Parameter: Age (hr) Value: 24 vs. 0
  misc_feature: MA Experiment 20000180 PARAMETER Experiment Name: At_Germinating_Seeds_P Parameter: Tissue Value: Germinating Seeds
  misc_feature: MA Experiment ID: 20000185 Result: Up-regulated in Transcription
  misc_feature: MA Experiment 20000185 PARAMETER Experiment Name: At_Roots__P Parameter: Age (day) Value: 7 vs. 21
  misc_feature: MA Experiment 20000185 PARAMETER Experiment Name: At_Roots__P Parameter: Organism Value: A. thaliana
  misc_feature: MA Experiment 20000185 PARAMETER Experiment Name: At_Roots__P Parameter: Tissue Value: Roots vs. Whole Plant
  misc_feature: MA Experiment ID: 20000227 Result: Up-regulated in Transcription
  misc_feature: MA Experiment 20000227 PARAMETER Experiment Name: At_Root-Tips-vs-Tops_P Parameter: Tissue Value: Root Tips vs. Root Tops
  misc_feature: MA Experiment ID: 20000439 Result: Up-regulated in Transcription
  misc_feature: MA Experiment 20000439 PARAMETER Experiment Name: At_Roots__P Parameter: Age (day) Value: 14 vs. 21
  misc_feature: MA Experiment 20000439 PARAMETER Experiment Name: At_Roots__P Parameter: Organism Value: A. thaliana
  misc_feature: MA Experiment 20000439 PARAMETER Experiment Name: At_Roots__P Parameter: Tissue Value: Roots vs. Whole Plant
  misc_feature: MA Experiment ID: 20000527 Result: Down-regulated in Transcription
  misc_feature: MA Experiment 20000527 PARAMETER Experiment Name: At_10percent_PEG_P Parameter: Age (day) Value: 20
  misc_feature: MA Experiment 20000527 PARAMETER Experiment Name: At_10percent_PEG_P Parameter: Organism Value: A. thaliana
  misc_feature: MA Experiment 20000527 PARAMETER Experiment Name: At_10percent_PEG_P Parameter: Plant Line Value: WS
  misc_feature: MA Experiment 20000527 PARAMETER Experiment Name: At_10percent_PEG_P Parameter: Timepoint (day) Value: 20
  misc_feature: MA Experiment 20000527 PARAMETER Experiment Name: At_10percent_PEG_P Parameter: Tissue Value: Whole Plant
  misc_feature: MA Experiment 20000527 PARAMETER Experiment Name: At_10percent_PEG_P Parameter: Treatment Value: 10percent PEG vs. No Treatment
aaacccccccaatcctcctcactcttccctatcctcttcatttttcccaatcatcaaacacaagattagagttcgattctccaaagaaaatatggctaattcagcgtctgggatgcatgtgaatgatgaatgcaagattaagttcttagagttgaaagcaaagaggacttacaggttcattgtgttcaaaattgatgagaaggcacagcaagtgcaaatagaaaagcttgggaatccagaagaaacttacgacgattttaccagctctatccccgatgacgaatgccgatacgctgtctacgattttgatttcaccacagaggacaattgtcagaagagcaagatctttttcatcgcgtggtcacctgatacatcgagagttcggagtaagatgttgtatgcaagctcaaaagacaggttcaagagagaaatggaaggaattcaagttgaattgcaagcaactgatcctagtgagatgagccttgacatcatcaaaggacgactcaatctctgagcaacaacaacattctaatgcatcctttattcgtttcaaattgttaagctttaacatgccattttcttggaccatttctgcttttgcttgtccgctatattacattttgtgtggattcaatgtctttaaattgttttgtttttcacaagaaagaaaaaaaagaatgataattatttt

SEQ ID NO: 36091 - protein, 170 aa, Arabidopsis thaliana
  peptide (1)..(170): Ceres Seq. ID no. 12369924
  misc_feature (42)..(169): Pfam Name: Cofilin/tropomyosin-type actin-binding protein Pfam Description: Cofilin/tropomyosin-type actin-binding protein
  misc_feature (31)..(167): Homolog of NCBI NO: 17366765 NR Description: Actin-depolymerizing factor 2 (ADF 2)
  misc_feature (31)..(169): Homolog of NCBI NO: 17366768 NR Description: Actin-depolymerizing factor 1 (ADF 1)
  misc_feature (31)..(167): Homolog of NCBI NO: 21537061 NR Description: actin depolymerizing factor-like [Arabidopsis
  misc_feature (31)..(167): Homolog of NCBI NO: 18423381 NR Description: actin depolymerizing factor-like
  misc_feature (31)..(167): Homolog of NCBI NO: 38345587 NR Description: OSJNBb0012E24.5 [Oryza sativa (japonica
  misc_feature (31)..(167): Homolog of NCBI NO: 22857914 NR Description: pollen specific actin-depolymerizing factor 2
  misc_feature (31)..(167): Homolog of NCBI NO: 231509 NR Description: Actin-depolymerizing factor (ADF)
  misc_feature (31)..(170): Homolog of NCBI NO: 15223471 NR Description: actin depolymerizing factor, putative
  misc_feature (38)..(170): Homolog of NCBI NO: 7441448 NR Description: actin-depolymerizing factor F6N23.12 -
  misc_feature (31)..(170): Homolog of NCBI NO: 18411410 NR Description: putative actin-depolymerizing factor
NPPNPPHSSLSSSFFPIIKHKIRVRFSKENMANSASGMHVNDECKIKFLELKAKRTYRFIVFKIDEKAQQVQIEKLGNPEETYDDFTSSIPDDECRYAVYDFDFTTEDNCQKSKIFFIAWSPDTSRVRSKMLYASSKDRFKREMEGIQVELQATDPSEMSLDIIKGRLNL

SEQ ID NO: 36092 - protein, 140 aa, Arabidopsis thaliana
  peptide (1)..(140): Ceres Seq. ID no. 12369925
  misc_feature (12)..(139): Pfam Name: Cofilin/tropomyosin-type actin-binding protein Pfam Description: Cofilin/tropomyosin-type actin-binding protein
  misc_feature (1)..(137): Homolog of NCBI NO: 17366765 NR Description: Actin-depolymerizing factor 2 (ADF 2)
  misc_feature (1)..(139): Homolog of NCBI NO: 17366768 NR Description: Actin-depolymerizing factor 1 (ADF 1)
  misc_feature (1)..(137): Homolog of NCBI NO: 21537061 NR Description: actin depolymerizing factor-like [Arabidopsis
  misc_feature (1)..(137): Homolog of NCBI NO: 18423381 NR Description: actin depolymerizing factor-like
  misc_feature (1)..(137): Homolog of NCBI NO: 38345587 NR Description: OSJNBb0012E24.5 [Oryza sativa (japonica
  misc_feature (1)..(137): Homolog of NCBI NO: 22857914 NR Description: pollen specific actin-depolymerizing factor 2
  misc_feature (1)..(137): Homolog of NCBI NO: 231509 NR Description: Actin-depolymerizing factor (ADF)
  misc_feature (1)..(140): Homolog of NCBI NO: 15223471 NR Description: actin depolymerizing factor, putative
  misc_feature (8)..(140): Homolog of NCBI NO: 7441448 NR Description: actin-depolymerizing factor F6N23.12 -
  misc_feature (1)..(140): Homolog of NCBI NO: 18411410 NR Description: putative actin-depolymerizing factor
MANSASGMHVNDECKIKFLELKAKRTYRFIVFKIDEKAQQVQIEKLGNPEETYDDFTSSIPDDECRYAVYDFDFTTEDNCQKSKIFFIAWSPDTSRVRSKMLYASSKDRFKREMEGIQVELQATDPSEMSLDIIKGRLNL

SEQ ID NO: 36093 - protein, 133 aa, Arabidopsis thaliana
  peptide (1)..(133): Ceres Seq. ID no. 12369926
  misc_feature (5)..(132): Pfam Name: Cofilin/tropomyosin-type actin-binding protein Pfam Description: Cofilin/tropomyosin-type actin-binding protein
  misc_feature (1)..(130): Homolog of NCBI NO: 17366765 NR Description: Actin-depolymerizing factor 2 (ADF 2)
  misc_feature (1)..(132): Homolog of NCBI NO: 17366768 NR Description: Actin-depolymerizing factor 1 (ADF 1)
  misc_feature (1)..(130): Homolog of NCBI NO: 21537061 NR Description: actin depolymerizing factor-like [Arabidopsis
  misc_feature (1)..(130): Homolog of NCBI NO: 18423381 NR Description: actin depolymerizing factor-like
  misc_feature (1)..(130): Homolog of NCBI NO: 38345587 NR Description: OSJNBb0012E24.5 [Oryza sativa (japonica
  misc_feature (1)..(130): Homolog of NCBI NO: 22857914 NR Description: pollen specific actin-depolymerizing factor 2
  misc_feature (1)..(130): Homolog of NCBI NO: 231509 NR Description: Actin-depolymerizing factor (ADF)
  misc_feature (1)..(133): Homolog of NCBI NO: 15223471 NR Description: actin depolymerizing factor, putative
  misc_feature (1)..(133): Homolog of NCBI NO: 7441448 NR Description: actin-depolymerizing factor F6N23.12 -
  misc_feature (1)..(133): Homolog of NCBI NO: 18411410 NR Description: putative actin-depolymerizing factor
MHVNDECKIKFLELKAKRTYRFIVFKIDEKAQQVQIEKLGNPEETYDDFTSSIPDDECRYAVYDFDFTTEDNCQKSKIFFIAWSPDTSRVRSKMLYASSKDRFKREMEGIQVELQATDPSEMSLDIIKGRLNL

SEQ ID NO: 36094 - DNA, 1620 bp, Arabidopsis thaliana; identical to SEQ ID NO: 22730
  misc_feature (1)..(1620): Ceres Seq. ID no. 12322395
  misc_feature: MA Experiment ID: 108489 Result: Up-regulated in Transcription
  misc_feature: MA Experiment ID: 20000264 Result: Up-regulated in Transcription
  misc_feature: MA Experiment 20000264 PARAMETER Experiment Name: At_Open_Flower_P Parameter: Age (day) Value: 21
  misc_feature: MA Experiment 20000264 PARAMETER Experiment Name: At_Open_Flower_P Parameter: Plant Line Value: WS
  misc_feature: MA Experiment 20000264 PARAMETER Experiment Name: At_Open_Flower_P Parameter: Tissue Value: Open Flower vs. Whole Plant
  misc_feature: MA Experiment ID: 20000286 Result: Up-regulated in Transcription
  misc_feature: MA Experiment 20000286 PARAMETER Experiment Name: At_Open_Flower_P Parameter: Age (day) Value: 21
  misc_feature: MA Experiment 20000286 PARAMETER Experiment Name: At_Open_Flower_P Parameter: Plant Line Value: WS
  misc_feature: MA Experiment 20000286 PARAMETER Experiment Name: At_Open_Flower_P Parameter: Tissue Value: Half Open vs. Whole Plant
  misc_feature: MA Experiment ID: 20000439 Result: Up-regulated in Transcription
  misc_feature: MA Experiment 20000439 PARAMETER Experiment Name: At_Roots__P Parameter: Age (day) Value: 14 vs. 21
  misc_feature: MA Experiment 20000439 PARAMETER Experiment Name: At_Roots__P Parameter: Organism Value: A. thaliana
  misc_feature: MA Experiment 20000439 PARAMETER Experiment Name: At_Roots__P Parameter: Tissue Value: Roots vs. Whole Plant
  misc_feature: MA Experiment ID: 20000495 Result: Up-regulated in Transcription
  misc_feature: MA Experiment 20000495 PARAMETER Experiment Name: At_Guard_Cells_P Parameter: Harvest Date Value: 8/2/2002
  misc_feature: MA Experiment 20000495 PARAMETER Experiment Name: At_Guard_Cells_P Parameter: Organism Value: A. thaliana
  misc_feature: MA Experiment 20000495 PARAMETER Experiment Name: At_Guard_Cells_P Parameter: Tissue Value: Guard Cells vs. Leaves
  misc_feature: MA Experiment ID: 20000496 Result: Up-regulated in Transcription
  misc_feature: MA Experiment 20000496 PARAMETER Experiment Name: At_Guard_Cells_P Parameter: Harvest Date Value: 7/19/2002
  misc_feature: MA Experiment 20000496 PARAMETER Experiment Name: At_Guard_Cells_P Parameter: Organism Value: Canola
  misc_feature: MA Experiment 20000496 PARAMETER Experiment Name: At_Guard_Cells_P Parameter: Tissue Value: Guard Cells vs. Leaves
  misc_feature: MA Experiment ID: 20000794 Result: Up-regulated in Transcription
  misc_feature: MA Experiment 20000794 PARAMETER Experiment Name: At_Petals_P Parameter: Age (day) Value: 23-25 days
  misc_feature: MA Experiment 20000794 PARAMETER Experiment Name: At_Petals_P Parameter: Plant Line Value: WS
  misc_feature: MA Experiment 20000794 PARAMETER Experiment Name: At_Petals_P Parameter: Tissue Value: Petals vs. Whole plant
  misc_feature: MA Experiment ID: 20001451 Result: Up-regulated in Transcription
  misc_feature: MA Experiment 20001451 PARAMETER Experiment Name: At_Far-red-induction_P Parameter: Age (day) Value: 7
  misc_feature: MA Experiment 20001451 PARAMETER Experiment Name: At_Far-red-induction_P Parameter: Light Value: Far-red vs. White
  misc_feature: MA Experiment 20001451 PARAMETER Experiment Name: At_Far-red-induction_P Parameter: Organism Value: A. thaliana
  misc_feature: MA Experiment 20001451 PARAMETER Experiment Name: At_Far-red-induction_P Parameter: Plant Line Value: Columbia
  misc_feature: MA Experiment 20001451 PARAMETER Experiment Name: At_Far-red-induction_P Parameter: Timepoint (hr) Value: 24
  misc_feature: MA Experiment 20001451 PARAMETER Experiment Name: At_Far-red-induction_P Parameter: Tissue Value: Whole Plant

SEQ ID NO: 36095 - protein, 388 aa, Arabidopsis thaliana; identical to SEQ ID NO: 22731
  peptide (1)..(388): Ceres Seq. ID no. 12322396
  misc_feature (40)..(387): Homolog of NCBI NO: 9295277 NR Description: glucose-6P/phosphate translocator precursor
  misc_feature (53)..(387): Homolog of NCBI NO: 27752361 NR Description: glucose-6-phosphate/phosphate translocator 2
  misc_feature (53)..(387): Homolog of NCBI NO: 7489258 NR Description: probable
  misc_feature (8)..(385): Homolog of NCBI NO: 7484980 NR Description: glucose-6-phosphate/phosphate translocator
  misc_feature (8)..(387): Homolog of NCBI NO: 14596173 NR Description: Similar to
  misc_feature (8)..(387): Homolog of NCBI NO: 18407336 NR Description: glucose-6-phosphate/phosphate-translocator
  misc_feature (1)..(387): Homolog of NCBI NO: 7488807 NR Description: glucose-6-phosphate/phosphate-translocator
  misc_feature (1)..(388): Homolog of NCBI NO: 9758260 NR Description: glucose-6-phosphate/phosphate translocator
  misc_feature (1)..(388): Homolog of NCBI NO: 21554690 NR Description: glucose-6-phosphate/phosphate translocator
  misc_feature (1)..(388): Homolog of NCBI NO: 18423670 NR Description: glucose-6-phosphate/phosphate translocator
  misc_feature (40)..(387): Homolog of NCBI NO: 9295277 NR Description: glucose-6P/phosphate translocator precursor
  misc_feature (53)..(387): Homolog of NCBI NO: 27752361 NR Description: glucose-6-phosphate/phosphate translocator 2
  misc_feature (53)..(387): Homolog of NCBI NO: 7489258 NR Description: probable
  misc_feature (8)..(385): Homolog of NCBI NO: 7484980 NR Description: glucose-6-phosphate/phosphate translocator
  misc_feature (8)..(387): Homolog of NCBI NO: 14596173 NR Description: Similar to
  misc_feature (8)..(387): Homolog of NCBI NO: 18407336 NR Description: glucose-6-phosphate/phosphate-translocator
  misc_feature (1)..(387): Homolog of NCBI NO: 7488807 NR Description: glucose-6-phosphate/phosphate-translocator
  misc_feature (1)..(388): Homolog of NCBI NO: 9758260 NR Description: glucose-6-phosphate/phosphate translocator
  misc_feature (1)..(388): Homolog of NCBI NO: 21554690 NR Description: glucose-6-phosphate/phosphate translocator
  misc_feature (1)..(388): Homolog of NCBI NO: 18423670 NR Description: glucose-6-phosphate/phosphate translocator

SEQ ID NO: 36096 - protein, 250 aa, Arabidopsis thaliana; identical to SEQ ID NO: 22732
  peptide (1)..(250): Ceres Seq. ID no. 12322397
  misc_feature (1)..(249): Homolog of NCBI NO: 9295277 NR Description: glucose-6P/phosphate translocator precursor
  misc_feature (1)..(249): Homolog of NCBI NO: 27752361 NR Description: glucose-6-phosphate/phosphate translocator 2
  misc_feature (1)..(249): Homolog of NCBI NO: 7489258 NR Description: probable
  misc_feature (1)..(247): Homolog of NCBI NO: 7484980 NR Description: glucose-6-phosphate/phosphate translocator
  misc_feature (1)..(249): Homolog of NCBI NO: 14596173 NR Description: Similar to
  misc_feature (1)..(249): Homolog of NCBI NO: 18407336 NR Description: glucose-6-phosphate/phosphate-translocator
  misc_feature (1)..(249): Homolog of NCBI NO: 7488807 NR Description: glucose-6-phosphate/phosphate-translocator
  misc_feature (1)..(250): Homolog of NCBI NO: 9758260 NR Description: glucose-6-phosphate/phosphate translocator
  misc_feature (1)..(250): Homolog of NCBI NO: 21554690 NR Description: glucose-6-phosphate/phosphate translocator
  misc_feature (1)..(250): Homolog of NCBI NO: 18423670 NR Description: glucose-6-phosphate/phosphate translocator
  misc_feature (1)..(249): Homolog of NCBI NO: 9295277 NR Description: glucose-6P/phosphate translocator precursor
  misc_feature (1)..(249): Homolog of NCBI NO: 27752361 NR Description: glucose-6-phosphate/phosphate translocator 2
  misc_feature (1)..(249): Homolog of NCBI NO: 7489258 NR Description: probable
  misc_feature (1)..(247): Homolog of NCBI NO: 7484980 NR Description: glucose-6-phosphate/phosphate translocator
  misc_feature (1)..(249): Homolog of NCBI NO: 14596173 NR Description: Similar to
  misc_feature (1)..(249): Homolog of NCBI NO: 18407336 NR Description: glucose-6-phosphate/phosphate-translocator
  misc_feature (1)..(249): Homolog of NCBI NO: 7488807 NR Description: glucose-6-phosphate/phosphate-translocator
  misc_feature (1)..(250): Homolog of NCBI NO: 9758260 NR Description: glucose-6-phosphate/phosphate translocator
  misc_feature (1)..(250): Homolog of NCBI NO: 21554690 NR Description: glucose-6-phosphate/phosphate translocator
  misc_feature (1)..(250): Homolog of NCBI NO: 18423670 NR Description: glucose-6-phosphate/phosphate translocator

SEQ ID NO: 36097 - protein, 249 aa, Arabidopsis thaliana; identical to SEQ ID NO: 22733
  peptide (1)..(249): Ceres Seq. ID no. 12322398
  misc_feature (1)..(248): Homolog of NCBI NO: 9295277 NR Description: glucose-6P/phosphate translocator precursor
  misc_feature (1)..(248): Homolog of NCBI NO: 27752361 NR Description: glucose-6-phosphate/phosphate translocator 2
  misc_feature (1)..(248): Homolog of NCBI NO: 7489258 NR Description: probable
  misc_feature (1)..(246): Homolog of NCBI NO: 7484980 NR Description: glucose-6-phosphate/phosphate translocator
  misc_feature (1)..(248): Homolog of NCBI NO: 14596173 NR Description: Similar to
  misc_feature (1)..(248): Homolog of NCBI NO: 18407336 NR Description: glucose-6-phosphate/phosphate-translocator
  misc_feature (1)..(248): Homolog of NCBI NO: 7488807 NR Description: glucose-6-phosphate/phosphate-translocator
  misc_feature (1)..(249): Homolog of NCBI NO: 9758260 NR Description: glucose-6-phosphate/phosphate translocator
  misc_feature (1)..(249): Homolog of NCBI NO: 21554690 NR Description: glucose-6-phosphate/phosphate translocator
  misc_feature (1)..(249): Homolog of NCBI NO: 18423670 NR Description: glucose-6-phosphate/phosphate translocator
  misc_feature (1)..(248): Homolog of NCBI NO: 9295277 NR Description: glucose-6P/phosphate translocator precursor
  misc_feature (1)..(248): Homolog of NCBI NO: 27752361 NR Description: glucose-6-phosphate/phosphate translocator 2
  misc_feature (1)..(248): Homolog of NCBI NO: 7489258 NR Description: probable
  misc_feature (1)..(246): Homolog of NCBI NO: 7484980 NR Description: glucose-6-phosphate/phosphate translocator
  misc_feature (1)..(248): Homolog of NCBI NO: 14596173 NR Description: Similar to
  misc_feature (1)..(248): Homolog of NCBI NO: 18407336 NR Description: glucose-6-phosphate/phosphate-translocator
  misc_feature (1)..(248): Homolog of NCBI NO: 7488807 NR Description: glucose-6-phosphate/phosphate-translocator
  misc_feature (1)..(249): Homolog of NCBI NO: 9758260 NR Description: glucose-6-phosphate/phosphate translocator
  misc_feature (1)..(249): Homolog of NCBI NO: 21554690 NR Description: glucose-6-phosphate/phosphate translocator
  misc_feature (1)..(249): Homolog of NCBI NO: 18423670 NR Description: glucose-6-phosphate/phosphate translocator

SEQ ID NO: 36098 - DNA, 621 bp, Arabidopsis thaliana
  misc_feature (1)..(621): Ceres Seq. ID no. 12334211
  misc_feature: MA Experiment ID: 108434 Result: Up-regulated in Transcription
  misc_feature: MA Experiment 108434 PARAMETER Experiment Name: At_Root_Tips_cDNA_P Parameter: Tissue Value: Root Tips
  misc_feature: MA Experiment ID: 108461 Result: Down-regulated in Transcription
  misc_feature: MA Experiment 108461 PARAMETER Experiment Name: At_Germinating_Seeds_cDNA_P Parameter: Age (day) Value: 1 vs. 0
  misc_feature: MA Experiment 108461 PARAMETER Experiment Name: At_Germinating_Seeds_cDNA_P Parameter: Tissue Value: Germinating Seeds
  misc_feature: MA Experiment ID: 108462 Result: Down-regulated in Transcription
  misc_feature: MA Experiment 108462 PARAMETER Experiment Name: At_Germinating_Seeds_cDNA_P Parameter: Age (day) Value: 2 vs. 0
  misc_feature: MA Experiment 108462 PARAMETER Experiment Name: At_Germinating_Seeds_cDNA_P Parameter: Tissue Value: Germinating Seeds
  misc_feature: MA Experiment ID: 108463 Result: Down-regulated in Transcription
  misc_feature: MA Experiment 108463 PARAMETER Experiment Name: At_Germinating_Seeds_cDNA_P Parameter: Age (day) Value: 3 vs. 0
  misc_feature: MA Experiment 108463 PARAMETER Experiment Name: At_Germinating_Seeds_cDNA_P Parameter: Tissue Value: Germinating Seeds
  misc_feature: MA Experiment ID: 108464 Result: Down-regulated in Transcription
  misc_feature: MA Experiment 108464 PARAMETER Experiment Name: At_Germinating_Seeds_cDNA_P Parameter: Age (day) Value: 4 vs. 0
  misc_feature: MA Experiment 108464 PARAMETER Experiment Name: At_Germinating_Seeds_cDNA_P Parameter: Tissue Value: Germinating Seeds
  misc_feature: MA Experiment ID: 108569 Result: Down-regulated in Transcription
  misc_feature: MA Experiment 108569 PARAMETER Experiment Name: At_0.001%_MeJA__cDNA_P Parameter: Timepoint (hr) Value: 6
  misc_feature: MA Experiment 108569 PARAMETER Experiment Name: At_0.001%_MeJA__cDNA_P Parameter: Tissue Value: Aerial
  misc_feature: MA Experiment 108569 PARAMETER Experiment Name: At_0.001%_MeJA__cDNA_P Parameter: Treatment Value: 0.001% MeJA vs. No Treatment
  misc_feature: MA Experiment ID: 108573 Result: Down-regulated in Transcription
  misc_feature: MA Experiment 108573 PARAMETER Experiment Name: At_Drought_cDNA_P Parameter: Timepoint (hr) Value: 6
  misc_feature: MA Experiment 108573 PARAMETER Experiment Name: At_Drought_cDNA_P Parameter: Tissue Value: Aerial
  misc_feature: MA Experiment 108573 PARAMETER Experiment Name: At_Drought_cDNA_P Parameter: Treatment Value: Drought vs. No Drought
  misc_feature: MA Experiment ID: 20000090 Result: Up-regulated in Transcription
  misc_feature: MA Experiment ID: 20000224 Result: Down-regulated in Transcription
  misc_feature: MA Experiment ID: 20000794 Result: Down-regulated in Transcription
  misc_feature: MA Experiment 20000794 PARAMETER Experiment Name: At_Petals_P Parameter: Age (day) Value: 23-25 days
  misc_feature: MA Experiment 20000794 PARAMETER Experiment Name: At_Petals_P Parameter: Plant Line Value: WS
  misc_feature: MA Experiment 20000794 PARAMETER Experiment Name: At_Petals_P Parameter: Tissue Value: Petals vs. Whole plant
actttcgagtatcgagtcgtcgttcttcttcttcctctgagagagagatctgcggaaaacgaaagcgagatttatcaggttcggtgattctttgtggagaagaagctcgcgataagtcaacatgagcaagccaatggaagaggataccaatcagggcaagactgaggaagaggaattcaacaccgggccactctctgttcttatgatgagcgtcaagaataacactcaggttttaatcaattgccggaacaacaggaaacttcttgggcgagtgagggcgtttgacagacactgcaacatggttcttgaaaatgtcagagagatgtggactgaggttccgaaaactgggaaaggcaagaagaaagcacttccggtgaacagagatcggttcataagcaagatgtttctacgtggagactcggtcattatcgtcctcaggaatccaaaatgagaggaagagagacttaagagacatgttccttgtttgttgtgctaaaactgataaattcttgtaggtagtagcatcttttaaagttattcgtcacattttcgtttatgtccgaattgacaagatcttttaaagatcttttaaagacatgttccttgtttgttgtttgttcg

SEQ ID NO: 36099 - protein, 109 aa, Arabidopsis thaliana; identical to SEQ ID NO: 22047
  peptide (1)..(109): Ceres Seq. ID no. 12334212
  misc_feature (27)..(106): Pfam Name: LSM domain Pfam Description: LSM domain
  misc_feature (1)..(81): Homolog of NCBI NO: 14596019 NR Description: small nuclear ribonucleoprotein-like protein
  misc_feature (2)..(108): Homolog of NCBI NO: 39592141 NR Description: Hypothetical protein CBG23345 [Caenorhabditis
  misc_feature (1)..(108): Homolog of NCBI NO: 27677236 NR Description: similar to Small nuclear ribonucleoprotein Sm D2
  misc_feature (1)..(108): Homolog of NCBI NO: 22203734 NR Description: small nuclear ribonucleoprotein D2-like protein
  misc_feature (3)..(108): Homolog of NCBI NO: 21357623 NR Description: CG1249-PA [Drosophila melanogaster]
  misc_feature (1)..(108): Homolog of NCBI NO: 26337731 NR Description: unnamed protein product [Mus musculus]
  misc_feature (1)..(108): Homolog of NCBI NO: 4759158 NR Description: small nuclear ribonucleoprotein polypeptide D2
  misc_feature (5)..(109): Homolog of NCBI NO: 21554692 NR Description: small nuclear ribonucleoprotein-like protein
  misc_feature (1)..(109): Homolog of NCBI NO: 30690747 NR Description: small nuclear ribonucleo protein D2 -related
  misc_feature (1)..(109): Homolog of NCBI NO: 18407411 NR Description: putative small nuclear ribonucleoprotein D2

SEQ ID NO: 36100 - protein, 105 aa, Arabidopsis thaliana; identical to SEQ ID NO: 22048
  peptide (1)..(105): Ceres Seq. ID no. 12334213
  misc_feature (23)..(102): Pfam Name: LSM domain Pfam Description: LSM domain
  misc_feature (1)..(77): Homolog of NCBI NO: 14596019 NR Description: small nuclear ribonucleoprotein-like protein
  misc_feature (1)..(104): Homolog of NCBI NO: 39592141 NR Description: Hypothetical protein CBG23345 [Caenorhabditis
  misc_feature (1)..(104): Homolog of NCBI NO: 27677236 NR Description: similar to Small nuclear ribonucleoprotein Sm D2
  misc_feature (1)..(104): Homolog of NCBI NO: 22203734 NR Description: small nuclear ribonucleoprotein D2-like protein
  misc_feature (1)..(104): Homolog of NCBI NO: 21357623 NR Description: CG1249-PA [Drosophila melanogaster]
  misc_feature (1)..(104): Homolog of NCBI NO: 26337731 NR Description: unnamed protein product [Mus musculus]
  misc_feature (1)..(104): Homolog of NCBI NO: 4759158 NR Description: small nuclear ribonucleoprotein polypeptide D2
  misc_feature (1)..(105): Homolog of NCBI NO: 21554692 NR Description: small nuclear ribonucleoprotein-like protein
  misc_feature (1)..(105): Homolog of NCBI NO: 30690747 NR Description: small nuclear ribonucleo protein D2 -related
  misc_feature (1)..(105): Homolog of NCBI NO: 18407411 NR Description: putative small nuclear ribonucleoprotein D2

SEQ ID NO: 36101 - protein, 82 aa, Arabidopsis thaliana; identical to SEQ ID NO: 22049
  peptide (1)..(82): Ceres Seq. ID no. 12334214
  misc_feature (1)..(79): Pfam Name: LSM domain Pfam Description: LSM domain
  misc_feature (1)..(54): Homolog of NCBI NO: 14596019 NR Description: small nuclear ribonucleoprotein-like protein
  misc_feature (1)..(81): Homolog of NCBI NO: 39592141 NR Description: Hypothetical protein CBG23345 [Caenorhabditis
  misc_feature (1)..(81): Homolog of NCBI NO: 27677236 NR Description: similar to Small nuclear ribonucleoprotein Sm D2
  misc_feature (1)..(81): Homolog of NCBI NO: 22203734 NR Description: small nuclear ribonucleoprotein D2-like protein
  misc_feature (1)..(81): Homolog of NCBI NO: 21357623 NR Description: CG1249-PA [Drosophila melanogaster]
  misc_feature (1)..(81): Homolog of NCBI NO: 26337731 NR Description: unnamed protein product [Mus musculus]
  misc_feature (1)..(81): Homolog of NCBI NO: 4759158 NR Description: small nuclear ribonucleoprotein polypeptide D2
  misc_feature (1)..(82): Homolog of NCBI NO: 21554692 NR Description: small nuclear ribonucleoprotein-like protein
  misc_feature (1)..(82): Homolog of NCBI NO: 30690747 NR Description: small nuclear ribonucleo protein D2 -related
  misc_feature (1)..(82): Homolog of NCBI NO: 18407411 NR Description: putative small nuclear ribonucleoprotein D2

SEQ ID NO: 36102 - DNA, 1282 bp, Arabidopsis thaliana
  misc_feature (1)..(1282): Ceres Seq. ID no. 13490127
  misc_feature: MA Experiment ID: 108461 Result: Down-regulated in Transcription
  misc_feature: MA Experiment 108461 PARAMETER Experiment Name: At_Germinating_Seeds_cDNA_P Parameter: Age (day) Value: 1 vs. 0
  misc_feature: MA Experiment 108461 PARAMETER Experiment Name: At_Germinating_Seeds_cDNA_P Parameter: Tissue Value: Germinating Seeds
  misc_feature: MA Experiment ID: 108463 Result: Up-regulated in Transcription
  misc_feature: MA Experiment 108463 PARAMETER Experiment Name: At_Germinating_Seeds_cDNA_P Parameter: Age (day) Value: 3 vs. 0
  misc_feature: MA Experiment 108463 PARAMETER Experiment Name: At_Germinating_Seeds_cDNA_P Parameter: Tissue Value: Germinating Seeds
  misc_feature: MA Experiment ID: 108469 Result: Up-regulated in Transcription
  misc_feature: MA Experiment ID: 108561 Result: Up-regulated in Transcription
  misc_feature: MA Experiment 108561 PARAMETER Experiment Name: At_100uM_ABA_cDNA_P Parameter: Timepoint (hr) Value: 6
  misc_feature: MA Experiment 108561 PARAMETER Experiment Name: At_100uM_ABA_cDNA_P Parameter: Tissue Value: Aerial
  misc_feature: MA Experiment 108561 PARAMETER Experiment Name: At_100uM_ABA_cDNA_P Parameter: Treatment Value: 100uM ABA vs. No Treatment
  misc_feature: MA Experiment ID: 108573 Result: Up-regulated in Transcription
  misc_feature: MA Experiment 108573 PARAMETER Experiment Name: At_Drought_cDNA_P Parameter: Timepoint (hr) Value: 6
  misc_feature: MA Experiment 108573 PARAMETER Experiment Name: At_Drought_cDNA_P Parameter: Tissue Value: Aerial
  misc_feature: MA Experiment 108573 PARAMETER Experiment Name: At_Drought_cDNA_P Parameter: Treatment Value: Drought vs. No Drought
  misc_feature: MA Experiment ID: 108579 Result: Down-regulated in Transcription
  misc_feature: MA Experiment 108579 PARAMETER Experiment Name: At_4deg_Cold_cDNA_P Parameter: Temperature (deg C) Value: 4 vs. 22
  misc_feature: MA Experiment 108579 PARAMETER Experiment Name: At_4deg_Cold_cDNA_P Parameter: Timepoint (hr) Value: 6
  misc_feature: MA Experiment 108579 PARAMETER Experiment Name: At_4deg_Cold_cDNA_P Parameter: Tissue Value: Aerial
  misc_feature: MA Experiment ID: 108607 Result: Up-regulated in Transcription
  misc_feature: MA Experiment 108607 PARAMETER Experiment Name: At_100uM_ABA_cDNA_P Parameter: Timepoint (hr) Value: 4
  misc_feature: MA Experiment 108607 PARAMETER Experiment Name: At_100uM_ABA_cDNA_P Parameter: Tissue Value: Aerial
  misc_feature: MA Experiment 108607 PARAMETER Experiment Name: At_100uM_ABA_cDNA_P Parameter: Treatment Value: 100uM ABA vs. No Treatment
  misc_feature: MA Experiment ID: 20000069 Result: Up-regulated in Transcription
  misc_feature: MA Experiment 20000069 PARAMETER Experiment Name: At_100uM_ABA_Mutants_cDNA_P Parameter: Plant Line Value: CS23
  misc_feature: MA Experiment 20000069 PARAMETER Experiment Name: At_100uM_ABA_Mutants_cDNA_P Parameter: Timepoint (hr) Value: 6
  misc_feature: MA Experiment 20000069 PARAMETER Experiment Name: At_100uM_ABA_Mutants_cDNA_P Parameter: Tissue Value: Aerial
  misc_feature: MA Experiment 20000069 PARAMETER Experiment Name: At_100uM_ABA_Mutants_cDNA_P Parameter: Treatment Value: 100uM ABA vs. No Treatment
  misc_feature: MA Experiment ID: 20000070 Result: Up-regulated in Transcription
  misc_feature: MA Experiment 20000070 PARAMETER Experiment Name: At_100uM_ABA_Mutants_cDNA_P Parameter: Plant Line Value: CS24
  misc_feature: MA Experiment 20000070 PARAMETER Experiment Name: At_100uM_ABA_Mutants_cDNA_P Parameter: Timepoint (hr) Value: 6
  misc_feature: MA Experiment 20000070 PARAMETER Experiment Name: At_100uM_ABA_Mutants_cDNA_P Parameter: Tissue Value: Aerial
  misc_feature: MA Experiment 20000070 PARAMETER Experiment Name: At_100uM_ABA_Mutants_cDNA_P Parameter: Treatment Value: 100uM ABA vs. No Treatment
  misc_feature: MA Experiment ID: 20000071 Result: Up-regulated in Transcription
  misc_feature: MA Experiment 20000071 PARAMETER Experiment Name: At_100uM_ABA_Mutants_cDNA_P Parameter: Plant Line Value: CS8104
  misc_feature: MA Experiment 20000071 PARAMETER Experiment Name: At_100uM_ABA_Mutants_cDNA_P Parameter: Timepoint (hr) Value: 6
  misc_feature: MA Experiment 20000071 PARAMETER Experiment Name: At_100uM_ABA_Mutants_cDNA_P Parameter: Tissue Value: Aerial
  misc_feature: MA Experiment 20000071 PARAMETER Experiment Name: At_100uM_ABA_Mutants_cDNA_P Parameter: Treatment Value: 100uM ABA vs. No Treatment
  misc_feature: MA Experiment ID: 20000072 Result: Up-regulated in Transcription
  misc_feature: MA Experiment 20000072 PARAMETER Experiment Name: At_100uM_ABA_Mutants_cDNA_P Parameter: Plant Line Value: CS8105
  misc_feature: MA Experiment 20000072 PARAMETER Experiment Name: At_100uM_ABA_Mutants_cDNA_P Parameter: Timepoint (hr) Value: 6
  misc_feature: MA Experiment 20000072 PARAMETER Experiment Name: At_100uM_ABA_Mutants_cDNA_P Parameter: Tissue Value: Aerial
  misc_feature: MA Experiment 20000072 PARAMETER Experiment Name: At_100uM_ABA_Mutants_cDNA_P Parameter: Treatment Value: 100uM ABA vs. No Treatment
  misc_feature: MA Experiment ID: 20000086 Result: Up-regulated in Transcription
  misc_feature: MA Experiment 20000086 PARAMETER Experiment Name: At_100uM_ABA_Mutants_cDNA_P Parameter: Plant Line Value: CS22
  misc_feature: MA Experiment 20000086 PARAMETER Experiment Name: At_100uM_ABA_Mutants_cDNA_P Parameter: Timepoint (hr) Value: 6
  misc_feature: MA Experiment 20000086 PARAMETER Experiment Name: At_100uM_ABA_Mutants_cDNA_P Parameter: Tissue Value: Aerial
  misc_feature: MA Experiment 20000086 PARAMETER Experiment Name: At_100uM_ABA_Mutants_cDNA_P Parameter: Treatment Value: 100uM ABA vs. No Treatment
  misc_feature: MA Experiment ID: 20000087 Result: Up-regulated in Transcription
  misc_feature: MA Experiment 20000087 PARAMETER Experiment Name: At_100uM_ABA_Mutants_cDNA_P Parameter: Plant Line Value: WS
  misc_feature: MA Experiment 20000087 PARAMETER Experiment Name: At_100uM_ABA_Mutants_cDNA_P Parameter: Timepoint (hr) Value: 6
  misc_feature: MA Experiment 20000087 PARAMETER Experiment Name: At_100uM_ABA_Mutants_cDNA_P Parameter: Tissue Value: Aerial
  misc_feature: MA Experiment 20000087 PARAMETER Experiment Name: At_100uM_ABA_Mutants_cDNA_P Parameter: Treatment Value: 100uM ABA vs. No Treatment
  misc_feature: MA Experiment ID: 20000088 Result: Up-regulated in Transcription
  misc_feature: MA Experiment 20000088 PARAMETER Experiment Name: At_100uM_ABA_Mutants_cDNA_P Parameter: Plant Line Value: Landsberg
  misc_feature: MA Experiment 20000088 PARAMETER Experiment Name: At_100uM_ABA_Mutants_cDNA_P Parameter: Timepoint (hr) Value: 6
  misc_feature: MA Experiment 20000088 PARAMETER Experiment Name: At_100uM_ABA_Mutants_cDNA_P Parameter: Tissue Value: Aerial
  misc_feature: MA Experiment 20000088 PARAMETER Experiment Name: At_100uM_ABA_Mutants_cDNA_P Parameter: Treatment Value: 100uM ABA vs. No Treatment
  misc_feature: MA Experiment ID: 20000089 Result: Up-regulated in Transcription
  misc_feature: MA Experiment ID: 20000090 Result: Up-regulated in Transcription
  misc_feature: MA Experiment ID: 20000111 Result: Down-regulated in Transcription
  misc_feature: MA Experiment 20000111 PARAMETER Experiment Name: At_42deg_Heat_cDNA_P Parameter: Temperature (deg C) Value: 42 vs. 22
  misc_feature: MA Experiment 20000111 PARAMETER Experiment Name: At_42deg_Heat_cDNA_P Parameter: Timepoint (hr) Value: 6
  misc_feature: MA Experiment 20000111 PARAMETER Experiment Name: At_42deg_Heat_cDNA_P Parameter: Tissue Value: Aerial
  misc_feature: MA Experiment ID: 20000113 Result: Down-regulated in Transcription
  misc_feature: MA Experiment 20000113 PARAMETER Experiment Name: At_42deg_Heat_cDNA_P Parameter: Temperature (deg C) Value: 42 vs. 22
  misc_feature: MA Experiment 20000113 PARAMETER Experiment Name: At_42deg_Heat_cDNA_P Parameter: Timepoint (hr) Value: 8
  misc_feature: MA Experiment 20000113 PARAMETER Experiment Name: At_42deg_Heat_cDNA_P Parameter: Tissue Value: Aerial
  misc_feature: MA Experiment ID: 20000117 Result: Up-regulated in Transcription
  misc_feature: MA Experiment 20000117 PARAMETER Experiment Name: At_100uM_ABA_Mutants_cDNA_P Parameter: Plant Line Value: Columbia
  misc_feature: MA Experiment 20000117 PARAMETER Experiment Name: At_100uM_ABA_Mutants_cDNA_P Parameter: Timepoint (hr) Value: 6
  misc_feature: MA Experiment 20000117 PARAMETER Experiment Name: At_100uM_ABA_Mutants_cDNA_P Parameter: Tissue Value: Aerial
  misc_feature: MA Experiment 20000117 PARAMETER Experiment Name: At_100uM_ABA_Mutants_cDNA_P Parameter: Treatment Value: 100uM ABA vs. No Treatment
  misc_feature: MA Experiment ID: 20000166 Result: Up-regulated in Transcription
  misc_feature: MA Experiment 20000166 PARAMETER Experiment Name: At_100uM_ABA_P Parameter: Age (day) Value: 14
  misc_feature: MA Experiment 20000166 PARAMETER Experiment Name: At_100uM_ABA_P Parameter: Organism Value: A. thaliana
  misc_feature: MA Experiment 20000166 PARAMETER Experiment Name: At_100uM_ABA_P Parameter: Plant Line Value: WS
  misc_feature: MA Experiment 20000166 PARAMETER Experiment Name: At_100uM_ABA_P Parameter: Timepoint (hr) Value: 1
  misc_feature: MA Experiment 20000166 PARAMETER Experiment Name: At_100uM_ABA_P Parameter: Tissue Value: Aerial
  misc_feature: MA Experiment 20000166 PARAMETER Experiment Name: At_100uM_ABA_P Parameter: Treatment Value: 100uM ABA vs. No Treatment
  misc_feature: MA Experiment ID: 20000173 Result: Down-regulated in Transcription
  misc_feature: MA Experiment 20000173 PARAMETER Experiment Name: At_42deg_Heat_P Parameter: Age (day) Value: 14
  misc_feature: MA Experiment 20000173 PARAMETER Experiment Name: At_42deg_Heat_P Parameter: Organism Value: A. thaliana
  misc_feature: MA Experiment 20000173 PARAMETER Experiment Name: At_42deg_Heat_P Parameter: Plant Line Value: WS
  misc_feature: MA Experiment 20000173 PARAMETER Experiment Name: At_42deg_Heat_P Parameter: Temperature (deg C) Value: 42 vs. 22
  misc_feature: MA Experiment 20000173 PARAMETER Experiment Name: At_42deg_Heat_P Parameter: Timepoint (hr) Value: 6
  misc_feature: MA Experiment 20000173 PARAMETER Experiment Name: At_42deg_Heat_P Parameter: Tissue Value: Aerial
  misc_feature: MA Experiment ID: 20000179 Result: Down-regulated in Transcription
  misc_feature: MA Experiment 20000179 PARAMETER Experiment Name: At_Germinating_Seeds_P Parameter: Age (hr) Value: 6 vs. 0
  misc_feature: MA Experiment 20000179 PARAMETER Experiment Name: At_Germinating_Seeds_P Parameter: Tissue Value: Germinating Seeds
  misc_feature: MA Experiment ID: 20000184 Result: Down-regulated in Transcription
  misc_feature: MA Experiment 20000184 PARAMETER Experiment Name: At_Shoots__P Parameter: Age (day) Value: 7
  misc_feature: MA Experiment 20000184 PARAMETER Experiment Name: At_Shoots__P Parameter: Tissue Value: Shoots vs. Whole Plant
  misc_feature: MA Experiment ID: 20000224 Result: Up-regulated in Transcription
  misc_feature: MA Experiment ID: 20000234 Result: Down-regulated in Transcription
  misc_feature: MA Experiment 20000234 PARAMETER Experiment Name: At_Siliques_P Parameter: Age (day) Value: 21
  misc_feature: MA Experiment 20000234 PARAMETER Experiment Name: At_Siliques_P Parameter: Organism Value: A. thaliana
  misc_feature: MA Experiment 20000234 PARAMETER Experiment Name: At_Siliques_P Parameter: Plant Line Value: WS
  misc_feature: MA Experiment 20000234 PARAMETER Experiment Name: At_Siliques_P Parameter: Tissue Value: Less Than 5mm Siliques vs. Whole Plant
  misc_feature: MA Experiment ID: 20000235 Result: Down-regulated in Transcription
  misc_feature: MA Experiment 20000235 PARAMETER Experiment Name: At_Siliques_P Parameter: Age (day) Value: 21
  misc_feature: MA Experiment 20000235 PARAMETER Experiment Name: At_Siliques_P Parameter: Organism Value: A. thaliana
  misc_feature: MA Experiment 20000235 PARAMETER Experiment Name: At_Siliques_P Parameter: Plant Line Value: WS
  misc_feature: MA Experiment 20000235 PARAMETER Experiment Name: At_Siliques_P Parameter: Tissue Value: 5-10mm Siliques vs. Whole Plant
  misc_feature: MA Experiment ID: 20000286 Result: Down-regulated in Transcription
  misc_feature: MA Experiment 20000286 PARAMETER Experiment Name: At_Open_Flower_P Parameter: Age (day) Value: 21
  misc_feature: MA Experiment 20000286 PARAMETER Experiment Name: At_Open_Flower_P Parameter: Plant Line Value: WS
  misc_feature: MA Experiment 20000286 PARAMETER Experiment Name: At_Open_Flower_P Parameter: Tissue Value: Half Open vs. Whole Plant
  misc_feature: MA Experiment ID: 20000437 Result: Up-regulated in Transcription
  misc_feature: MA Experiment 20000437 PARAMETER Experiment Name: At_Drought_P Parameter: Age (day) Value: 8
  misc_feature: MA Experiment 20000437 PARAMETER Experiment Name: At_Drought_P Parameter: Organism Value: A. thaliana
  misc_feature: MA Experiment 20000437 PARAMETER Experiment Name: At_Drought_P Parameter: Plant Line Value: WS
  misc_feature: MA Experiment 20000437 PARAMETER Experiment Name: At_Drought_P Parameter: Timepoint (hr) Value: 24
  misc_feature: MA Experiment 20000437 PARAMETER Experiment Name: At_Drought_P Parameter: Tissue Value: Whole Plant
  misc_feature: MA Experiment 20000437 PARAMETER Experiment Name: At_Drought_P Parameter: Treatment Value: Drought vs. No Drought
  misc_feature: MA Experiment ID: 20001911 Result: Up-regulated in Transcription
  misc_feature: MA Experiment 20001911 PARAMETER Experiment Name: At_Drought_Reproduction_P Parameter: Age (day) Value: 40
  misc_feature: MA Experiment 20001911 PARAMETER Experiment Name: At_Drought_Reproduction_P Parameter: Organism Value: A. thaliana
  misc_feature: MA Experiment 20001911 PARAMETER Experiment Name: At_Drought_Reproduction_P Parameter: Plant Line Value: WS
  misc_feature: MA Experiment 20001911 PARAMETER Experiment Name: At_Drought_Reproduction_P Parameter: Timepoint (day) Value: 10
  misc_feature: MA Experiment 20001911 PARAMETER Experiment Name: At_Drought_Reproduction_P Parameter: Tissue Value: Flowers
  misc_feature: MA Experiment 20001911 PARAMETER Experiment Name: At_Drought_Reproduction_P Parameter: Treatment Value: Drought vs. No Drought
agatcaaccaaaggaagcgaagaagaagaagactttatacactctcgacgctattgatttcgtctgtgcagttttgtttctctatcagttagttttaaagatgagttcttcagagagtgtggaaaacgagtgcatgtgttgggctgcaagagatccatctggtcttctttctcctcatactatcactcgcaggtctgttacaactgacgatgtttcactcacaatcactcattgtggagtgtgttacgctgatgttatctggagtagaaaccaacatggagactccaagtaccctttggttcctgggcatgagattgctggaatagtgactaaggttgggcctaatgttcaacgattcaaagttggagaccatgttggtgttggaacgtatgttaactcctgcagggagtgtgaatattgtaatgaaggacaagaagttaattgtgcgaaaggagtttttactttcaatggcattgatcatgatggctctgttactaaaggaggctactctagtcacattgttgttcatgaaaggtactgctacaagatacctgtggactatcccttggaatcagctgcaccattactctgtgctggaatcacggtttatgctcctatgatgcgtcacaatatgaatcaacctggtaaatctcttggggtgatcgggctaggtggtcttggacacatggcggttaagtttggcaaggcttttggacttagtgttacggtttttagcaccagcatttccaagaaagaagaagctttgaatctgctaggagctgagaatttcgttatctcatctgaccatgaccagatgaaggcactagagaaatctctagactttctagttgacacagcatctggtgatcacgcgtttgatccttacatgtctctcttgaagattgctggaacttatgtattggttggtttcccaagtgaaattaaaatcagtcctgccaatctcaatcttggtatgagaatgctcgctggaagtgtaaccggggggaccaaaataacacagcaaatgttagatttctgtgcagctcataagatttatccaaacatagaggtgattcccattcaaaagataaacgaagctctcgaaagagtggtgaagaaggacatcaagtaccgtttcgtgattgacatcaagaactccctcaaatagatgttgctcaaaggaaggaataatggagtctgtaataagagaataatactcactgctacaatctttattacgtattttctcgtttttcattagtaaagcaaataaattaagact

SEQ ID NO: 36103 - protein, 388 aa, Arabidopsis thaliana
  peptide (1)..(388): Ceres Seq. ID no. 13490128
  misc_feature (34)..(388): Homolog of NCBI NO: 33519154 NR Description: 10-hydroxygeraniol oxidoreductase [Camptotheca
  misc_feature (47)..(388): Homolog of NCBI NO: 38344562 NR Description: OSJNBa0065B15.8 [Oryza sativa (japonica
  misc_feature (34)..(386): Homolog of NCBI NO: 584872 NR Description: Cinnamyl-alcohol dehydrogenase 7/8 (CAD 7/8)
  misc_feature (34)..(386): Homolog of NCBI NO: 10719915 NR Description: Cinnamyl-alcohol dehydrogenase 2 (CAD 2)
  misc_feature (48)..(387): Homolog of NCBI NO: 19849248 NR Description: cinnamyl alcohol dehydrogenase [Lolium perenne]
  misc_feature (47)..(386): Homolog of NCBI NO: 10720088 NR Description: Probable mannitol dehydrogenase (NAD-dependent
  misc_feature (47)..(387): Homolog of NCBI NO: 3913193 NR Description: Probable mannitol dehydrogenase 1 (NAD-dependent
  misc_feature (32)..(387): Homolog of NCBI NO: 22475166 NR Description: putative sinapyl alcohol dehydrogenase
  misc_feature (36)..(388): Homolog of NCBI NO: 37532016 NR Description: putative cinnamyl alcohol dehydrogenase
  misc_feature (34)..(388): Homolog of NCBI NO: 15218564 NR Description: cinnamyl-alcohol dehydrogenase (CAD), putative
DQPKEAKKKKTLYTLDAIDFVCAVLFLYQLVLKMSSSESVENECMCWAARDPSGLLSPHTITRRSVTTDDVSLTITHCGVCYADVIWSRNQHGDSKYPLVPGHEIAGIVTKVGPNVQRFKVGDHVGVGTYVNSCRECEYCNEGQEVNCAKGVFTFNGIDHDGSVTKGGYSSHIVVHERYCYKIPVDYPLESAAPLLCAGITVYAPMMRHNMNQPGKSLGVIGLGGLGHMAVKFGKAFGLSVTVFSTSISKKEEALNLLGAENFVISSDHDQMKALEKSLDFLVDTASGDHAFDPYMSLLKIAGTYVLVGFPSEIKISPANLNLGMRMLAGSVTGGTKITQQMLDFCAAHKIYPNIEVIPIQKINEALERVVKKDIKYRFVIDIKNSLK

SEQ ID NO: 36104 - protein, 355 aa, Arabidopsis thaliana; identical to SEQ ID NO: 23334
  peptide (1)..(355): Ceres Seq. ID no. 13490129
  misc_feature (1)..(355): Homolog of NCBI NO: 33519154 NR Description: 10-hydroxygeraniol oxidoreductase [Camptotheca
  misc_feature (14)..(355): Homolog of NCBI NO: 38344562 NR Description: OSJNBa0065B15.8 [Oryza sativa (japonica
  misc_feature (1)..(353): Homolog of NCBI NO: 584872 NR Description: Cinnamyl-alcohol dehydrogenase 7/8 (CAD 7/8)
  misc_feature (1)..(353): Homolog of NCBI NO: 10719915 NR Description: Cinnamyl-alcohol dehydrogenase 2 (CAD 2)
  misc_feature (15)..(354): Homolog of NCBI NO: 19849248 NR Description: cinnamyl alcohol dehydrogenase [Lolium perenne]
  misc_feature (14)..(353): Homolog of NCBI NO: 10720088 NR Description: Probable mannitol dehydrogenase (NAD-dependent
  misc_feature (14)..(354): Homolog of NCBI NO: 3913193 NR Description: Probable mannitol dehydrogenase 1 (NAD-dependent
  misc_feature (1)..(354): Homolog of NCBI NO: 22475166 NR Description: putative sinapyl alcohol dehydrogenase
  misc_feature (3)..(355): Homolog of NCBI NO: 37532016 NR Description: putative cinnamyl alcohol dehydrogenase
  misc_feature (1)..(355): Homolog of NCBI NO: 15218564 NR Description: cinnamyl-alcohol dehydrogenase (CAD), putative

SEQ ID NO: 36105 - protein, 344 aa, Arabidopsis thaliana; identical to SEQ ID NO: 23335
  peptide (1)..(344): Ceres Seq. ID no. 13490130
  misc_feature (1)..(344): Homolog of NCBI NO: 33519154 NR Description: 10-hydroxygeraniol oxidoreductase [Camptotheca
  misc_feature (3)..(344): Homolog of NCBI NO: 38344562 NR Description: OSJNBa0065B15.8 [Oryza sativa (japonica
  misc_feature (1)..(342): Homolog of NCBI NO: 584872 NR Description: Cinnamyl-alcohol dehydrogenase 7/8 (CAD 7/8)
  misc_feature (1)..(342): Homolog of NCBI NO: 10719915 NR Description: Cinnamyl-alcohol dehydrogenase 2 (CAD 2)
  misc_feature (4)..(343): Homolog of NCBI NO: 19849248 NR Description: cinnamyl alcohol dehydrogenase [Lolium perenne]
  misc_feature (3)..(342): Homolog of NCBI NO: 10720088 NR Description: Probable mannitol dehydrogenase (NAD-dependent
  misc_feature (3)..(343): Homolog of NCBI NO: 3913193 NR Description: Probable mannitol dehydrogenase 1 (NAD-dependent
  misc_feature (1)..(343): Homolog of NCBI NO: 22475166 NR Description: putative sinapyl alcohol dehydrogenase
  misc_feature (1)..(344): Homolog of NCBI NO: 37532016 NR Description: putative cinnamyl alcohol dehydrogenase
  misc_feature (1)..(344): Homolog of NCBI NO: 15218564 NR Description: cinnamyl-alcohol dehydrogenase (CAD), putative

SEQ ID NO: 36106 - DNA, 952 bp, Arabidopsis thaliana
  misc_feature (1)..(952): Ceres Seq. ID no. 12334005
  misc_feature: MA Experiment ID: 108434 Result: Up-regulated in Transcription
  misc_feature: MA Experiment 108434 PARAMETER Experiment Name: At_Root_Tips_cDNA_P Parameter: Tissue Value: Root Tips
  misc_feature: MA Experiment ID: 108463 Result: Down-regulated in Transcription
  misc_feature: MA Experiment 108463 PARAMETER Experiment Name: At_Germinating_Seeds_cDNA_P Parameter: Age (day) Value: 3 vs. 0
  misc_feature: MA Experiment 108463 PARAMETER Experiment Name: At_Germinating_Seeds_cDNA_P Parameter: Tissue Value: Germinating Seeds
  misc_feature: MA Experiment ID: 108464 Result: Down-regulated in Transcription
  misc_feature: MA Experiment 108464 PARAMETER Experiment Name: At_Germinating_Seeds_cDNA_P Parameter: Age (day) Value: 4 vs. 0
  misc_feature: MA Experiment 108464 PARAMETER Experiment Name: At_Germinating_Seeds_cDNA_P Parameter: Tissue Value: Germinating Seeds
  misc_feature: MA Experiment ID: 20000184 Result: Up-regulated in Transcription
  misc_feature: MA Experiment 20000184 PARAMETER Experiment Name: At_Shoots__P Parameter: Age (day) Value: 7
  misc_feature: MA Experiment 20000184 PARAMETER Experiment Name: At_Shoots__P Parameter: Tissue Value: Shoots vs. Whole Plant
  misc_feature: MA Experiment ID: 20000224 Result: Down-regulated in Transcription
  misc_feature: MA Experiment ID: 20000437 Result: Down-regulated in Transcription
  misc_feature: MA Experiment 20000437 PARAMETER Experiment Name: At_Drought_P Parameter: Age (day) Value: 8
  misc_feature: MA Experiment 20000437 PARAMETER Experiment Name: At_Drought_P Parameter: Organism Value: A. thaliana
  misc_feature: MA Experiment 20000437 PARAMETER Experiment Name: At_Drought_P Parameter: Plant Line Value: WS
  misc_feature: MA Experiment 20000437 PARAMETER Experiment Name: At_Drought_P Parameter: Timepoint (hr) Value: 24
  misc_feature: MA Experiment 20000437 PARAMETER Experiment Name: At_Drought_P Parameter: Tissue Value: Whole Plant
  misc_feature: MA Experiment 20000437 PARAMETER Experiment Name: At_Drought_P Parameter: Treatment Value: Drought vs. No Drought
  misc_feature: MA Experiment ID: 20000438 Result: Up-regulated in Transcription
  misc_feature: MA Experiment 20000438 PARAMETER Experiment Name: At_Shoots__P Parameter: Age (day) Value: 14
  misc_feature: MA Experiment 20000438 PARAMETER Experiment Name: At_Shoots__P Parameter: Tissue Value: Shoots vs. Whole Plant
  misc_feature: MA Experiment ID: 20000794 Result: Down-regulated in Transcription
  misc_feature: MA Experiment 20000794 PARAMETER Experiment Name: At_Petals_P Parameter: Age (day) Value: 23-25 days
  misc_feature: MA Experiment 20000794 PARAMETER Experiment Name: At_Petals_P Parameter: Plant Line Value: WS
  misc_feature: MA Experiment 20000794 PARAMETER Experiment Name: At_Petals_P Parameter: Tissue Value: Petals vs. Whole plant
ctgaagaacgaagaaccgtctctaaaactccgacgaacgaaaaatgaagtcattagcttcgccgccgtgtctccgcctgataccgacggcacaccgtcagctcaattcgcgtcaatcttcctccgcctgttatatacacggtggctcttctgtgaacaaatccaataatctctcattctcctcatccacatccggatttgcgtcaccactagctgtagagaaggaattacgctcttcattcgtacagacggctgctgttcgccatgttacggggtctcttatcagaggcgaaggtcttagattcgccatcgtggtagctcgtttcaatgaggttgtgactaagttgcttttggaaggagcgattgagactttcaagaagtattcagtcagagaagaagacattgaagttatttgggttcctggcagctttgaaattggtgttgttgcacaaaatcttgggaaatcgggaaaatttcatgctgttttatgtatcggcgctgtgataagaggagataccacacattatgatgctgttgccaactctgctgcgtctggagtactttctgctagcataaattcaggcgttccatgcatatttggtgtactgacttgcgaggacatggatcaggctctgaatcgatctggtggcaaagccggcaataagggagctgaaactgctttgacggcgctcgaaatggcgtcgttgtttgagcaccacctgaaatagctcggctcgttcgatggatgaacatgatcacgtatgagaacctcttgatgttgtcccatttggttacaatccagtctctgaaattgtttgtacctcaaagattgtcaaaatgttttacccttggttacaaaatcatttaaacgcttttgtaagcttctggccttgttttttttttttgaatcgtatgataataataattcctccgaattttgggggtctttctgt

SEQ ID NO: 36107 - protein, 227 aa, Arabidopsis thaliana
  peptide (1)..(227): Ceres Seq. ID no. 12334006
  misc_feature (82)..(225): Pfam Name: 6,7-dimethyl-8-ribityllumazine synthase Pfam Description: 6,7-dimethyl-8-ribityllumazine synthase
  misc_feature (71)..(223): Homolog of NCBI NO: 23020138 NR Description: hypothetical protein [Clostridium thermocellum
  misc_feature (72)..(224): Homolog of NCBI NO: 18309551 NR Description: riboflavin synthase beta subunit [Clostridium
  misc_feature (77)..(224): Homolog of NCBI NO: 21402167 NR Description: DMRL_synthase, 6,7-dimethyl-8-ribityllumazine
  misc_feature (75)..(223): Homolog of NCBI NO: 1710405 NR Description: 6,7-dimethyl-8-ribityllumazine synthase (DMRL
  misc_feature (75)..(223): Homolog of NCBI NO: 33152277 NR Description: 6,7-dimethyl-8-ribityllumazine synthase
  misc_feature (72)..(227): Homolog of NCBI NO: 9954974 NR Description: Chain A, Crystal Structures Of A Pentameric And An Icosahedral Plant Lumazine Synthase Reveals The Structural
  misc_feature (25)..(226): Homolog of NCBI NO: 38345388 NR Description: OSJNBa0067K08.17 [Oryza sativa (japonica
  misc_feature (5)..(227): Homolog of NCBI NO: 20139859 NR Description: 6,7-dimethyl-8-ribityllumazine synthase,
  misc_feature (19)..(227): Homolog of NCBI NO: 5532608 NR Description: 6,7-dimethyl-8-ribityllumazine synthase precursor
  misc_feature (1)..(227): Homolog of NCBI NO: 15224809 NR Description: 6,7-dimethyl-8-ribityllumazine synthase precursor
MKSLASPPCLRLIPTAHRQLNSRQSSSACYIHGGSSVNKSNNLSFSSSTSGFASPLAVEKELRSSFVQTAAVRHVTGSLIRGEGLRFAIVVARFNEVVTKLLLEGAIETFKKYSVREEDIEVIWVPGSFEIGVVAQNLGKSGKFHAVLCIGAVIRGDTTHYDAVANSAASGVLSASINSGVPCIFGVLTCEDMDQALNRSGGKAGNKGAETALTALEMASLFEHHLK

SEQ ID NO: 36108 - DNA, 611 bp, Arabidopsis thaliana
  misc_feature (1)..(611): Ceres Seq. ID no. 12393243
  misc_feature: MA Experiment ID: 108434 Result: Down-regulated in Transcription
  misc_feature: MA Experiment 108434 PARAMETER Experiment Name: At_Root_Tips_cDNA_P Parameter: Tissue Value: Root Tips
  misc_feature: MA Experiment ID: 108435 Result: Down-regulated in Transcription
  misc_feature: MA Experiment 108435 PARAMETER Experiment Name: At_stm_Mutants_cDNA_P Parameter: Plant Line Value: wt Landsburg vs stm
  misc_feature: MA Experiment 108435 PARAMETER Experiment Name: At_stm_Mutants_cDNA_P Parameter: Tissue Value: Shoot Apical Meristem Region
  misc_feature: MA Experiment ID: 108461 Result: Up-regulated in Transcription
  misc_feature: MA Experiment 108461 PARAMETER Experiment Name: At_Germinating_Seeds_cDNA_P Parameter: Age (day) Value: 1 vs. 0
  misc_feature: MA Experiment 108461 PARAMETER Experiment Name: At_Germinating_Seeds_cDNA_P Parameter: Tissue Value: Germinating Seeds
  misc_feature: MA Experiment ID: 108462 Result: Up-regulated in Transcription
  misc_feature: MA Experiment 108462 PARAMETER Experiment Name: At_Germinating_Seeds_cDNA_P Parameter: Age (day) Value: 2 vs. 0
  misc_feature: MA Experiment 108462 PARAMETER Experiment Name: At_Germinating_Seeds_cDNA_P Parameter: Tissue Value: Germinating Seeds
  misc_feature: MA Experiment ID: 108464 Result: Up-regulated in Transcription
  misc_feature: MA Experiment 108464 PARAMETER Experiment Name: At_Germinating_Seeds_cDNA_P Parameter: Age (day) Value: 4 vs. 0
  misc_feature: MA Experiment 108464 PARAMETER Experiment Name: At_Germinating_Seeds_cDNA_P Parameter: Tissue Value: Germinating Seeds
  misc_feature: MA Experiment ID: 108488 Result: Up-regulated in Transcription
  misc_feature: MA Experiment ID: 108501 Result: Up-regulated in Transcription
  misc_feature: MA Experiment 108501 PARAMETER Experiment Name: At_ap2_floral_buds_cDNA_P Parameter: Plant Line Value: ap2 (Ler.)
  misc_feature: MA Experiment 108501 PARAMETER Experiment Name: At_ap2_floral_buds_cDNA_P Parameter: Tissue Value: Closed Flower
  misc_feature: MA Experiment ID: 108577 Result: Down-regulated in Transcription
  misc_feature: MA Experiment 108577 PARAMETER Experiment Name: At_42deg_Heat_cDNA_P Parameter: Temperature (deg C) Value: 42 vs. 22
  misc_feature: MA Experiment 108577 PARAMETER Experiment Name: At_42deg_Heat_cDNA_P Parameter: Timepoint (hr) Value: 6
  misc_feature: MA Experiment 108577 PARAMETER Experiment Name: At_42deg_Heat_cDNA_P Parameter: Tissue Value: Aerial
  misc_feature: MA Experiment ID: 108579 Result: Up-regulated in Transcription
  misc_feature: MA Experiment 108579 PARAMETER Experiment Name: At_4deg_Cold_cDNA_P Parameter: Temperature (deg C) Value: 4 vs. 22
  misc_feature: MA Experiment 108579 PARAMETER Experiment Name: At_4deg_Cold_cDNA_P Parameter: Timepoint (hr) Value: 6
  misc_feature: MA Experiment 108579 PARAMETER Experiment Name: At_4deg_Cold_cDNA_P Parameter: Tissue Value: Aerial
  misc_feature: MA Experiment ID: 108594 Result: Down-regulated in Transcription
  misc_feature: MA Experiment 108594 PARAMETER Experiment Name: At_Ler-rhl_Root_cDNA_P Parameter: Plant Line Value: null
  misc_feature: MA Experiment ID: 108595 Result: Down-regulated in Transcription
  misc_feature: MA Experiment 108595 PARAMETER Experiment Name: At_Ler-pi_Ovule_cDNA_P Parameter: Plant Line Value: null
  misc_feature: MA Experiment ID: 108605 Result: Up-regulated in Transcription
  misc_feature: MA Experiment 108605 PARAMETER Experiment Name: At_100uM_ABA_cDNA_P Parameter: Timepoint (hr) Value: 6
  misc_feature: MA Experiment 108605 PARAMETER Experiment Name: At_100uM_ABA_cDNA_P Parameter: Tissue Value: Aerial
  misc_feature: MA Experiment 108605 PARAMETER Experiment Name: At_100uM_ABA_cDNA_P Parameter: Treatment Value: 100uM ABA vs. No Treatment
  misc_feature: MA Experiment ID: 108607 Result: Up-regulated in Transcription
  misc_feature: MA Experiment 108607 PARAMETER Experiment Name: At_100uM_ABA_cDNA_P Parameter: Timepoint (hr) Value: 4
  misc_feature: MA Experiment 108607 PARAMETER Experiment Name: At_100uM_ABA_cDNA_P Parameter: Tissue Value: Aerial
  misc_feature: MA Experiment 108607 PARAMETER Experiment Name: At_100uM_ABA_cDNA_P Parameter: Treatment Value: 100uM ABA vs. No Treatment
  misc_feature: MA Experiment ID: 20000090 Result: Down-regulated in Transcription
  misc_feature: MA Experiment ID: 20000111 Result: Down-regulated in Transcription
  misc_feature: MA Experiment 20000111 PARAMETER Experiment Name: At_42deg_Heat_cDNA_P Parameter: Temperature (deg C) Value: 42 vs. 22
  misc_feature: MA Experiment 20000111 PARAMETER Experiment Name: At_42deg_Heat_cDNA_P Parameter: Timepoint (hr) Value: 6
  misc_feature: MA Experiment 20000111 PARAMETER Experiment Name: At_42deg_Heat_cDNA_P Parameter: Tissue Value: Aerial
  misc_feature: MA Experiment ID: 20000113 Result: Down-regulated in Transcription
  misc_feature: MA Experiment 20000113 PARAMETER Experiment Name: At_42deg_Heat_cDNA_P Parameter: Temperature (deg C) Value: 42 vs. 22
  misc_feature: MA Experiment 20000113 PARAMETER Experiment Name: At_42deg_Heat_cDNA_P Parameter: Timepoint (hr) Value: 8
  misc_feature: MA Experiment 20000113 PARAMETER Experiment Name: At_42deg_Heat_cDNA_P Parameter: Tissue Value: Aerial
  misc_feature: MA Experiment ID: 20000169 Result: Up-regulated in Transcription
  misc_feature: MA Experiment 20000169 PARAMETER Experiment Name: At_100uM_ABA_P Parameter: Age (day) Value: 14
  misc_feature: MA Experiment 20000169 PARAMETER Experiment Name: At_100uM_ABA_P Parameter: Organism Value: A. thaliana
  misc_feature: MA Experiment 20000169 PARAMETER Experiment Name: At_100uM_ABA_P Parameter: Plant Line Value: WS
  misc_feature: MA Experiment 20000169 PARAMETER Experiment Name: At_100uM_ABA_P Parameter: Timepoint (hr) Value: 6
  misc_feature: MA Experiment 20000169 PARAMETER Experiment Name: At_100uM_ABA_P Parameter: Tissue Value: Aerial
  misc_feature: MA Experiment 20000169 PARAMETER Experiment Name: At_100uM_ABA_P Parameter: Treatment Value: 100uM ABA vs. No Treatment
  misc_feature: MA Experiment ID: 20000180 Result: Up-regulated in Transcription
  misc_feature: MA Experiment 20000180 PARAMETER Experiment Name: At_Germinating_Seeds_P Parameter: Age (hr) Value: 24 vs. 0
  misc_feature: MA Experiment 20000180 PARAMETER Experiment Name: At_Germinating_Seeds_P Parameter: Tissue Value: Germinating Seeds
  misc_feature: MA Experiment ID: 20000185 Result: Down-regulated in Transcription
  misc_feature: MA Experiment 20000185 PARAMETER Experiment Name: At_Roots__P Parameter: Age (day) Value: 7 vs. 21
  misc_feature: MA Experiment 20000185 PARAMETER Experiment Name: At_Roots__P Parameter: Organism Value: A. thaliana
  misc_feature: MA Experiment 20000185 PARAMETER Experiment Name: At_Roots__P Parameter: Tissue Value: Roots vs. Whole Plant
  misc_feature: MA Experiment ID: 20000224 Result: Up-regulated in Transcription
  misc_feature: MA Experiment ID: 20000439 Result: Down-regulated in Transcription
  misc_feature: MA Experiment 20000439 PARAMETER Experiment Name: At_Roots__P Parameter: Age (day) Value: 14 vs. 21
  misc_feature: MA Experiment 20000439 PARAMETER Experiment Name: At_Roots__P Parameter: Organism Value: A. thaliana
  misc_feature: MA Experiment 20000439 PARAMETER Experiment Name: At_Roots__P Parameter: Tissue Value: Roots vs. Whole Plant
  misc_feature: MA Experiment ID: 20000451 Result: Up-regulated in Transcription
  misc_feature: MA Experiment 20000451 PARAMETER Experiment Name: At_CS6879_Shoots-Roots_P Parameter: Age (day) Value: 14
  misc_feature: MA Experiment 20000451 PARAMETER Experiment Name: At_CS6879_Shoots-Roots_P Parameter: Organism Value: A. thaliana
  misc_feature: MA Experiment 20000451 PARAMETER Experiment Name: At_CS6879_Shoots-Roots_P Parameter: Plant Line Value: CS6879 vs. WS
  misc_feature: MA Experiment 20000451 PARAMETER Experiment Name: At_CS6879_Shoots-Roots_P Parameter: Tissue Value: Roots
  misc_feature: MA Experiment ID: 20000496 Result: Down-regulated in Transcription
  misc_feature: MA Experiment 20000496 PARAMETER Experiment Name: At_Guard_Cells_P Parameter: Harvest Date Value: 7/19/2002
  misc_feature: MA Experiment 20000496 PARAMETER Experiment Name: At_Guard_Cells_P Parameter: Organism Value: Canola
  misc_feature: MA Experiment 20000496 PARAMETER Experiment Name: At_Guard_Cells_P Parameter: Tissue Value: Guard Cells vs. Leaves
  misc_feature: MA Experiment ID: 20000573 Result: Down-regulated in Transcription
  misc_feature: MA Experiment 20000573 PARAMETER Experiment Name: At_100uM_ABA_Mutants__P Parameter: Organism Value: A. thaliana
  misc_feature: MA Experiment 20000573 PARAMETER Experiment Name: At_100uM_ABA_Mutants__P Parameter: Plant Line Value: CS22 vs. Ler wt
  misc_feature: MA Experiment 20000573 PARAMETER Experiment Name: At_100uM_ABA_Mutants__P Parameter: Timepoint (hr) Value: N/A
  misc_feature: MA Experiment 20000573 PARAMETER Experiment Name: At_100uM_ABA_Mutants__P Parameter: Tissue Value: Whole Plant
  misc_feature: MA Experiment 20000573 PARAMETER Experiment Name: At_100uM_ABA_Mutants__P Parameter: Treatment Value: None
  misc_feature: MA Experiment ID: 20000576 Result: Up-regulated in Transcription
  misc_feature: MA Experiment 20000576 PARAMETER Experiment Name: At_100uM_ABA_Mutants__P Parameter: Organism Value: A. thaliana
  misc_feature: MA Experiment 20000576 PARAMETER Experiment Name: At_100uM_ABA_Mutants__P Parameter: Plant Line Value: CS23
  misc_feature: MA Experiment 20000576 PARAMETER Experiment Name: At_100uM_ABA_Mutants__P Parameter: Timepoint (hr) Value: 6
  misc_feature: MA Experiment 20000576 PARAMETER Experiment Name: At_100uM_ABA_Mutants__P Parameter: Tissue Value: Whole Plant
  misc_feature: MA Experiment 20000576 PARAMETER Experiment Name: At_100uM_ABA_Mutants__P Parameter: Treatment Value: 1uM ABA vs. No Treatment
  misc_feature: MA Experiment ID: 20000794 Result: Down-regulated in Transcription
  misc_feature: MA Experiment 20000794 PARAMETER Experiment Name: At_Petals_P Parameter: Age (day) Value: 23-25 days
  misc_feature: MA Experiment 20000794 PARAMETER Experiment Name: At_Petals_P Parameter: Plant Line Value: WS
  misc_feature: MA Experiment 20000794 PARAMETER Experiment Name: At_Petals_P Parameter: Tissue Value: Petals vs. Whole plant
  misc_feature: MA Experiment ID: 20001248 Result: Down-regulated in Transcription
  misc_feature: MA Experiment 20001248 PARAMETER Experiment Name: At_Far-red-induction_P Parameter: Age (day) Value: 7
  misc_feature: MA Experiment 20001248 PARAMETER Experiment Name: At_Far-red-induction_P Parameter: Light Value: Far-red vs. White
  misc_feature: MA Experiment 20001248 PARAMETER Experiment Name: At_Far-red-induction_P Parameter: Organism Value: A. thaliana
  misc_feature: MA Experiment 20001248 PARAMETER Experiment Name: At_Far-red-induction_P Parameter: Plant Line Value: Columbia
  misc_feature: MA Experiment 20001248 PARAMETER Experiment Name: At_Far-red-induction_P Parameter: Timepoint (hr) Value: 4
  misc_feature: MA Experiment 20001248 PARAMETER Experiment Name: At_Far-red-induction_P Parameter: Tissue Value: Whole Plant
  misc_feature: MA Experiment ID: 20001451 Result: Down-regulated in Transcription
  misc_feature: MA Experiment 20001451 PARAMETER Experiment Name: At_Far-red-induction_P Parameter: Age (day) Value: 7
  misc_feature: MA Experiment 20001451 PARAMETER Experiment Name: At_Far-red-induction_P Parameter: Light Value: Far-red vs. White
  misc_feature: MA Experiment 20001451 PARAMETER Experiment Name: At_Far-red-induction_P Parameter: Organism Value: A. thaliana
  misc_feature: MA Experiment 20001451 PARAMETER Experiment Name: At_Far-red-induction_P Parameter: Plant Line Value: Columbia
  misc_feature: MA Experiment 20001451 PARAMETER Experiment Name: At_Far-red-induction_P Parameter: Timepoint (hr) Value: 24
  misc_feature: MA Experiment 20001451 PARAMETER Experiment Name: At_Far-red-induction_P Parameter: Tissue Value: Whole Plant
aacaacacaacttcagctttaagacagctaaaactaaatacaaagaaacagagatgggtttggttacagaggaggtgagagctaaggcagagatgtacaccggagatgagatatgtagagagaagacaaagtgtttcctcaaggaaatatctatgcccaatggtttattaccattgaaggatatagaagaggttgggtatgacagagagtcaggtgttgtatggctgaagcagaagaagagcatcactcacaagttcacagagatagataagcttgtctcctatggaaccgaagtcacagcttttatagtcccagaagaacctccaaggaggaacctgccaaagaggaacctgccaaggagaagagcagcgaagccaccgaggccaaggaggctgttgcaatcaaggaggctgtcgcagtcaaagaggcggcctaatcagctcagcttcagcagataaaagagacccgaatttttaagtgtacttcaagaatttgaacaaatcatggagagttagtgtttctcactgctctaactatcatgtattatctacctaccacttgttgctgcttgttttacctgtaataagatatcaatatcatcctgttccacc

SEQ ID NO: 36109 - protein, 151 aa, Arabidopsis thaliana
  peptide (1)..(151): Ceres Seq. ID no. 12393244
  misc_feature (20)..(102): Pfam Name: Protein of unknown function, DUF538 Pfam Description: Protein of unknown function, DUF538
  misc_feature (23)..(102): Homolog of NCBI NO: 34915376 NR Description: hypothetical protein~similar to Oryza sativa
  misc_feature (23)..(101): Homolog of NCBI NO: 33146557 NR Description: unknown protein [Oryza sativa (japonica
  misc_feature (23)..(102): Homolog of NCBI NO: 34915422 NR Description: hypothetical protein~similar to Arabidopsis
  misc_feature (23)..(102): Homolog of NCBI NO: 34915416 NR Description: hypothetical protein~similar to Arabidopsis
  misc_feature (23)..(102): Homolog of NCBI NO: 34915378 NR Description: hypothetical protein~similar to Oryza sativa
  misc_feature (23)..(102): Homolog of NCBI NO: 34915426 NR Description: hypothetical protein~similar to Arabidopsis
  misc_feature (23)..(102): Homolog of NCBI NO: 34903866 NR Description: unnamed protein product [Oryza sativa (japonica
  misc_feature (23)..(102): Homolog of NCBI NO: 34915410 NR Description: hypothetical protein~similar to Arabidopsis
  misc_feature (18)..(100): Homolog of NCBI NO: 18405887 NR Description: expressed protein
  misc_feature (18)..(102): Homolog of NCBI NO: 18391006 NR Description: expressed protein
QHNFSFKTAKTKYKETEMGLVTEEVRAKAEMYTGDEICREKTKCFLKEISMPNGLLPLKDIEEVGYDRESGVVWLKQKKSITHKFTEIDKLVSYGTEVTAFIVPEEPPRRNLPKRNLPRRRAAKPPRPRRLLQSRRLSQSKRRPNQLSFSR

SEQ ID NO: 36110 - protein, 134 aa, Arabidopsis thaliana
  peptide (1)..(134): Ceres Seq. ID no. 12393245
  misc_feature (3)..(85): Pfam Name: Protein of unknown function, DUF538 Pfam Description: Protein of unknown function, DUF538
  misc_feature (6)..(85): Homolog of NCBI NO: 34915376 NR Description: hypothetical protein~similar to Oryza sativa
  misc_feature (6)..(84): Homolog of NCBI NO: 33146557 NR Description: unknown protein [Oryza sativa (japonica
  misc_feature (6)..(85): Homolog of NCBI NO: 34915422 NR Description: hypothetical protein~similar to Arabidopsis
  misc_feature (6)..(85): Homolog of NCBI NO: 34915416 NR Description: hypothetical protein~similar to Arabidopsis
  misc_feature (6)..(85): Homolog of NCBI NO: 34915378 NR Description: hypothetical protein~similar to Oryza sativa
  misc_feature (6)..(85): Homolog of NCBI NO: 34915426 NR Description: hypothetical protein~similar to Arabidopsis
  misc_feature (6)..(85): Homolog of NCBI NO: 34903866 NR Description: unnamed protein product [Oryza sativa (japonica
  misc_feature (6)..(85): Homolog of NCBI NO: 34915410 NR Description: hypothetical protein~similar to Arabidopsis
  misc_feature (1)..(83): Homolog of NCBI NO: 18405887 NR Description: expressed protein
  misc_feature (1)..(85): Homolog of NCBI NO: 18391006 NR Description: expressed protein
MGLVTEEVRAKAEMYTGDEICREKTKCFLKEISMPNGLLPLKDIEEVGYDRESGVVWLKQKKSITHKFTEIDKLVSYGTEVTAFIVPEEPPRRNLPKRNLPRRRAAKPPRPRRLLQSRRLSQSKRRPNQLSFSR

SEQ ID NO: 36111 - protein, 121 aa, Arabidopsis thaliana
  peptide (1)..(121): Ceres Seq. ID no. 12393246
  misc_feature (1)..(72): Pfam Name: Protein of unknown function, DUF538 Pfam Description: Protein of unknown function, DUF538
  misc_feature (1)..(72): Homolog of NCBI NO: 34915376 NR Description: hypothetical protein~similar to Oryza sativa
  misc_feature (1)..(71): Homolog of NCBI NO: 33146557 NR Description: unknown protein [Oryza sativa (japonica
  misc_feature (1)..(72): Homolog of NCBI NO: 34915422 NR Description: hypothetical protein~similar to Arabidopsis
  misc_feature (1)..(72): Homolog of NCBI NO: 34915416 NR Description: hypothetical protein~similar to Arabidopsis
  misc_feature (1)..(72): Homolog of NCBI NO: 34915378 NR Description: hypothetical protein~similar to Oryza sativa
  misc_feature (1)..(72): Homolog of NCBI NO: 34915426 NR Description: hypothetical protein~similar to Arabidopsis
  misc_feature (1)..(72): Homolog of NCBI NO: 34903866 NR Description: unnamed protein product [Oryza sativa (japonica
  misc_feature (1)..(72): Homolog of NCBI NO: 34915410 NR Description: hypothetical protein~similar to Arabidopsis
  misc_feature (1)..(70): Homolog of NCBI NO: 18405887 NR Description: expressed protein
  misc_feature (1)..(72): Homolog of NCBI NO: 18391006 NR Description: expressed protein
MYTGDEICREKTKCFLKEISMPNGLLPLKDIEEVGYDRESGVVWLKQKKSITHKFTEIDKLVSYGTEVTAFIVPEEPPRRNLPKRNLPRRRAAKPPRPRRLLQSRRLSQSKRRPNQLSFSR

SEQ ID NO: 36112 - DNA, 768 bp, Arabidopsis thaliana
  misc_feature (1)..(768): Ceres Seq. ID no. 12738418
  misc_feature: MA Experiment ID: 108461 Result: Down-regulated in Transcription
  misc_feature: MA Experiment 108461 PARAMETER Experiment Name: At_Germinating_Seeds_cDNA_P Parameter: Age (day) Value: 1 vs. 0
  misc_feature: MA Experiment 108461 PARAMETER Experiment Name: At_Germinating_Seeds_cDNA_P Parameter: Tissue Value: Germinating Seeds
  misc_feature: MA Experiment ID: 108501 Result: Up-regulated in Transcription
  misc_feature: MA Experiment 108501 PARAMETER Experiment Name: At_ap2_floral_buds_cDNA_P Parameter: Plant Line Value: ap2 (Ler.)
  misc_feature: MA Experiment 108501 PARAMETER Experiment Name: At_ap2_floral_buds_cDNA_P Parameter: Tissue Value: Closed Flower
  misc_feature: MA Experiment ID: 108572 Result: Up-regulated in Transcription
  misc_feature: MA Experiment 108572 PARAMETER Experiment Name: At_Drought_cDNA_P Parameter: Timepoint (hr) Value: 1
  misc_feature: MA Experiment 108572 PARAMETER Experiment Name: At_Drought_cDNA_P Parameter: Tissue Value: Aerial
  misc_feature: MA Experiment 108572 PARAMETER Experiment Name: At_Drought_cDNA_P Parameter: Treatment Value: Drought vs. No Drought
  misc_feature: MA Experiment ID: 108576 Result: Up-regulated in Transcription
  misc_feature: MA Experiment 108576 PARAMETER Experiment Name: At_42deg_Heat_cDNA_P Parameter: Temperature (deg C) Value: 42 vs. 22
  misc_feature: MA Experiment 108576 PARAMETER Experiment Name: At_42deg_Heat_cDNA_P Parameter: Timepoint (hr) Value: 1
  misc_feature: MA Experiment 108576 PARAMETER Experiment Name: At_42deg_Heat_cDNA_P Parameter: Tissue Value: Aerial
  misc_feature: MA Experiment ID: 108577 Result: Up-regulated in Transcription
  misc_feature: MA Experiment 108577 PARAMETER Experiment Name: At_42deg_Heat_cDNA_P Parameter: Temperature (deg C) Value: 42 vs. 22
  misc_feature: MA Experiment 108577 PARAMETER Experiment Name: At_42deg_Heat_cDNA_P Parameter: Timepoint (hr) Value: 6
  misc_feature: MA Experiment 108577 PARAMETER Experiment Name: At_42deg_Heat_cDNA_P Parameter: Tissue Value: Aerial
  misc_feature: MA Experiment ID: 108595 Result: Up-regulated in Transcription
  misc_feature: MA Experiment 108595 PARAMETER Experiment Name: At_Ler-pi_Ovule_cDNA_P Parameter: Plant Line Value: null
  misc_feature: MA Experiment ID: 108607 Result: Up-regulated in Transcription
  misc_feature: MA Experiment 108607 PARAMETER Experiment Name: At_100uM_ABA_cDNA_P Parameter: Timepoint (hr) Value: 4
  misc_feature: MA Experiment 108607 PARAMETER Experiment Name: At_100uM_ABA_cDNA_P Parameter: Tissue Value: Aerial
  misc_feature: MA Experiment 108607 PARAMETER Experiment Name: At_100uM_ABA_cDNA_P Parameter: Treatment Value: 100uM ABA vs. No Treatment
  misc_feature: MA Experiment ID: 108608 Result: Up-regulated in Transcription
  misc_feature: MA Experiment 108608 PARAMETER Experiment Name: At_100uM_ABA_cDNA_P Parameter: Timepoint (hr) Value: 1
  misc_feature: MA Experiment 108608 PARAMETER Experiment Name: At_100uM_ABA_cDNA_P Parameter: Tissue Value: Aerial
  misc_feature: MA Experiment 108608 PARAMETER Experiment Name: At_100uM_ABA_cDNA_P Parameter: Treatment Value: 100uM ABA vs. No Treatment
  misc_feature: MA Experiment ID: 20000089 Result: Down-regulated in Transcription
  misc_feature: MA Experiment ID: 20000093 Result: Up-regulated in Transcription
  misc_feature: MA Experiment 20000093 PARAMETER Experiment Name: At_42deg_Heat_cDNA_P Parameter: Temperature (deg C) Value: 42 vs. 22
  misc_feature: MA Experiment 20000093 PARAMETER Experiment Name: At_42deg_Heat_cDNA_P Parameter: Timepoint (hr) Value: 0.5
  misc_feature: MA Experiment 20000093 PARAMETER Experiment Name: At_42deg_Heat_cDNA_P Parameter: Tissue Value: Aerial
  misc_feature: MA Experiment ID: 20000111 Result: Up-regulated in Transcription
  misc_feature: MA Experiment 20000111 PARAMETER Experiment Name: At_42deg_Heat_cDNA_P Parameter: Temperature (deg C) Value: 42 vs. 22
  misc_feature: MA Experiment 20000111 PARAMETER Experiment Name: At_42deg_Heat_cDNA_P Parameter: Timepoint (hr) Value: 6
  misc_feature: MA Experiment 20000111 PARAMETER Experiment Name: At_42deg_Heat_cDNA_P Parameter: Tissue Value: Aerial
  misc_feature: MA Experiment ID: 20000112 Result: Up-regulated in Transcription
  misc_feature: MA Experiment 20000112 PARAMETER Experiment Name: At_42deg_Heat_cDNA_P Parameter: Temperature (deg C) Value: 42 vs. 22
  misc_feature: MA Experiment 20000112 PARAMETER Experiment Name: At_42deg_Heat_cDNA_P Parameter: Timepoint (hr) Value: 2
  misc_feature: MA Experiment 20000112 PARAMETER Experiment Name: At_42deg_Heat_cDNA_P Parameter: Tissue Value: Aerial
  misc_feature: MA Experiment ID: 20000113 Result: Up-regulated in Transcription
  misc_feature: MA Experiment 20000113 PARAMETER Experiment Name: At_42deg_Heat_cDNA_P Parameter: Temperature (deg C) Value: 42 vs. 22
  misc_feature: MA Experiment 20000113 PARAMETER Experiment Name: At_42deg_Heat_cDNA_P Parameter: Timepoint (hr) Value: 8
  misc_feature: MA Experiment 20000113 PARAMETER Experiment Name: At_42deg_Heat_cDNA_P Parameter: Tissue Value: Aerial
  misc_feature: MA Experiment ID: 20000144 Result: Up-regulated in Transcription
  misc_feature: MA Experiment 20000144 PARAMETER Experiment Name: At_42deg_Heat_cDNA_P Parameter: Temperature (deg C) Value: 42 vs. 22
  misc_feature: MA Experiment 20000144 PARAMETER Experiment Name: At_42deg_Heat_cDNA_P Parameter: Timepoint (hr) Value: 1
  misc_feature: MA Experiment 20000144 PARAMETER Experiment Name: At_42deg_Heat_cDNA_P Parameter: Tissue Value: Aerial
  misc_feature: MA Experiment ID: 20000166 Result: Up-regulated in Transcription
  misc_feature: MA Experiment 20000166 PARAMETER Experiment Name: At_100uM_ABA_P Parameter: Age (day) Value: 14
  misc_feature: MA Experiment 20000166 PARAMETER Experiment Name: At_100uM_ABA_P Parameter: Organism Value: A. thaliana
  misc_feature: MA Experiment 20000166 PARAMETER Experiment Name: At_100uM_ABA_P Parameter: Plant Line Value: WS
  misc_feature: MA Experiment 20000166 PARAMETER Experiment Name: At_100uM_ABA_P Parameter: Timepoint (hr) Value: 1
  misc_feature: MA Experiment 20000166 PARAMETER Experiment Name: At_100uM_ABA_P Parameter: Tissue Value: Aerial
  misc_feature: MA Experiment 20000166 PARAMETER Experiment Name: At_100uM_ABA_P Parameter: Treatment Value: 100uM ABA vs. No Treatment
  misc_feature: MA Experiment ID: 20000171 Result: Up-regulated in Transcription
  misc_feature: MA Experiment 20000171 PARAMETER Experiment Name: At_42deg_Heat_P Parameter: Age (day) Value: 14
  misc_feature: MA Experiment 20000171 PARAMETER Experiment Name: At_42deg_Heat_P Parameter: Organism Value: A. thaliana
  misc_feature: MA Experiment 20000171 PARAMETER Experiment Name: At_42deg_Heat_P Parameter: Plant Line Value: WS
  misc_feature: MA Experiment 20000171 PARAMETER Experiment Name: At_42deg_Heat_P Parameter: Temperature (deg C) Value: 42 vs. 22
  misc_feature: MA Experiment 20000171 PARAMETER Experiment Name: At_42deg_Heat_P Parameter: Timepoint (hr) Value: 1
  misc_feature: MA Experiment 20000171 PARAMETER Experiment Name: At_42deg_Heat_P Parameter: Tissue Value: Aerial
  misc_feature: MA Experiment ID: 20000173 Result: Up-regulated in Transcription
  misc_feature: MA Experiment 20000173 PARAMETER Experiment Name: At_42deg_Heat_P Parameter: Age (day) Value: 14
  misc_feature: MA Experiment 20000173 PARAMETER Experiment Name: At_42deg_Heat_P Parameter: Organism Value: A. thaliana
  misc_feature: MA Experiment 20000173 PARAMETER Experiment Name: At_42deg_Heat_P Parameter: Plant Line Value: WS
  misc_feature: MA Experiment 20000173 PARAMETER Experiment Name: At_42deg_Heat_P Parameter: Temperature (deg C) Value: 42 vs. 22
  misc_feature: MA Experiment 20000173 PARAMETER Experiment Name: At_42deg_Heat_P Parameter: Timepoint (hr) Value: 6
  misc_feature: MA Experiment 20000173 PARAMETER Experiment Name: At_42deg_Heat_P Parameter: Tissue Value: Aerial
  misc_feature: MA Experiment ID: 20000234 Result: Up-regulated in Transcription
  misc_feature: MA Experiment 20000234 PARAMETER Experiment Name: At_Siliques_P Parameter: Age (day) Value: 21
  misc_feature: MA Experiment 20000234 PARAMETER Experiment Name: At_Siliques_P Parameter: Organism Value: A. thaliana
  misc_feature: MA Experiment 20000234 PARAMETER Experiment Name: At_Siliques_P Parameter: Plant Line Value: WS
  misc_feature: MA Experiment 20000234 PARAMETER Experiment Name: At_Siliques_P Parameter: Tissue Value: Less Than 5mm Siliques vs. Whole Plant
  misc_feature: MA Experiment ID: 20001248 Result: Down-regulated in Transcription
  misc_feature: MA Experiment 20001248 PARAMETER Experiment Name: At_Far-red-induction_P Parameter: Age (day) Value: 7
  misc_feature: MA Experiment 20001248 PARAMETER Experiment Name: At_Far-red-induction_P Parameter: Light Value: Far-red vs. White
  misc_feature: MA Experiment 20001248 PARAMETER Experiment Name: At_Far-red-induction_P Parameter: Organism Value: A. thaliana
  misc_feature: MA Experiment 20001248 PARAMETER Experiment Name: At_Far-red-induction_P Parameter: Plant Line Value: Columbia
  misc_feature: MA Experiment 20001248 PARAMETER Experiment Name: At_Far-red-induction_P Parameter: Timepoint (hr) Value: 4
  misc_feature: MA Experiment 20001248 PARAMETER Experiment Name: At_Far-red-induction_P Parameter: Tissue Value: Whole Plant
  misc_feature: MA Experiment ID: 20001450 Result: Down-regulated in Transcription
  misc_feature: MA Experiment 20001450 PARAMETER Experiment Name: At_Far-red-induction_P Parameter: Age (day) Value: 7
  misc_feature: MA Experiment 20001450 PARAMETER Experiment Name: At_Far-red-induction_P Parameter: Light Value: Far-red vs. White
  misc_feature: MA Experiment 20001450 PARAMETER Experiment Name: At_Far-red-induction_P Parameter: Organism Value: A. thaliana
  misc_feature: MA Experiment 20001450 PARAMETER Experiment Name: At_Far-red-induction_P Parameter: Plant Line Value: Columbia
  misc_feature: MA Experiment 20001450 PARAMETER Experiment Name: At_Far-red-induction_P Parameter: Timepoint (hr) Value: 8
  misc_feature: MA Experiment 20001450 PARAMETER Experiment Name: At_Far-red-induction_P Parameter: Tissue Value: Whole Plant
  misc_feature: MA Experiment ID: 20001554 Result: Up-regulated in Transcription
  misc_feature: MA Experiment 20001554 PARAMETER Experiment Name: At_Drought_Soil_Dry_P Parameter: Age (day) Value: 21
  misc_feature: MA Experiment 20001554 PARAMETER Experiment Name: At_Drought_Soil_Dry_P Parameter: Organism Value: A. thaliana
  misc_feature: MA Experiment 20001554 PARAMETER Experiment Name: At_Drought_Soil_Dry_P Parameter: Plant Line Value: WS
  misc_feature: MA Experiment 20001554 PARAMETER Experiment Name: At_Drought_Soil_Dry_P Parameter: Post Timepoint (hr) Value: None
  misc_feature: MA Experiment 20001554 PARAMETER Experiment Name: At_Drought_Soil_Dry_P Parameter: Post-Treatment Value: None
  misc_feature: MA Experiment 20001554 PARAMETER Experiment Name: At_Drought_Soil_Dry_P Parameter: Timepoint (day) Value: 7
  misc_feature: MA Experiment 20001554 PARAMETER Experiment Name: At_Drought_Soil_Dry_P Parameter: Treatment Value: Drought vs. No Drought
  misc_feature: MA Experiment ID: 20001555 Result: Up-regulated in Transcription
  misc_feature: MA Experiment 20001555 PARAMETER Experiment Name: At_Drought_Soil_Dry_P Parameter: Age (day) Value: 24
  misc_feature: MA Experiment 20001555 PARAMETER Experiment Name: At_Drought_Soil_Dry_P Parameter: Organism Value: A. thaliana
  misc_feature: MA Experiment 20001555 PARAMETER Experiment Name: At_Drought_Soil_Dry_P Parameter: Plant Line Value: WS
  misc_feature: MA Experiment 20001555 PARAMETER Experiment Name: At_Drought_Soil_Dry_P Parameter: Post Timepoint (hr) Value: None
  misc_feature: MA Experiment 20001555 PARAMETER Experiment Name: At_Drought_Soil_Dry_P Parameter: Post-Treatment Value: None
  misc_feature: MA Experiment 20001555 PARAMETER Experiment Name: At_Drought_Soil_Dry_P Parameter: Timepoint (day) Value: 10
  misc_feature: MA Experiment 20001555 PARAMETER Experiment Name: At_Drought_Soil_Dry_P Parameter: Treatment Value: Drought vs. No Drought
  misc_feature: MA Experiment ID: 20001556 Result: Up-regulated in Transcription
  misc_feature: MA Experiment 20001556 PARAMETER Experiment Name: At_Drought_Soil_Dry_P Parameter: Age (day) Value: 26
  misc_feature: MA Experiment 20001556 PARAMETER Experiment Name: At_Drought_Soil_Dry_P Parameter: Organism Value: A. thaliana
  misc_feature: MA Experiment 20001556 PARAMETER Experiment Name: At_Drought_Soil_Dry_P Parameter: Plant Line Value: WS
  misc_feature: MA Experiment 20001556 PARAMETER Experiment Name: At_Drought_Soil_Dry_P Parameter: Post Timepoint (hr) Value: None
  misc_feature: MA Experiment 20001556 PARAMETER Experiment Name: At_Drought_Soil_Dry_P Parameter: Post-Treatment Value: None
  misc_feature: MA Experiment 20001556 PARAMETER Experiment Name: At_Drought_Soil_Dry_P Parameter: Timepoint (day) Value: 12
  misc_feature: MA Experiment 20001556 PARAMETER Experiment Name: At_Drought_Soil_Dry_P Parameter: Treatment Value: Drought vs. No Drought
  misc_feature: MA Experiment ID: 20001558 Result: Down-regulated in Transcription
  misc_feature: MA Experiment 20001558 PARAMETER Experiment Name: At_Drought_Soil_Dry_P Parameter: Age (day) Value: 27
  misc_feature: MA Experiment 20001558 PARAMETER Experiment Name: At_Drought_Soil_Dry_P Parameter: Organism Value: A. thaliana
  misc_feature: MA Experiment 20001558 PARAMETER Experiment Name: At_Drought_Soil_Dry_P Parameter: Plant Line Value: WS
  misc_feature: MA Experiment 20001558 PARAMETER Experiment Name: At_Drought_Soil_Dry_P Parameter: Post Timepoint (hr) Value: 6
  misc_feature: MA Experiment 20001558 PARAMETER Experiment Name: At_Drought_Soil_Dry_P Parameter: Post-Treatment Value: Re-Water vs. No Drought
  misc_feature: MA Experiment 20001558 PARAMETER Experiment Name: At_Drought_Soil_Dry_P Parameter: Timepoint (day) Value: 13
  misc_feature: MA Experiment 20001558 PARAMETER Experiment Name: At_Drought_Soil_Dry_P Parameter: Treatment Value: Drought vs. No Drought
  misc_feature: MA Experiment ID: 20001559 Result: Up-regulated in Transcription
  misc_feature: MA Experiment 20001559 PARAMETER Experiment Name: At_Drought_Soil_Dry_P Parameter: Age (day) Value: 28
  misc_feature: MA Experiment 20001559 PARAMETER Experiment Name: At_Drought_Soil_Dry_P Parameter: Organism Value: A. thaliana
  misc_feature: MA Experiment 20001559 PARAMETER Experiment Name: At_Drought_Soil_Dry_P Parameter: Plant Line Value: WS
  misc_feature: MA Experiment 20001559 PARAMETER Experiment Name: At_Drought_Soil_Dry_P Parameter: Post Timepoint (hr) Value: 29
  misc_feature: MA Experiment 20001559 PARAMETER Experiment Name: At_Drought_Soil_Dry_P Parameter: Post-Treatment Value: Re-Water vs. No Drought
  misc_feature: MA Experiment 20001559 PARAMETER Experiment Name: At_Drought_Soil_Dry_P Parameter: Timepoint (day) Value: 14
  misc_feature: MA Experiment 20001559 PARAMETER Experiment Name: At_Drought_Soil_Dry_P Parameter: Treatment Value: Drought vs. No Drought
  misc_feature: MA Experiment ID: 20001906 Result: Up-regulated in Transcription
  misc_feature: MA Experiment 20001906 PARAMETER Experiment Name: At_Drought_Reproduction_P Parameter: Age (day) Value: 35
  misc_feature: MA Experiment 20001906 PARAMETER Experiment Name: At_Drought_Reproduction_P Parameter: Organism Value: A. thaliana
  misc_feature: MA Experiment 20001906 PARAMETER Experiment Name: At_Drought_Reproduction_P Parameter: Plant Line Value: WS
  misc_feature: MA Experiment 20001906 PARAMETER Experiment Name: At_Drought_Reproduction_P Parameter: Timepoint (day) Value: 5
  misc_feature: MA Experiment 20001906 PARAMETER Experiment Name: At_Drought_Reproduction_P Parameter: Tissue Value: Siliques
  misc_feature: MA Experiment 20001906 PARAMETER Experiment Name: At_Drought_Reproduction_P Parameter: Treatment Value: Drought vs. No Drought
aatcttagggtttcgcgagatctcactctcactgagatagcttagcaatggagcagtcagaagagggtcaacagcaacagcaacagggagtgatggattatgtacctcctcatgcttatcagagtgggccagtaaatgcagcttcccatatggcattccaacaagctcaccacttccaccaccaccatcagcagcaacaacagaagcagcttcagatgttctgggctaaccaaatgcaagagatcgagcataccactgatttcaagaaccacacccttcccctagcccgcatcaagaagatcatgaaagctgatgaagatgtgaggatgatctctgcggaggctcctgtgatttttgccaaggcctgtgagatgttcattttggagctcactctacgtgcttggatccacaccgaggagaacaagaggaggaccttgcagaagaacgacatcgccgctgccatttccaggaccgacgttgatttccttgtggacataatcccgagggacgagctgaaagaagaaggtttaggcgtgaccaaagggaccataccatcggtggtgggttccccgccatactattacttgcaacaacaggggatgatgcaacactggccccaggagcaacaccctgatgagtcttaaaacttttcccctttcgtttgtttggttgtatcgtagtaaggtagctctgctctgctgggaaccatttctattgtgttctgtaatgacatagtagtatatccccagtctatatctatggcaatgc

SEQ ID NO: 36113 - protein, 198 aa, Arabidopsis thaliana
  peptide (1)..(198): Ceres Seq. ID no. 12738419
  misc_feature (1)..(179): Homolog of NCBI NO: 15242784 NR Description: transcription factor Hap5a-like protein
  misc_feature (20)..(179): Homolog of NCBI NO: 15228405 NR Description: transcription factor Hap5a
  misc_feature (9)..(180): Homolog of NCBI NO: 15221912 NR Description: heme activated protein, putative; protein id:
  misc_feature (38)..(180): Homolog of NCBI NO: 25372763 NR Description: hypothetical protein [imported] - Arabidopsis
  misc_feature (1)..(180): Homolog of NCBI NO: 6289057 NR Description: heme activated protein [Arabidopsis thaliana]
  misc_feature (1)..(180): Homolog of NCBI NO: 15223986 NR Description: putative transcription factor
  misc_feature (63)..(192): Homolog of NCBI NO: 2398533 NR Description: Transcription factor [Arabidopsis thaliana]
  misc_feature (63)..(198): Homolog of NCBI NO: 25404100 NR Description: transcription factor [imported] - Arabidopsis
  misc_feature (1)..(198): Homolog of NCBI NO: 15223482 NR Description: transcription factor, putative
  misc_feature (1)..(198): Homolog of NCBI NO: 21554704 NR Description: transcription factor, putative [Arabidopsis
MEQSEEGQQQQQQGVMDYVPPHAYQSGPVNAASHMAFQQAHHFHHHHQQQQQKQLQMFWANQMQEIEHTTDFKNHTLPLARIKKIMKADEDVRMISAEAPVIFAKACEMFILELTLRAWIHTEENKRRTLQKNDIAAAISRTDVDFLVDIIPRDELKEEGLGVTKGTIPSVVGSPPYYYLQQQGMMQHWPQEQHPDES

SEQ ID NO: 36114 - protein, 183 aa, Arabidopsis thaliana
  peptide (1)..(183): Ceres Seq. ID no. 12738420
  misc_feature (1)..(164): Homolog of NCBI NO: 15242784 NR Description: transcription factor Hap5a-like protein
  misc_feature (5)..(164): Homolog of NCBI NO: 15228405 NR Description: transcription factor Hap5a
  misc_feature (1)..(165): Homolog of NCBI NO: 15221912 NR Description: heme activated protein, putative; protein id:
  misc_feature (23)..(165): Homolog of NCBI NO: 25372763 NR Description: hypothetical protein [imported] - Arabidopsis
  misc_feature (1)..(165): Homolog of NCBI NO: 6289057 NR Description: heme activated protein [Arabidopsis thaliana]
  misc_feature (1)..(165): Homolog of NCBI NO: 15223986 NR Description: putative transcription factor
  misc_feature (48)..(177): Homolog of NCBI NO: 2398533 NR Description: Transcription factor [Arabidopsis thaliana]
  misc_feature (48)..(183): Homolog of NCBI NO: 25404100 NR Description: transcription factor [imported] - Arabidopsis
  misc_feature (1)..(183): Homolog of NCBI NO: 15223482 NR Description: transcription factor, putative
  misc_feature (1)..(183): Homolog of NCBI NO: 21554704 NR Description: transcription factor, putative [Arabidopsis
MDYVPPHAYQSGPVNAASHMAFQQAHHFHHHHQQQQQKQLQMFWANQMQEIEHTTDFKNHTLPLARIKKIMKADEDVRMISAEAPVIFAKACEMFILELTLRAWIHTEENKRRTLQKNDIAAAISRTDVDFLVDIIPRDELKEEGLGVTKGTIPSVVGSPPYYYLQQQGMMQHWPQEQHPDES

SEQ ID NO: 36115 - protein, 164 aa, Arabidopsis thaliana
  peptide (1)..(164): Ceres Seq. ID no. 12738421
  misc_feature (1)..(145): Homolog of NCBI NO: 15242784 NR Description: transcription factor Hap5a-like protein
  misc_feature (1)..(145): Homolog of NCBI NO: 15228405 NR Description: transcription factor Hap5a
  misc_feature (1)..(146): Homolog of NCBI NO: 15221912 NR Description: heme activated protein, putative; protein id:
  misc_feature (4)..(146): Homolog of NCBI NO: 25372763 NR Description: hypothetical protein [imported] - Arabidopsis
  misc_feature (1)..(146): Homolog of NCBI NO: 6289057 NR Description: heme activated protein [Arabidopsis thaliana]
  misc_feature (1)..(146): Homolog of NCBI NO: 15223986 NR Description: putative transcription factor
  misc_feature (29)..(158): Homolog of NCBI NO: 2398533 NR Description: Transcription factor [Arabidopsis thaliana]
  misc_feature (29)..(164): Homolog of NCBI NO: 25404100 NR Description: transcription factor [imported] - Arabidopsis
  misc_feature (1)..(164): Homolog of NCBI NO: 15223482 NR Description: transcription factor, putative
  misc_feature (1)..(164): Homolog of NCBI NO: 21554704 NR Description: transcription factor, putative [Arabidopsis
MAFQQAHHFHHHHQQQQQKQLQMFWANQMQEIEHTTDFKNHTLPLARIKKIMKADEDVRMISAEAPVIFAKACEMFILELTLRAWIHTEENKRRTLQKNDIAAAISRTDVDFLVDIIPRDELKEEGLGVTKGTIPSVVGSPPYYYLQQQGMMQHWPQEQHPDES

SEQ ID NO: 36116 - DNA, 600 bp, Arabidopsis thaliana
  misc_feature (1)..(600): Ceres Seq. ID no. 12323078
  misc_feature: MA Experiment ID: 108435 Result: Down-regulated in Transcription
  misc_feature: MA Experiment 108435 PARAMETER Experiment Name: At_stm_Mutants_cDNA_P Parameter: Plant Line Value: wt Landsburg vs stm
  misc_feature: MA Experiment 108435 PARAMETER Experiment Name: At_stm_Mutants_cDNA_P Parameter: Tissue Value: Shoot Apical Meristem Region
  misc_feature: MA Experiment ID: 108461 Result: Up-regulated in Transcription
  misc_feature: MA Experiment 108461 PARAMETER Experiment Name: At_Germinating_Seeds_cDNA_P Parameter: Age (day) Value: 1 vs. 0
  misc_feature: MA Experiment 108461 PARAMETER Experiment Name: At_Germinating_Seeds_cDNA_P Parameter: Tissue Value: Germinating Seeds
  misc_feature: MA Experiment ID: 108462 Result: Up-regulated in Transcription
  misc_feature: MA Experiment 108462 PARAMETER Experiment Name: At_Germinating_Seeds_cDNA_P Parameter: Age (day) Value: 2 vs. 0
  misc_feature: MA Experiment 108462 PARAMETER Experiment Name: At_Germinating_Seeds_cDNA_P Parameter: Tissue Value: Germinating Seeds
  misc_feature: MA Experiment ID: 108464 Result: Up-regulated in Transcription
  misc_feature: MA Experiment 108464 PARAMETER Experiment Name: At_Germinating_Seeds_cDNA_P Parameter: Age (day) Value: 4 vs. 0
  misc_feature: MA Experiment 108464 PARAMETER Experiment Name: At_Germinating_Seeds_cDNA_P Parameter: Tissue Value: Germinating Seeds
  misc_feature: MA Experiment ID: 108573 Result: Down-regulated in Transcription
  misc_feature: MA Experiment 108573 PARAMETER Experiment Name: At_Drought_cDNA_P Parameter: Timepoint (hr) Value: 6
  misc_feature: MA Experiment 108573 PARAMETER Experiment Name: At_Drought_cDNA_P Parameter: Tissue Value: Aerial
  misc_feature: MA Experiment 108573 PARAMETER Experiment Name: At_Drought_cDNA_P Parameter: Treatment Value: Drought vs. No Drought
  misc_feature: MA Experiment ID: 108577 Result: Down-regulated in Transcription
  misc_feature: MA Experiment 108577 PARAMETER Experiment Name: At_42deg_Heat_cDNA_P Parameter: Temperature (deg C) Value: 42 vs. 22
  misc_feature: MA Experiment 108577 PARAMETER Experiment Name: At_42deg_Heat_cDNA_P Parameter: Timepoint (hr) Value: 6
  misc_feature: MA Experiment 108577 PARAMETER Experiment Name: At_42deg_Heat_cDNA_P Parameter: Tissue Value: Aerial
  misc_feature: MA Experiment ID: 108585 Result: Down-regulated in Transcription
  misc_feature: MA Experiment 108585 PARAMETER Experiment Name: At_5mM_NaNP_cDNA_P Parameter: Timepoint (hr) Value: 6
  misc_feature: MA Experiment 108585 PARAMETER Experiment Name: At_5mM_NaNP_cDNA_P Parameter: Tissue Value: Aerial
  misc_feature: MA Experiment 108585 PARAMETER Experiment Name: At_5mM_NaNP_cDNA_P Parameter: Treatment Value: null
  misc_feature: MA Experiment ID: 108595 Result: Down-regulated in Transcription
  misc_feature: MA Experiment 108595 PARAMETER Experiment Name: At_Ler-pi_Ovule_cDNA_P Parameter: Plant Line Value: null
  misc_feature: MA Experiment ID: 108668 Result: Down-regulated in Transcription
  misc_feature: MA Experiment 108668 PARAMETER Experiment Name: At_2mM_SA_cDNA_P Parameter: Plant Line Value: WS
  misc_feature: MA Experiment 108668 PARAMETER Experiment Name: At_2mM_SA_cDNA_P Parameter: Timepoint (hr) Value: 6
  misc_feature: MA Experiment 108668 PARAMETER Experiment Name: At_2mM_SA_cDNA_P Parameter: Treatment Value: 2mM SA vs. No Treatment
  misc_feature: MA Experiment ID: 20000070 Result: Down-regulated in Transcription
  misc_feature: MA Experiment 20000070 PARAMETER Experiment Name: At_100uM_ABA_Mutants_cDNA_P Parameter: Plant Line Value: CS24
  misc_feature: MA Experiment 20000070 PARAMETER Experiment Name: At_100uM_ABA_Mutants_cDNA_P Parameter: Timepoint (hr) Value: 6
  misc_feature: MA Experiment 20000070 PARAMETER Experiment Name: At_100uM_ABA_Mutants_cDNA_P Parameter: Tissue Value: Aerial
  misc_feature: MA Experiment 20000070 PARAMETER Experiment Name: At_100uM_ABA_Mutants_cDNA_P Parameter: Treatment Value: 100uM ABA vs. No Treatment
  misc_feature: MA Experiment ID: 20000071 Result: Down-regulated in Transcription
  misc_feature: MA Experiment 20000071 PARAMETER Experiment Name: At_100uM_ABA_Mutants_cDNA_P Parameter: Plant Line Value: CS8104
  misc_feature: MA Experiment 20000071 PARAMETER Experiment Name: At_100uM_ABA_Mutants_cDNA_P Parameter: Timepoint (hr) Value: 6
  misc_feature: MA Experiment 20000071 PARAMETER Experiment Name: At_100uM_ABA_Mutants_cDNA_P Parameter: Tissue Value: Aerial
  misc_feature: MA Experiment 20000071 PARAMETER Experiment Name: At_100uM_ABA_Mutants_cDNA_P Parameter: Treatment Value: 100uM ABA vs. No Treatment
  misc_feature: MA Experiment ID: 20000088 Result: Down-regulated in Transcription
  misc_feature: MA Experiment 20000088 PARAMETER Experiment Name: At_100uM_ABA_Mutants_cDNA_P Parameter: Plant Line Value: Landsberg
  misc_feature: MA Experiment 20000088 PARAMETER Experiment Name: At_100uM_ABA_Mutants_cDNA_P Parameter: Timepoint (hr) Value: 6
  misc_feature: MA Experiment 20000088 PARAMETER Experiment Name: At_100uM_ABA_Mutants_cDNA_P Parameter: Tissue Value: Aerial
  misc_feature: MA Experiment 20000088 PARAMETER Experiment Name: At_100uM_ABA_Mutants_cDNA_P Parameter: Treatment Value: 100uM ABA vs. No Treatment
  misc_feature: MA Experiment ID: 20000113 Result: Up-regulated in Transcription
  misc_feature: MA Experiment 20000113 PARAMETER Experiment Name: At_42deg_Heat_cDNA_P Parameter: Temperature (deg C) Value: 42 vs. 22
  misc_feature: MA Experiment 20000113 PARAMETER Experiment Name: At_42deg_Heat_cDNA_P Parameter: Timepoint (hr) Value: 8
  misc_feature: MA Experiment 20000113 PARAMETER Experiment Name: At_42deg_Heat_cDNA_P Parameter: Tissue Value: Aerial
  misc_feature: MA Experiment ID: 20000180 Result: Up-regulated in Transcription
  misc_feature: MA Experiment 20000180 PARAMETER Experiment Name: At_Germinating_Seeds_P Parameter: Age (hr) Value: 24 vs. 0
  misc_feature: MA Experiment 20000180 PARAMETER Experiment Name: At_Germinating_Seeds_P Parameter: Tissue Value: Germinating Seeds
  misc_feature: MA Experiment ID: 20000182 Result: Down-regulated in Transcription
  misc_feature: MA Experiment 20000182 PARAMETER Experiment Name: At_2mM_SA_P Parameter: Age (day) Value: 14
  misc_feature: MA Experiment 20000182 PARAMETER Experiment Name: At_2mM_SA_P Parameter: Organism Value: A. thaliana
  misc_feature: MA Experiment 20000182 PARAMETER Experiment Name: At_2mM_SA_P Parameter: Plant Line Value: WS
  misc_feature: MA Experiment 20000182 PARAMETER Experiment Name: At_2mM_SA_P Parameter: Timepoint (hr) Value: 6
  misc_feature: MA Experiment 20000182 PARAMETER Experiment Name: At_2mM_SA_P Parameter: Tissue Value: Aerial
  misc_feature: MA Experiment 20000182 PARAMETER Experiment Name: At_2mM_SA_P Parameter: Treatment Value: 2mM SA vs. No Treatment
  misc_feature: MA Experiment ID: 20000184 Result: Up-regulated in Transcription
  misc_feature: MA Experiment 20000184 PARAMETER Experiment Name: At_Shoots__P Parameter: Age (day) Value: 7
  misc_feature: MA Experiment 20000184 PARAMETER Experiment Name: At_Shoots__P Parameter: Tissue Value: Shoots vs. Whole Plant
  misc_feature: MA Experiment ID: 20000185 Result: Down-regulated in Transcription
  misc_feature: MA Experiment 20000185 PARAMETER Experiment Name: At_Roots__P Parameter: Age (day) Value: 7 vs. 21
  misc_feature: MA Experiment 20000185 PARAMETER Experiment Name: At_Roots__P Parameter: Organism Value: A. thaliana
  misc_feature: MA Experiment 20000185 PARAMETER Experiment Name: At_Roots__P Parameter: Tissue Value: Roots vs. Whole Plant
  misc_feature: MA Experiment ID: 20000224 Result: Up-regulated in Transcription
  misc_feature: MA Experiment ID: 20000436 Result: Down-regulated in Transcription
  misc_feature: MA Experiment 20000436 PARAMETER Experiment Name: At_Drought_P Parameter: Age (day) Value: 7
  misc_feature: MA Experiment 20000436 PARAMETER Experiment Name: At_Drought_P Parameter: Organism Value: A. thaliana
  misc_feature: MA Experiment 20000436 PARAMETER Experiment Name: At_Drought_P Parameter: Plant Line Value: WS
  misc_feature: MA Experiment 20000436 PARAMETER Experiment Name: At_Drought_P Parameter: Timepoint (hr) Value: 12
  misc_feature: MA Experiment 20000436 PARAMETER Experiment Name: At_Drought_P Parameter: Tissue Value: Whole Plant
  misc_feature: MA Experiment 20000436 PARAMETER Experiment Name: At_Drought_P Parameter: Treatment Value: Drought vs. No Drought
  misc_feature: MA Experiment ID: 20000437 Result: Down-regulated in Transcription
  misc_feature: MA Experiment 20000437 PARAMETER Experiment Name: At_Drought_P Parameter: Age (day) Value: 8
  misc_feature: MA Experiment 20000437 PARAMETER Experiment Name: At_Drought_P Parameter: Organism Value: A. thaliana
  misc_feature: MA Experiment 20000437 PARAMETER Experiment Name: At_Drought_P Parameter: Plant Line Value: WS
  misc_feature: MA Experiment 20000437 PARAMETER Experiment Name: At_Drought_P Parameter: Timepoint (hr) Value: 24
  misc_feature: MA Experiment 20000437 PARAMETER Experiment Name: At_Drought_P Parameter: Tissue Value: Whole Plant
  misc_feature: MA Experiment 20000437 PARAMETER Experiment Name: At_Drought_P Parameter: Treatment Value: Drought vs. No Drought
  misc_feature: MA Experiment ID: 20000439 Result: Down-regulated in Transcription
  misc_feature: MA Experiment 20000439 PARAMETER Experiment Name: At_Roots__P Parameter: Age (day) Value: 14 vs. 21
  misc_feature: MA Experiment 20000439 PARAMETER Experiment Name: At_Roots__P Parameter: Organism Value: A. thaliana
  misc_feature: MA Experiment 20000439 PARAMETER Experiment Name: At_Roots__P Parameter: Tissue Value: Roots vs. Whole Plant
  misc_feature: MA Experiment ID: 20000496 Result: Down-regulated in Transcription
  misc_feature: MA Experiment 20000496 PARAMETER Experiment Name: At_Guard_Cells_P Parameter: Harvest Date Value: 7/19/2002
  misc_feature: MA Experiment 20000496 PARAMETER Experiment Name: At_Guard_Cells_P Parameter: Organism Value: Canola
  misc_feature: MA Experiment 20000496 PARAMETER Experiment Name: At_Guard_Cells_P Parameter: Tissue Value: Guard Cells vs. Leaves
  misc_feature: MA Experiment ID: 20000794 Result: Down-regulated in Transcription
  misc_feature: MA Experiment 20000794 PARAMETER Experiment Name: At_Petals_P Parameter: Age (day) Value: 23-25 days
  misc_feature: MA Experiment 20000794 PARAMETER Experiment Name: At_Petals_P Parameter: Plant Line Value: WS
  misc_feature: MA Experiment 20000794 PARAMETER Experiment Name: At_Petals_P Parameter: Tissue Value: Petals vs. Whole plant
  misc_feature: MA Experiment ID: 20001247 Result: Down-regulated in Transcription
  misc_feature: MA Experiment 20001247 PARAMETER Experiment Name: At_Far-red-induction_P Parameter: Age (day) Value: 7
  misc_feature: MA Experiment 20001247 PARAMETER Experiment Name: At_Far-red-induction_P Parameter: Light Value: Far-red vs. White
  misc_feature: MA Experiment 20001247 PARAMETER Experiment Name: At_Far-red-induction_P Parameter: Organism Value: A. thaliana
  misc_feature: MA Experiment 20001247 PARAMETER Experiment Name: At_Far-red-induction_P Parameter: Plant Line Value: Columbia
  misc_feature: MA Experiment 20001247 PARAMETER Experiment Name: At_Far-red-induction_P Parameter: Timepoint (hr) Value: 1
  misc_feature: MA Experiment 20001247 PARAMETER Experiment Name: At_Far-red-induction_P Parameter: Tissue Value: Whole Plant
  misc_feature: MA Experiment ID: 20001248 Result: Down-regulated in Transcription
  misc_feature: MA Experiment 20001248 PARAMETER Experiment Name: At_Far-red-induction_P Parameter: Age (day) Value: 7
  misc_feature: MA Experiment 20001248 PARAMETER Experiment Name: At_Far-red-induction_P Parameter: Light Value: Far-red vs. White
  misc_feature: MA Experiment 20001248 PARAMETER Experiment Name: At_Far-red-induction_P Parameter: Organism Value: A. thaliana
  misc_feature: MA Experiment 20001248 PARAMETER Experiment Name: At_Far-red-induction_P Parameter: Plant Line Value: Columbia
  misc_feature: MA Experiment 20001248 PARAMETER Experiment Name: At_Far-red-induction_P Parameter: Timepoint (hr) Value: 4
  misc_feature: MA Experiment 20001248 PARAMETER Experiment Name: At_Far-red-induction_P Parameter: Tissue Value: Whole Plant
  misc_feature: MA Experiment ID: 20001450 Result: Down-regulated in Transcription
  misc_feature: MA Experiment 20001450 PARAMETER Experiment Name: At_Far-red-induction_P Parameter: Age (day) Value: 7
  misc_feature: MA Experiment 20001450 PARAMETER Experiment Name: At_Far-red-induction_P Parameter: Light Value: Far-red vs. White
  misc_feature: MA Experiment 20001450 PARAMETER Experiment Name: At_Far-red-induction_P Parameter: Organism Value: A. thaliana
  misc_feature: MA Experiment 20001450 PARAMETER Experiment Name: At_Far-red-induction_P Parameter: Plant Line Value: Columbia
  misc_feature: MA Experiment 20001450 PARAMETER Experiment Name: At_Far-red-induction_P Parameter: Timepoint (hr) Value: 8
  misc_feature: MA Experiment 20001450 PARAMETER Experiment Name: At_Far-red-induction_P Parameter: Tissue Value: Whole Plant
  misc_feature: MA Experiment ID: 20001757 Result: Up-regulated in Transcription
  misc_feature: MA Experiment 20001757 PARAMETER Experiment Name: At_50mM_NH4NO3_L-to-H_P Parameter: Timepoint (hr) Value: 6
  misc_feature: MA Experiment 20001757 PARAMETER Experiment Name: At_50mM_NH4NO3_L-to-H_P Parameter: Tissue Value: Leaf
  misc_feature: MA Experiment 20001757 PARAMETER Experiment Name: At_50mM_NH4NO3_L-to-H_P Parameter: Treatment Value: 50mM NH4NO3 vs 100mM Mannitol
  misc_feature: MA Experiment ID: 20001904 Result: Down-regulated in Transcription
  misc_feature: MA Experiment 20001904 PARAMETER Experiment Name: At_Drought_Reproduction_P Parameter: Age (day) Value: 37
  misc_feature: MA Experiment 20001904 PARAMETER Experiment Name: At_Drought_Reproduction_P Parameter: Organism Value: A. thaliana
  misc_feature: MA Experiment 20001904 PARAMETER Experiment Name: At_Drought_Reproduction_P Parameter: Plant Line Value: WS
  misc_feature: MA Experiment 20001904 PARAMETER Experiment Name: At_Drought_Reproduction_P Parameter: Timepoint (day) Value: 7
  misc_feature: MA Experiment 20001904 PARAMETER Experiment Name: At_Drought_Reproduction_P Parameter: Tissue Value: Rosettes
  misc_feature: MA Experiment 20001904 PARAMETER Experiment Name: At_Drought_Reproduction_P Parameter: Treatment Value: Drought vs. No Drought
  misc_feature: MA Experiment ID: 20001905 Result: Down-regulated in Transcription
  misc_feature: MA Experiment 20001905 PARAMETER Experiment Name: At_Drought_Reproduction_P Parameter: Age (day) Value: 40
  misc_feature: MA Experiment 20001905 PARAMETER Experiment Name: At_Drought_Reproduction_P Parameter: Organism Value: A. thaliana
  misc_feature: MA Experiment 20001905 PARAMETER Experiment Name: At_Drought_Reproduction_P Parameter: Plant Line Value: WS
  misc_feature: MA Experiment 20001905 PARAMETER Experiment Name: At_Drought_Reproduction_P Parameter: Timepoint (day) Value: 10
  misc_feature: MA Experiment 20001905 PARAMETER Experiment Name: At_Drought_Reproduction_P Parameter: Tissue Value: Rosettes
  misc_feature: MA Experiment 20001905 PARAMETER Experiment Name: At_Drought_Reproduction_P Parameter: Treatment Value: Drought vs. No Drought
  misc_feature: MA Experiment ID: 20001906 Result: Down-regulated in Transcription
  misc_feature: MA Experiment 20001906 PARAMETER Experiment Name: At_Drought_Reproduction_P Parameter: Age (day) Value: 35
  misc_feature: MA Experiment 20001906 PARAMETER Experiment Name: At_Drought_Reproduction_P Parameter: Organism Value: A. thaliana
  misc_feature: MA Experiment 20001906 PARAMETER Experiment Name: At_Drought_Reproduction_P Parameter: Plant Line Value: WS
  misc_feature: MA Experiment 20001906 PARAMETER Experiment Name: At_Drought_Reproduction_P Parameter: Timepoint (day) Value: 5
  misc_feature: MA Experiment 20001906 PARAMETER Experiment Name: At_Drought_Reproduction_P Parameter: Tissue Value: Siliques
  misc_feature: MA Experiment 20001906 PARAMETER Experiment Name: At_Drought_Reproduction_P Parameter: Treatment Value: Drought vs. No Drought
aaaaacattagaagaagaaatagaaatgagagctctcttgtgctcacaccgtttactaccattatcatctctctcaagaacaaccgtcaaaaccaaatctcacaatccaaaaaccctatatcctaacaacaaaccaagatgggaatccaagctccacgctggacctaaagggtttcaatcttctagaacctctgaaaaacccggccggccagacccggacccggaagacgatcccccgatacctcaagaagtgttcgagaggatgatggggaggattgtggtgtctgtgggaacaccactgggcttgggagtggcgatcttgaaagtactcgaagttttgaaggatagaaacgtctgggacgtgcctttgtgggttccatacttgaccacactcgtgacctttggttcgtcggctcttgggattgcgtacggaagcttgtccacaaacctggacccggccaagactaactctctttttggactcaaagaggcaaaggagaattgggtagagatgtggaaagaggaccaataatggtaatgtattaatgataataatcttgatttttctttgggaaagtctcataaaaacttttaagctgg

SEQ ID NO: 36117 - protein, 176 aa, Arabidopsis thaliana
  peptide (1)..(176): Ceres Seq. ID no. 12323079
  misc_feature (59)..(167): Homolog of NCBI NO: 33862919 NR Description: conserved hypothetical protein
  misc_feature (59)..(176): Homolog of NCBI NO: 16329473 NR Description: unknown protein [Synechocystis sp. PCC 6803]
  misc_feature (67)..(167): Homolog of NCBI NO: 37521309 NR Description: hypothetical protein glr1740 [Gloeobacter
  misc_feature (33)..(174): Homolog of NCBI NO: 23041124 NR Description: hypothetical protein [Trichodesmium erythraeum
  misc_feature (41)..(174): Homolog of NCBI NO: 17228243 NR Description: hypothetical protein [Nostoc sp. PCC 7120]
  misc_feature (41)..(174): Homolog of NCBI NO: 23127194 NR Description: hypothetical protein [Nostoc punctiforme]
  misc_feature (10)..(173): Homolog of NCBI NO: 7487141 NR Description: hypothetical protein T18B16.70 - Arabidopsis
  misc_feature (25)..(175): Homolog of NCBI NO: 37536396 NR Description: hypothetical protein [Oryza sativa (japonica
  misc_feature (9)..(176): Homolog of NCBI NO: 15237263 NR Description: putative protein
KTLEEEIEMRALLCSHRLLPLSSLSRTTVKTKSHNPKTLYPNNKPRWESKLHAGPKGFQSSRTSEKPGRPDPDPEDDPPIPQEVFERMMGRIVVSVGTPLGLGVAILKVLEVLKDRNVWDVPLWVPYLTTLVTFGSSALGIAYGSLSTNLDPAKTNSLFGLKEAKENWVEMWKEDQ

SEQ ID NO: 36118 - protein, 168 aa, Arabidopsis thaliana
  peptide (1)..(168): Ceres Seq. ID no. 12323080
  misc_feature (51)..(159): Homolog of NCBI NO: 33862919 NR Description: conserved hypothetical protein
  misc_feature (51)..(168): Homolog of NCBI NO: 16329473 NR Description: unknown protein [Synechocystis sp. PCC 6803]
  misc_feature (59)..(159): Homolog of NCBI NO: 37521309 NR Description: hypothetical protein glr1740 [Gloeobacter
  misc_feature (25)..(166): Homolog of NCBI NO: 23041124 NR Description: hypothetical protein [Trichodesmium erythraeum
  misc_feature (33)..(166): Homolog of NCBI NO: 17228243 NR Description: hypothetical protein [Nostoc sp. PCC 7120]
  misc_feature (33)..(166): Homolog of NCBI NO: 23127194 NR Description: hypothetical protein [Nostoc punctiforme]
  misc_feature (2)..(165): Homolog of NCBI NO: 7487141 NR Description: hypothetical protein T18B16.70 - Arabidopsis
  misc_feature (17)..(167): Homolog of NCBI NO: 37536396 NR Description: hypothetical protein [Oryza sativa (japonica
  misc_feature (1)..(168): Homolog of NCBI NO: 15237263 NR Description: putative protein
MRALLCSHRLLPLSSLSRTTVKTKSHNPKTLYPNNKPRWESKLHAGPKGFQSSRTSEKPGRPDPDPEDDPPIPQEVFERMMGRIVVSVGTPLGLGVAILKVLEVLKDRNVWDVPLWVPYLTTLVTFGSSALGIAYGSLSTNLDPAKTNSLFGLKEAKENWVEMWKEDQ

SEQ ID NO: 36119 - protein, 89 aa, Arabidopsis thaliana
  peptide (1)..(89): Ceres Seq. ID no. 12323081
  misc_feature (1)..(80): Homolog of NCBI NO: 33862919 NR Description: conserved hypothetical protein
  misc_feature (1)..(89): Homolog of NCBI NO: 16329473 NR Description: unknown protein [Synechocystis sp. PCC 6803]
  misc_feature (1)..(80): Homolog of NCBI NO: 37521309 NR Description: hypothetical protein glr1740 [Gloeobacter
  misc_feature (1)..(87): Homolog of NCBI NO: 23041124 NR Description: hypothetical protein [Trichodesmium erythraeum
  misc_feature (1)..(87): Homolog of NCBI NO: 17228243 NR Description: hypothetical protein [Nostoc sp. PCC 7120]
  misc_feature (1)..(87): Homolog of NCBI NO: 23127194 NR Description: hypothetical protein [Nostoc punctiforme]
  misc_feature (1)..(86): Homolog of NCBI NO: 7487141 NR Description: hypothetical protein T18B16.70 - Arabidopsis
  misc_feature (1)..(88): Homolog of NCBI NO: 37536396 NR Description: hypothetical protein [Oryza sativa (japonica
  misc_feature (1)..(89): Homolog of NCBI NO: 15237263 NR Description: putative protein
MMGRIVVSVGTPLGLGVAILKVLEVLKDRNVWDVPLWVPYLTTLVTFGSSALGIAYGSLSTNLDPAKTNSLFGLKEAKENWVEMWKEDQ

SEQ ID NO: 36120 - DNA, 989 bp, Arabidopsis thaliana
  misc_feature (1)..(989): Ceres Seq. ID no. 12327130
  misc_feature: MA Experiment ID: 108569 Result: Down-regulated in Transcription
  misc_feature: MA Experiment 108569 PARAMETER Experiment Name: At_0.001%_MeJA__cDNA_P Parameter: Timepoint (hr) Value: 6
  misc_feature: MA Experiment 108569 PARAMETER Experiment Name: At_0.001%_MeJA__cDNA_P Parameter: Tissue Value: Aerial
  misc_feature: MA Experiment 108569 PARAMETER Experiment Name: At_0.001%_MeJA__cDNA_P Parameter: Treatment Value: 0.001% MeJA vs. No Treatment
  misc_feature: MA Experiment ID: 20000111 Result: Down-regulated in Transcription
  misc_feature: MA Experiment 20000111 PARAMETER Experiment Name: At_42deg_Heat_cDNA_P Parameter: Temperature (deg C) Value: 42 vs. 22
  misc_feature: MA Experiment 20000111 PARAMETER Experiment Name: At_42deg_Heat_cDNA_P Parameter: Timepoint (hr) Value: 6
  misc_feature: MA Experiment 20000111 PARAMETER Experiment Name: At_42deg_Heat_cDNA_P Parameter: Tissue Value: Aerial
  misc_feature: MA Experiment ID: 20000113 Result: Down-regulated in Transcription
  misc_feature: MA Experiment 20000113 PARAMETER Experiment Name: At_42deg_Heat_cDNA_P Parameter: Temperature (deg C) Value: 42 vs. 22
  misc_feature: MA Experiment 20000113 PARAMETER Experiment Name: At_42deg_Heat_cDNA_P Parameter: Timepoint (hr) Value: 8
  misc_feature: MA Experiment 20000113 PARAMETER Experiment Name: At_42deg_Heat_cDNA_P Parameter: Tissue Value: Aerial
aaaataatattcaaattcaaaatctgtccaaattcatctagggtttctgataaaacagacgaagaagatccaaattcgctaacaatgggaggtgaaggagaagatctagagccactttttgattatcgtcgtgttcagccagcgaatttcgtttgtatcgatgatgatgatgatgatgcctcggtgacgccaattccgaagaaagcgaaaacttcacaaacagttgagaagttagatgatgatgtgaaagtgattgaagttacgggtgatgacgattggttgcttcctccaccaaaggttatcttcgacaaaagtaaagactctgttgaagattcaactattaaagcattgaggtcgaagaagatggagctcatgtcatttacaaaaactgtaggagatgtgatgcaggaagttgaggagtctgctaaaagggaagttgaagaatctcgcaatccatcttcagagactgctgctcagttaccatcagagcctacgaatgacagggccaagattgttattacaatacaggacaaagatggacagaagacactccgggtgtttgcggacgagaaatttgagagggttatcaaactgtatacagataaagctaagcttgacccgcaaaatcttgtatttatttttgacggtgataagattgatccatcaaccactccttctgaacttggcatggaggatcatgatatgattgaagtgcacaccaaaaaaacttgacaaataggcgctaatcggaatctggaatgtcaaatctgttccatcttttgcgaaaaaccagagttttgtacatcaacatgggcatgggaagggatctctctgctaacatctggtgtttgtatctgtgacctttctcattttatcggaattttgtttctttctttctttcactctttctgtcactctttattaggcgtgtataatatataaggtaaaccaaaccattttgattttaactaatcctattgaatccaatc

SEQ ID NO: 36121 - protein, 243 aa, Arabidopsis thaliana
  peptide (1)..(243): Ceres Seq. ID no. 12327131
  misc_feature (171)..(243): Pfam Name: Ubiquitin family Pfam Description: Ubiquitin family
  misc_feature (53)..(238): Homolog of NCBI NO: 34912494 NR Description: putative amino acid or GABA permease
  misc_feature (29)..(243): Homolog of NCBI NO: 18408968 NR Description: Expressed protein
KIIFKFKICPNSSRVSDKTDEEDPNSLTMGGEGEDLEPLFDYRRVQPANFVCIDDDDDDASVTPIPKKAKTSQTVEKLDDDVKVIEVTGDDDWLLPPPKVIFDKSKDSVEDSTIKALRSKKMELMSFTKTVGDVMQEVEESAKREVEESRNPSSETAAQLPSEPTNDRAKIVITIQDKDGQKTLRVFADEKFERVIKLYTDKAKLDPQNLVFIFDGDKIDPSTTPSELGMEDHDMIEVHTKKT

SEQ ID NO: 36122 - protein, 215 aa, Arabidopsis thaliana
  peptide (1)..(215): Ceres Seq. ID no. 12327132
  misc_feature (143)..(215): Pfam Name: Ubiquitin family Pfam Description: Ubiquitin family
  misc_feature (25)..(210): Homolog of NCBI NO: 34912494 NR Description: putative amino acid or GABA permease
  misc_feature (1)..(215): Homolog of NCBI NO: 18408968 NR Description: Expressed protein
MGGEGEDLEPLFDYRRVQPANFVCIDDDDDDASVTPIPKKAKTSQTVEKLDDDVKVIEVTGDDDWLLPPPKVIFDKSKDSVEDSTIKALRSKKMELMSFTKTVGDVMQEVEESAKREVEESRNPSSETAAQLPSEPTNDRAKIVITIQDKDGQKTLRVFADEKFERVIKLYTDKAKLDPQNLVFIFDGDKIDPSTTPSELGMEDHDMIEVHTKKT

SEQ ID NO: 36123 - protein, 122 aa, Arabidopsis thaliana
  peptide (1)..(122): Ceres Seq. ID no. 12327133
  misc_feature (50)..(122): Pfam Name: Ubiquitin family Pfam Description: Ubiquitin family
  misc_feature (1)..(117): Homolog of NCBI NO: 34912494 NR Description: putative amino acid or GABA permease
  misc_feature (1)..(122): Homolog of NCBI NO: 18408968 NR Description: Expressed protein
MELMSFTKTVGDVMQEVEESAKREVEESRNPSSETAAQLPSEPTNDRAKIVITIQDKDGQKTLRVFADEKFERVIKLYTDKAKLDPQNLVFIFDGDKIDPSTTPSELGMEDHDMIEVHTKKT

SEQ ID NO: 36124 - DNA, 1020 bp, Arabidopsis thaliana
  misc_feature (1)..(1020): Ceres Seq. ID no. 12562601
  misc_feature: MA Experiment ID: 108434 Result: Up-regulated in Transcription
  misc_feature: MA Experiment 108434 PARAMETER Experiment Name: At_Root_Tips_cDNA_P Parameter: Tissue Value: Root Tips
  misc_feature: MA Experiment ID: 108462 Result: Down-regulated in Transcription
  misc_feature: MA Experiment 108462 PARAMETER Experiment Name: At_Germinating_Seeds_cDNA_P Parameter: Age (day) Value: 2 vs. 0
  misc_feature: MA Experiment 108462 PARAMETER Experiment Name: At_Germinating_Seeds_cDNA_P Parameter: Tissue Value: Germinating Seeds
  misc_feature: MA Experiment ID: 108463 Result: Down-regulated in Transcription
  misc_feature: MA Experiment 108463 PARAMETER Experiment Name: At_Germinating_Seeds_cDNA_P Parameter: Age (day) Value: 3 vs. 0
  misc_feature: MA Experiment 108463 PARAMETER Experiment Name: At_Germinating_Seeds_cDNA_P Parameter: Tissue Value: Germinating Seeds
  misc_feature: MA Experiment ID: 108573 Result: Up-regulated in Transcription
  misc_feature: MA Experiment 108573 PARAMETER Experiment Name: At_Drought_cDNA_P Parameter: Timepoint (hr) Value: 6
  misc_feature: MA Experiment 108573 PARAMETER Experiment Name: At_Drought_cDNA_P Parameter: Tissue Value: Aerial
  misc_feature: MA Experiment 108573 PARAMETER Experiment Name: At_Drought_cDNA_P Parameter: Treatment Value: Drought vs. No Drought
  misc_feature: MA Experiment ID: 108585 Result: Up-regulated in Transcription
  misc_feature: MA Experiment 108585 PARAMETER Experiment Name: At_5mM_NaNP_cDNA_P Parameter: Timepoint (hr) Value: 6
  misc_feature: MA Experiment 108585 PARAMETER Experiment Name: At_5mM_NaNP_cDNA_P Parameter: Tissue Value: Aerial
  misc_feature: MA Experiment 108585 PARAMETER Experiment Name: At_5mM_NaNP_cDNA_P Parameter: Treatment Value: null
  misc_feature: MA Experiment ID: 20000179 Result: Down-regulated in Transcription
  misc_feature: MA Experiment 20000179 PARAMETER Experiment Name: At_Germinating_Seeds_P Parameter: Age (hr) Value: 6 vs. 0
  misc_feature: MA Experiment 20000179 PARAMETER Experiment Name: At_Germinating_Seeds_P Parameter: Tissue Value: Germinating Seeds
agagctaataagatccgattcggaagtttctttgacatcaaaacacaaacccggaaagcttcgtctgccatttttcattcttctaagccctagctcaaagctttctctctcaaatccgccatgactaaacagcacgcgaactggtctccttacgataacaatggaggaacatgtgtggccatcgctggatcggattactgtgttatcgccgccgatactcggatgtctactggttacagtattcttagtcgcgattactccaaaatccataaactagcggacagagctgttttgtcttcctctggcttccaggctgatgtgaaagctttgcagaaggttctcaaatccagacacttgatctatcaacatcagcataacaagcagatgagctgtcctgcaatggcccagcttctctccaacacgctttatttcaagcggtttttcccctactatgcctttaatgttctaggagggcttgacgaggaaggaaaagggtgtgtctttacttacgacgctgttggctcatacgagagagttggatacggtgctcaaggttctggttccacactcatcatgcctttccttgacaatcagctcaagtctccaagtcctcttttgctacctaaacaggattcaaacacgcccctttccgaagctgaagcagttgacttggttaaaactgttttcgcatctgccacagagagggatatctacactggagacaagcttgagattatgatacttaaggccgacggtatcaagaccgaactcatggacctgaggaaagactaagctcctttagtgcatttagccaaccttatcggtttgttatttcacttcaacatcgagcttcctgagttgtagaactcgtatgaaatgctactgggtttgatattttacagttaaaatcatgactcgtgtttgaagtttctccaaaactgtttccttatgtatgagaatcactcgaatccttgtcttaaatcaatgtttctctcactatttatggcaatgtttttacat

SEQ ID NO: 36125 - protein, 223 aa, Arabidopsis thaliana
  peptide (1)..(223): Ceres Seq. ID no. 12562602
  misc_feature (12)..(208): Pfam Name: Proteasome A-type and B-type Pfam Description: Proteasome A-type and B-type
  misc_feature (12)..(208): Pfam Name: Proteasome A-type and B-type Pfam Description: Proteasome A-type and B-type
  misc_feature (8)..(223): Homolog of NCBI NO: 38174388 NR Description: Unknown (protein for MGC:75736) [Silurana
  misc_feature (8)..(223): Homolog of NCBI NO: 27694605 NR Description: Unknown (protein for MGC:52861) [Xenopus laevis]
  misc_feature (4)..(223): Homolog of NCBI NO: 17380207 NR Description: Proteasome subunit beta type 1-A (20S proteasome
  misc_feature (4)..(223): Homolog of NCBI NO: 17380206 NR Description: Proteasome subunit beta type 1-B (20S proteasome
  misc_feature (5)..(223): Homolog of NCBI NO: 28829610 NR Description: similar to Petunia hybrida (Petunia). Proteasome beta type 1 (EC 3.4.99.46) (20S proteasome alpha subunit F) (20S
  misc_feature (8)..(223): Homolog of NCBI NO: 38174388 NR Description: Unknown (protein for MGC:75736) [Silurana
  misc_feature (4)..(223): Homolog of NCBI NO: 17380207 NR Description: Proteasome subunit beta type 1-A (20S proteasome
  misc_feature (5)..(223): Homolog of NCBI NO: 28829610 NR Description: similar to Petunia hybrida (Petunia). Proteasome beta type 1 (EC 3.4.99.46) (20S proteasome alpha subunit F) (20S
  misc_feature (1)..(223): Homolog of NCBI NO: 600387 NR Description: proteosome subunit [Arabidopsis thaliana]
  misc_feature (1)..(223): Homolog of NCBI NO: 15232965 NR Description: 20S proteasome beta subunit F1 (PBF1)
  misc_feature (1)..(223): Homolog of NCBI NO: 17380185 NR Description: Proteasome subunit beta type 1 (20S proteasome
  misc_feature (4)..(223): Homolog of NCBI NO: 17380182 NR Description: Proteasome subunit beta type 1 (20S proteasome
  misc_feature (9)..(200): Homolog of NCBI NO: 14594933 NR Description: putative beta6 proteasome subunit [Nicotiana
  misc_feature (4)..(223): Homolog of NCBI NO: 17380206 NR Description: Proteasome subunit beta type 1-B (20S proteasome
  misc_feature (8)..(223): Homolog of NCBI NO: 27694605 NR Description: Unknown (protein for MGC:52861) [Xenopus laevis]
  misc_feature (9)..(200): Homolog of NCBI NO: 14594933 NR Description: putative beta6 proteasome subunit [Nicotiana
  misc_feature (4)..(223): Homolog of NCBI NO: 17380182 NR Description: Proteasome subunit beta type 1 (20S proteasome
  misc_feature (1)..(223): Homolog of NCBI NO: 17380185 NR Description: Proteasome subunit beta type 1 (20S proteasome
  misc_feature (1)..(223): Homolog of NCBI NO: 15232965 NR Description: 20S proteasome beta subunit F1 (PBF1)
  misc_feature (1)..(223): Homolog of NCBI NO: 600387 NR Description: proteosome subunit [Arabidopsis thaliana]
MTKQHANWSPYDNNGGTCVAIAGSDYCVIAADTRMSTGYSILSRDYSKIHKLADRAVLSSSGFQADVKALQKVLKSRHLIYQHQHNKQMSCPAMAQLLSNTLYFKRFFPYYAFNVLGGLDEEGKGCVFTYDAVGSYERVGYGAQGSGSTLIMPFLDNQLKSPSPLLLPKQDSNTPLSEAEAVDLVKTVFASATERDIYTGDKLEIMILKADGIKTELMDLRKD

SEQ ID NO: 36126 - protein, 189 aa, Arabidopsis thaliana
  peptide (1)..(189): Ceres Seq. ID no. 12562603
  misc_feature (1)..(174): Pfam Name: Proteasome A-type and B-type Pfam Description: Proteasome A-type and B-type
  misc_feature (1)..(174): Pfam Name: Proteasome A-type and B-type Pfam Description: Proteasome A-type and B-type
  misc_feature (1)..(189): Homolog of NCBI NO: 38174388 NR Description: Unknown (protein for MGC:75736) [Silurana
  misc_feature (1)..(189): Homolog of NCBI NO: 27694605 NR Description: Unknown (protein for MGC:52861) [Xenopus laevis]
  misc_feature (1)..(189): Homolog of NCBI NO: 17380207 NR Description: Proteasome subunit beta type 1-A (20S proteasome
  misc_feature (1)..(189): Homolog of NCBI NO: 17380206 NR Description: Proteasome subunit beta type 1-B (20S proteasome
  misc_feature (1)..(189): Homolog of NCBI NO: 28829610 NR Description: similar to Petunia hybrida (Petunia). Proteasome beta type 1 (EC 3.4.99.46) (20S proteasome alpha subunit F) (20S
  misc_feature (1)..(189): Homolog of NCBI NO: 38174388 NR Description: Unknown (protein for MGC:75736) [Silurana
  misc_feature (1)..(189): Homolog of NCBI NO: 17380207 NR Description: Proteasome subunit beta type 1-A (20S proteasome
  misc_feature (1)..(189): Homolog of NCBI NO: 28829610 NR Description: similar to Petunia hybrida (Petunia). Proteasome beta type 1 (EC 3.4.99.46) (20S proteasome alpha subunit F) (20S
  misc_feature (1)..(189): Homolog of NCBI NO: 600387 NR Description: proteosome subunit [Arabidopsis thaliana]
  misc_feature (1)..(189): Homolog of NCBI NO: 15232965 NR Description: 20S proteasome beta subunit F1 (PBF1)
  misc_feature (1)..(189): Homolog of NCBI NO: 17380185 NR Description: Proteasome subunit beta type 1 (20S proteasome
  misc_feature (1)..(189): Homolog of NCBI NO: 17380182 NR Description: Proteasome subunit beta type 1 (20S proteasome
  misc_feature (1)..(166): Homolog of NCBI NO: 14594933 NR Description: putative beta6 proteasome subunit [Nicotiana
  misc_feature (1)..(189): Homolog of NCBI NO: 17380206 NR Description: Proteasome subunit beta type 1-B (20S proteasome
  misc_feature (1)..(189): Homolog of NCBI NO: 27694605 NR Description: Unknown (protein for MGC:52861) [Xenopus laevis]
  misc_feature (1)..(166): Homolog of NCBI NO: 14594933 NR Description: putative beta6 proteasome subunit [Nicotiana
  misc_feature (1)..(189): Homolog of NCBI NO: 17380182 NR Description: Proteasome subunit beta type 1 (20S proteasome
  misc_feature (1)..(189): Homolog of NCBI NO: 17380185 NR Description: Proteasome subunit beta type 1 (20S proteasome
  misc_feature (1)..(189): Homolog of NCBI NO: 15232965 NR Description: 20S proteasome beta subunit F1 (PBF1)
  misc_feature (1)..(189): Homolog of NCBI NO: 600387 NR Description: proteosome subunit [Arabidopsis thaliana]
MSTGYSILSRDYSKIHKLADRAVLSSSGFQADVKALQKVLKSRHLIYQHQHNKQMSCPAMAQLLSNTLYFKRFFPYYAFNVLGGLDEEGKGCVFTYDAVGSYERVGYGAQGSGSTLIMPFLDNQLKSPSPLLLPKQDSNTPLSEAEAVDLVKTVFASATERDIYTGDKLEIMILKADGIKTELMDLRKD

SEQ ID NO: 36127 - protein, 135 aa, Arabidopsis thaliana; identical to SEQ ID NO: 22828
  peptide (1)..(135): Ceres Seq. ID no. 12562604
  misc_feature (1)..(120): Pfam Name: Proteasome A-type and B-type Pfam Description: Proteasome A-type and B-type
  misc_feature (1)..(120): Pfam Name: Proteasome A-type and B-type Pfam Description: Proteasome A-type and B-type
  misc_feature (1)..(135): Homolog of NCBI NO: 38174388 NR Description: Unknown (protein for MGC:75736) [Silurana
  misc_feature (1)..(135): Homolog of NCBI NO: 27694605 NR Description: Unknown (protein for MGC:52861) [Xenopus laevis]
  misc_feature (1)..(135): Homolog of NCBI NO: 17380207 NR Description: Proteasome subunit beta type 1-A (20S proteasome
  misc_feature (1)..(135): Homolog of NCBI NO: 17380206 NR Description: Proteasome subunit beta type 1-B (20S proteasome
  misc_feature (1)..(135): Homolog of NCBI NO: 28829610 NR Description: similar to Petunia hybrida (Petunia). Proteasome beta type 1 (EC 3.4.99.46) (20S proteasome alpha subunit F) (20S
  misc_feature (1)..(135): Homolog of NCBI NO: 38174388 NR Description: Unknown (protein for MGC:75736) [Silurana
  misc_feature (1)..(135): Homolog of NCBI NO: 17380207 NR Description: Proteasome subunit beta type 1-A (20S proteasome
  misc_feature (1)..(135): Homolog of NCBI NO: 28829610 NR Description: similar to Petunia hybrida (Petunia). Proteasome beta type 1 (EC 3.4.99.46) (20S proteasome alpha subunit F) (20S
  misc_feature (1)..(135): Homolog of NCBI NO: 600387 NR Description: proteosome subunit [Arabidopsis thaliana]
  misc_feature (1)..(135): Homolog of NCBI NO: 15232965 NR Description: 20S proteasome beta subunit F1 (PBF1)
  misc_feature (1)..(135): Homolog of NCBI NO: 17380185 NR Description: Proteasome subunit beta type 1 (20S proteasome
  misc_feature (1)..(135): Homolog of NCBI NO: 17380182 NR Description: Proteasome subunit beta type 1 (20S proteasome
  misc_feature (1)..(112): Homolog of NCBI NO: 14594933 NR Description: putative beta6 proteasome subunit [Nicotiana
  misc_feature (1)..(135): Homolog of NCBI NO: 17380206 NR Description: Proteasome subunit beta type 1-B (20S proteasome
  misc_feature (1)..(135): Homolog of NCBI NO: 27694605 NR Description: Unknown (protein for MGC:52861) [Xenopus laevis]
  misc_feature (1)..(112): Homolog of NCBI NO: 14594933 NR Description: putative beta6 proteasome subunit [Nicotiana
  misc_feature (1)..(135): Homolog of NCBI NO: 17380182 NR Description: Proteasome subunit beta type 1 (20S proteasome
  misc_feature (1)..(135): Homolog of NCBI NO: 17380185 NR Description: Proteasome subunit beta type 1 (20S proteasome
  misc_feature (1)..(135): Homolog of NCBI NO: 15232965 NR Description: 20S proteasome beta subunit F1 (PBF1)
  misc_feature (1)..(135): Homolog of NCBI NO: 600387 NR Description: proteosome subunit [Arabidopsis thaliana]

SEQ ID NO: 36128 - DNA, 749 bp, Arabidopsis thaliana
  misc_feature (1)..(749): Ceres Seq. ID no. 12340498
  misc_feature: MA Experiment ID: 108435 Result: Up-regulated in Transcription
  misc_feature: MA Experiment 108435 PARAMETER Experiment Name: At_stm_Mutants_cDNA_P Parameter: Plant Line Value: wt Landsburg vs stm
  misc_feature: MA Experiment 108435 PARAMETER Experiment Name: At_stm_Mutants_cDNA_P Parameter: Tissue Value: Shoot Apical Meristem Region
  misc_feature: MA Experiment ID: 108461 Result: Down-regulated in Transcription
  misc_feature: MA Experiment 108461 PARAMETER Experiment Name: At_Germinating_Seeds_cDNA_P Parameter: Age (day) Value: 1 vs. 0
  misc_feature: MA Experiment 108461 PARAMETER Experiment Name: At_Germinating_Seeds_cDNA_P Parameter: Tissue Value: Germinating Seeds
  misc_feature: MA Experiment ID: 108489 Result: Up-regulated in Transcription
  misc_feature: MA Experiment ID: 108585 Result: Up-regulated in Transcription
  misc_feature: MA Experiment 108585 PARAMETER Experiment Name: At_5mM_NaNP_cDNA_P Parameter: Timepoint (hr) Value: 6
  misc_feature: MA Experiment 108585 PARAMETER Experiment Name: At_5mM_NaNP_cDNA_P Parameter: Tissue Value: Aerial
  misc_feature: MA Experiment 108585 PARAMETER Experiment Name: At_5mM_NaNP_cDNA_P Parameter: Treatment Value: null
  misc_feature: MA Experiment ID: 108595 Result: Up-regulated in Transcription
  misc_feature: MA Experiment 108595 PARAMETER Experiment Name: At_Ler-pi_Ovule_cDNA_P Parameter: Plant Line Value: null
  misc_feature: MA Experiment ID: 20000180 Result: Down-regulated in Transcription
  misc_feature: MA Experiment 20000180 PARAMETER Experiment Name: At_Germinating_Seeds_P Parameter: Age (hr) Value: 24 vs. 0
  misc_feature: MA Experiment 20000180 PARAMETER Experiment Name: At_Germinating_Seeds_P Parameter: Tissue Value: Germinating Seeds
  misc_feature: MA Experiment ID: 20000185 Result: Up-regulated in Transcription
  misc_feature: MA Experiment 20000185 PARAMETER Experiment Name: At_Roots__P Parameter: Age (day) Value: 7 vs. 21
  misc_feature: MA Experiment 20000185 PARAMETER Experiment Name: At_Roots__P Parameter: Organism Value: A. thaliana
  misc_feature: MA Experiment 20000185 PARAMETER Experiment Name: At_Roots__P Parameter: Tissue Value: Roots vs. Whole Plant
  misc_feature: MA Experiment ID: 20000227 Result: Down-regulated in Transcription
  misc_feature: MA Experiment 20000227 PARAMETER Experiment Name: At_Root-Tips-vs-Tops_P Parameter: Tissue Value: Root Tips vs. Root Tops
  misc_feature: MA Experiment ID: 20000269 Result: Up-regulated in Transcription
  misc_feature: MA Experiment 20000269 PARAMETER Experiment Name: At_1mM_KNO3_L-vs-H_Roots_P Parameter: Age (day) Value: 7,10,12
  misc_feature: MA Experiment 20000269 PARAMETER Experiment Name: At_1mM_KNO3_L-vs-H_Roots_P Parameter: Organism Value: A. thaliana
  misc_feature: MA Experiment 20000269 PARAMETER Experiment Name: At_1mM_KNO3_L-vs-H_Roots_P Parameter: Plant Line Value: WS
  misc_feature: MA Experiment 20000269 PARAMETER Experiment Name: At_1mM_KNO3_L-vs-H_Roots_P Parameter: Timepoint (day) Value: 7,10,12
  misc_feature: MA Experiment 20000269 PARAMETER Experiment Name: At_1mM_KNO3_L-vs-H_Roots_P Parameter: Tissue Value: Roots
  misc_feature: MA Experiment 20000269 PARAMETER Experiment Name: At_1mM_KNO3_L-vs-H_Roots_P Parameter: Treatment Value: 1mM KNO3 vs. 50mM KNO3
  misc_feature: MA Experiment ID: 20000439 Result: Up-regulated in Transcription
  misc_feature: MA Experiment 20000439 PARAMETER Experiment Name: At_Roots__P Parameter: Age (day) Value: 14 vs. 21
  misc_feature: MA Experiment 20000439 PARAMETER Experiment Name: At_Roots__P Parameter: Organism Value: A. thaliana
  misc_feature: MA Experiment 20000439 PARAMETER Experiment Name: At_Roots__P Parameter: Tissue Value: Roots vs. Whole Plant
  misc_feature: MA Experiment ID: 20000451 Result: Up-regulated in Transcription
  misc_feature: MA Experiment 20000451 PARAMETER Experiment Name: At_CS6879_Shoots-Roots_P Parameter: Age (day) Value: 14
  misc_feature: MA Experiment 20000451 PARAMETER Experiment Name: At_CS6879_Shoots-Roots_P Parameter: Organism Value: A. thaliana
  misc_feature: MA Experiment 20000451 PARAMETER Experiment Name: At_CS6879_Shoots-Roots_P Parameter: Plant Line Value: CS6879 vs. WS
  misc_feature: MA Experiment 20000451 PARAMETER Experiment Name: At_CS6879_Shoots-Roots_P Parameter: Tissue Value: Roots
  misc_feature: MA Experiment ID: 20001457 Result: Up-regulated in Transcription
  misc_feature: MA Experiment 20001457 PARAMETER Experiment Name: At_50mM_NH4NO3_L-to-H_P Parameter: Age (day) Value: Undefined
  misc_feature: MA Experiment 20001457 PARAMETER Experiment Name: At_50mM_NH4NO3_L-to-H_P Parameter: Organism Value: Undefined
  misc_feature: MA Experiment 20001457 PARAMETER Experiment Name: At_50mM_NH4NO3_L-to-H_P Parameter: Plant Line Value: Undefined
  misc_feature: MA Experiment 20001457 PARAMETER Experiment Name: At_50mM_NH4NO3_L-to-H_P Parameter: Timepoint (hr) Value: 0.5
  misc_feature: MA Experiment 20001457 PARAMETER Experiment Name: At_50mM_NH4NO3_L-to-H_P Parameter: Tissue Value: Siliques
  misc_feature: MA Experiment 20001457 PARAMETER Experiment Name: At_50mM_NH4NO3_L-to-H_P Parameter: Treatment Value: 50mM NH4NO3 vs. 100mM Manitol
  misc_feature: MA Experiment ID: 20001459 Result: Up-regulated in Transcription
  misc_feature: MA Experiment 20001459 PARAMETER Experiment Name: At_50mM_NH4NO3_L-to-H_P Parameter: Age (day) Value: Undefined
  misc_feature: MA Experiment 20001459 PARAMETER Experiment Name: At_50mM_NH4NO3_L-to-H_P Parameter: Organism Value: Undefined
  misc_feature: MA Experiment 20001459 PARAMETER Experiment Name: At_50mM_NH4NO3_L-to-H_P Parameter: Plant Line Value: Undefined
  misc_feature: MA Experiment 20001459 PARAMETER Experiment Name: At_50mM_NH4NO3_L-to-H_P Parameter: Timepoint (hr) Value: 4
  misc_feature: MA Experiment 20001459 PARAMETER Experiment Name: At_50mM_NH4NO3_L-to-H_P Parameter: Tissue Value: Siliques
  misc_feature: MA Experiment 20001459 PARAMETER Experiment Name: At_50mM_NH4NO3_L-to-H_P Parameter: Treatment Value: 50mM NH4NO3 vs. 100mM Manitol
  misc_feature: MA Experiment ID: 20001557 Result: Up-regulated in Transcription
  misc_feature: MA Experiment 20001557 PARAMETER Experiment Name: At_Drought_Soil_Dry_P Parameter: Age (day) Value: 27
  misc_feature: MA Experiment 20001557 PARAMETER Experiment Name: At_Drought_Soil_Dry_P Parameter: Organism Value: A. thaliana
  misc_feature: MA Experiment 20001557 PARAMETER Experiment Name: At_Drought_Soil_Dry_P Parameter: Plant Line Value: WS
  misc_feature: MA Experiment 20001557 PARAMETER Experiment Name: At_Drought_Soil_Dry_P Parameter: Post Timepoint (hr) Value: 3
  misc_feature: MA Experiment 20001557 PARAMETER Experiment Name: At_Drought_Soil_Dry_P Parameter: Post-Treatment Value: Re-Water vs. No Drought
  misc_feature: MA Experiment 20001557 PARAMETER Experiment Name: At_Drought_Soil_Dry_P Parameter: Timepoint (day) Value: 13
  misc_feature: MA Experiment 20001557 PARAMETER Experiment Name: At_Drought_Soil_Dry_P Parameter: Treatment Value: Drought vs. No Drought
  misc_feature: MA Experiment ID: 20001755 Result: Up-regulated in Transcription
  misc_feature: MA Experiment 20001755 PARAMETER Experiment Name: At_50mM_NH4NO3_L-to-H_P Parameter: Timepoint (hr) Value: 2
  misc_feature: MA Experiment 20001755 PARAMETER Experiment Name: At_50mM_NH4NO3_L-to-H_P Parameter: Tissue Value: Leaf
  misc_feature: MA Experiment 20001755 PARAMETER Experiment Name: At_50mM_NH4NO3_L-to-H_P Parameter: Treatment Value: 50mM NH4NO3 vs 100mM Mannitol
  misc_feature: MA Experiment ID: 20001756 Result: Up-regulated in Transcription
  misc_feature: MA Experiment 20001756 PARAMETER Experiment Name: At_50mM_NH4NO3_L-to-H_P Parameter: Timepoint (hr) Value: 4
  misc_feature: MA Experiment 20001756 PARAMETER Experiment Name: At_50mM_NH4NO3_L-to-H_P Parameter: Tissue Value: Leaf
  misc_feature: MA Experiment 20001756 PARAMETER Experiment Name: At_50mM_NH4NO3_L-to-H_P Parameter: Treatment Value: 50mM NH4NO3 vs 100mM Mannitol
  misc_feature: MA Experiment ID: 20001757 Result: Up-regulated in Transcription
  misc_feature: MA Experiment 20001757 PARAMETER Experiment Name: At_50mM_NH4NO3_L-to-H_P Parameter: Timepoint (hr) Value: 6
  misc_feature: MA Experiment 20001757 PARAMETER Experiment Name: At_50mM_NH4NO3_L-to-H_P Parameter: Tissue Value: Leaf
  misc_feature: MA Experiment 20001757 PARAMETER Experiment Name: At_50mM_NH4NO3_L-to-H_P Parameter: Treatment Value: 50mM NH4NO3 vs 100mM Mannitol
  misc_feature: MA Experiment ID: 20001759 Result: Up-regulated in Transcription
  misc_feature: MA Experiment 20001759 PARAMETER Experiment Name: At_50mM_NH4NO3_L-to-H_P Parameter: Timepoint (hr) Value: 1
  misc_feature: MA Experiment 20001759 PARAMETER Experiment Name: At_50mM_NH4NO3_L-to-H_P Parameter: Tissue Value: Siliques
  misc_feature: MA Experiment 20001759 PARAMETER Experiment Name: At_50mM_NH4NO3_L-to-H_P Parameter: Treatment Value: 50mM NH4NO3 vs 100mM Mannitol
  misc_feature: MA Experiment ID: 20001760 Result: Up-regulated in Transcription
  misc_feature: MA Experiment 20001760 PARAMETER Experiment Name: At_50mM_NH4NO3_L-to-H_P Parameter: Timepoint (hr) Value: 2
  misc_feature: MA Experiment 20001760 PARAMETER Experiment Name: At_50mM_NH4NO3_L-to-H_P Parameter: Tissue Value: Siliques
  misc_feature: MA Experiment 20001760 PARAMETER Experiment Name: At_50mM_NH4NO3_L-to-H_P Parameter: Treatment Value: 50mM NH4NO3 vs 100mM Mannitol
  misc_feature: MA Experiment ID: 20001904 Result: Up-regulated in Transcription
  misc_feature: MA Experiment 20001904 PARAMETER Experiment Name: At_Drought_Reproduction_P Parameter: Age (day) Value: 37
  misc_feature: MA Experiment 20001904 PARAMETER Experiment Name: At_Drought_Reproduction_P Parameter: Organism Value: A. thaliana
  misc_feature: MA Experiment 20001904 PARAMETER Experiment Name: At_Drought_Reproduction_P Parameter: Plant Line Value: WS
  misc_feature: MA Experiment 20001904 PARAMETER Experiment Name: At_Drought_Reproduction_P Parameter: Timepoint (day) Value: 7
  misc_feature: MA Experiment 20001904 PARAMETER Experiment Name: At_Drought_Reproduction_P Parameter: Tissue Value: Rosettes
  misc_feature: MA Experiment 20001904 PARAMETER Experiment Name: At_Drought_Reproduction_P Parameter: Treatment Value: Drought vs. No Drought
  misc_feature: MA Experiment ID: 20001905 Result: Up-regulated in Transcription
  misc_feature: MA Experiment 20001905 PARAMETER Experiment Name: At_Drought_Reproduction_P Parameter: Age (day) Value: 40
  misc_feature: MA Experiment 20001905 PARAMETER Experiment Name: At_Drought_Reproduction_P Parameter: Organism Value: A. thaliana
  misc_feature: MA Experiment 20001905 PARAMETER Experiment Name: At_Drought_Reproduction_P Parameter: Plant Line Value: WS
  misc_feature: MA Experiment 20001905 PARAMETER Experiment Name: At_Drought_Reproduction_P Parameter: Timepoint (day) Value: 10
  misc_feature: MA Experiment 20001905 PARAMETER Experiment Name: At_Drought_Reproduction_P Parameter: Tissue Value: Rosettes
  misc_feature: MA Experiment 20001905 PARAMETER Experiment Name: At_Drought_Reproduction_P Parameter: Treatment Value: Drought vs. No Drought
accaaccccctctcgcactctccgccaccttcttccctaattctctctctctcgctacctctctacgtgataaacaagaatggcgactgtacgaatctcctccactagcatgaccaaggccgttcttagaagccagacaaccaacaagctcattactaacaagagctacaacttatctgttggatcaacgaaaagggtttcgagatcttttggtttgaaatgctcagcgaattctggtggtgctacgatgtcggcggtatacaaggtcaagctcttaggacctgatggtcaagaagatgagtttgaggttcaagatgatcagtacatcttggatgcagctgaagaggcaggagttgacttgccttactcttgcagagccggtgcgtgttctacttgcgcgggtcagattgtgtccggcaacgttgaccagtcggatggttcgtttctcgaggatagccacttggagaagggttatgttttgacttgtgtggcttacccacagtctgactgtgtgatccatacccacaaggaaactgaactcttctaagtcaaagtctctctatttggtaatgatgaaaaaattgttatttgagtgatctttttagatattatggttatcagtttcgttctacggatttgtgtggttttaaaggtatgcatttgtatgaaaatgactcaagatatgccttttagtgttcatgaatcgtcaccgggtcgcaattggttaataaaatggttaagtttcaacc

SEQ ID NO: 36129 - protein, 155 aa, Arabidopsis thaliana
  peptide (1)..(155): Ceres Seq. ID no. 12340499
  misc_feature (66)..(142): Pfam Name: 2Fe-2S iron-sulfur cluster binding domain Pfam Description: 2Fe-2S iron-sulfur cluster binding domain
  misc_feature (60)..(155): Homolog of NCBI NO: 6688560 NR Description: putative ferredoxin [Lycopersicon esculentum]
  misc_feature (34)..(155): Homolog of NCBI NO: 7430754 NR Description: ferredoxin [2Fe-2S], root - rice
  misc_feature (1)..(155): Homolog of NCBI NO: 6970498 NR Description: non-photosynthetic ferredoxin [Ipomoea nil]
  misc_feature (7)..(155): Homolog of NCBI NO: 119958 NR Description: Ferredoxin III, chloroplast precursor (Fd III)
  misc_feature (1)..(155): Homolog of NCBI NO: 40714664 NR Description: putative ferredoxin [Oryza sativa (japonica
  misc_feature (58)..(155): Homolog of NCBI NO: 119934 NR Description: Ferredoxin, root R-B1
  misc_feature (1)..(155): Homolog of NCBI NO: 13182955 NR Description: ferredoxin [Impatiens balsamina]
  misc_feature (58)..(155): Homolog of NCBI NO: 119952 NR Description: Ferredoxin, root R-B2
  misc_feature (1)..(154): Homolog of NCBI NO: 2129915 NR Description: ferredoxin
  misc_feature (1)..(155): Homolog of NCBI NO: 15225888 NR Description: putative ferredoxin
MATVRISSTSMTKAVLRSQTTNKLITNKSYNLSVGSTKRVSRSFGLKCSANSGGATMSAVYKVKLLGPDGQEDEFEVQDDQYILDAAEEAGVDLPYSCRAGACSTCAGQIVSGNVDQSDGSFLEDSHLEKGYVLTCVAYPQSDCVIHTHKETELF

SEQ ID NO: 36130 - protein, 145 aa, Arabidopsis thaliana
  peptide (1)..(145): Ceres Seq. ID no. 12340500
  misc_feature (56)..(132): Pfam Name: 2Fe-2S iron-sulfur cluster binding domain Pfam Description: 2Fe-2S iron-sulfur cluster binding domain
  misc_feature (50)..(145): Homolog of NCBI NO: 6688560 NR Description: putative ferredoxin [Lycopersicon esculentum]
  misc_feature (24)..(145): Homolog of NCBI NO: 7430754 NR Description: ferredoxin [2Fe-2S], root - rice
  misc_feature (1)..(145): Homolog of NCBI NO: 6970498 NR Description: non-photosynthetic ferredoxin [Ipomoea nil]
  misc_feature (1)..(145): Homolog of NCBI NO: 119958 NR Description: Ferredoxin III, chloroplast precursor (Fd III)
  misc_feature (1)..(145): Homolog of NCBI NO: 40714664 NR Description: putative ferredoxin [Oryza sativa (japonica
  misc_feature (48)..(145): Homolog of NCBI NO: 119934 NR Description: Ferredoxin, root R-B1
  misc_feature (1)..(145): Homolog of NCBI NO: 13182955 NR Description: ferredoxin [Impatiens balsamina]
  misc_feature (48)..(145): Homolog of NCBI NO: 119952 NR Description: Ferredoxin, root R-B2
  misc_feature (1)..(144): Homolog of NCBI NO: 2129915 NR Description: ferredoxin
  misc_feature (1)..(145): Homolog of NCBI NO: 15225888 NR Description: putative ferredoxin
MTKAVLRSQTTNKLITNKSYNLSVGSTKRVSRSFGLKCSANSGGATMSAVYKVKLLGPDGQEDEFEVQDDQYILDAAEEAGVDLPYSCRAGACSTCAGQIVSGNVDQSDGSFLEDSHLEKGYVLTCVAYPQSDCVIHTHKETELF

SEQ ID NO: 36131 - protein, 99 aa, Arabidopsis thaliana
  peptide (1)..(99): Ceres Seq. ID no. 12340501
  misc_feature (10)..(86): Pfam Name: 2Fe-2S iron-sulfur cluster binding domain Pfam Description: 2Fe-2S iron-sulfur cluster binding domain
  misc_feature (4)..(99): Homolog of NCBI NO: 6688560 NR Description: putative ferredoxin [Lycopersicon esculentum]
  misc_feature (1)..(99): Homolog of NCBI NO: 7430754 NR Description: ferredoxin [2Fe-2S], root - rice
  misc_feature (1)..(99): Homolog of NCBI NO: 6970498 NR Description: non-photosynthetic ferredoxin [Ipomoea nil]
  misc_feature (1)..(99): Homolog of NCBI NO: 119958 NR Description: Ferredoxin III, chloroplast precursor (Fd III)
  misc_feature (1)..(99): Homolog of NCBI NO: 40714664 NR Description: putative ferredoxin [Oryza sativa (japonica
  misc_feature (2)..(99): Homolog of NCBI NO: 119934 NR Description: Ferredoxin, root R-B1
  misc_feature (1)..(99): Homolog of NCBI NO: 13182955 NR Description: ferredoxin [Impatiens balsamina]
  misc_feature (2)..(99): Homolog of NCBI NO: 119952 NR Description: Ferredoxin, root R-B2
  misc_feature (1)..(98): Homolog of NCBI NO: 2129915 NR Description: ferredoxin
  misc_feature (1)..(99): Homolog of NCBI NO: 15225888 NR Description: putative ferredoxin
MSAVYKVKLLGPDGQEDEFEVQDDQYILDAAEEAGVDLPYSCRAGACSTCAGQIVSGNVDQSDGSFLEDSHLEKGYVLTCVAYPQSDCVIHTHKETELF

SEQ ID NO: 36132 - DNA, 1613 bp, Arabidopsis thaliana
  misc_feature (1)..(1613): Ceres Seq. ID no. 12325334
  misc_feature: MA Experiment ID: 108434 Result: Up-regulated in Transcription
  misc_feature: MA Experiment 108434 PARAMETER Experiment Name: At_Root_Tips_cDNA_P Parameter: Tissue Value: Root Tips
  misc_feature: MA Experiment ID: 108462 Result: Down-regulated in Transcription
  misc_feature: MA Experiment 108462 PARAMETER Experiment Name: At_Germinating_Seeds_cDNA_P Parameter: Age (day) Value: 2 vs. 0
  misc_feature: MA Experiment 108462 PARAMETER Experiment Name: At_Germinating_Seeds_cDNA_P Parameter: Tissue Value: Germinating Seeds
  misc_feature: MA Experiment ID: 108463 Result: Down-regulated in Transcription
  misc_feature: MA Experiment 108463 PARAMETER Experiment Name: At_Germinating_Seeds_cDNA_P Parameter: Age (day) Value: 3 vs. 0
  misc_feature: MA Experiment 108463 PARAMETER Experiment Name: At_Germinating_Seeds_cDNA_P Parameter: Tissue Value: Germinating Seeds
  misc_feature: MA Experiment ID: 108464 Result: Down-regulated in Transcription
  misc_feature: MA Experiment 108464 PARAMETER Experiment Name: At_Germinating_Seeds_cDNA_P Parameter: Age (day) Value: 4 vs. 0
  misc_feature: MA Experiment 108464 PARAMETER Experiment Name: At_Germinating_Seeds_cDNA_P Parameter: Tissue Value: Germinating Seeds
  misc_feature: MA Experiment ID: 108595 Result: Down-regulated in Transcription
  misc_feature: MA Experiment 108595 PARAMETER Experiment Name: At_Ler-pi_Ovule_cDNA_P Parameter: Plant Line Value: null
  misc_feature: MA Experiment ID: 20000087 Result: Down-regulated in Transcription
  misc_feature: MA Experiment 20000087 PARAMETER Experiment Name: At_100uM_ABA_Mutants_cDNA_P Parameter: Plant Line Value: WS
  misc_feature: MA Experiment 20000087 PARAMETER Experiment Name: At_100uM_ABA_Mutants_cDNA_P Parameter: Timepoint (hr) Value: 6
  misc_feature: MA Experiment 20000087 PARAMETER Experiment Name: At_100uM_ABA_Mutants_cDNA_P Parameter: Tissue Value: Aerial
  misc_feature: MA Experiment 20000087 PARAMETER Experiment Name: At_100uM_ABA_Mutants_cDNA_P Parameter: Treatment Value: 100uM ABA vs. No Treatment
  misc_feature: MA Experiment ID: 20001557 Result: Up-regulated in Transcription
  misc_feature: MA Experiment 20001557 PARAMETER Experiment Name: At_Drought_Soil_Dry_P Parameter: Age (day) Value: 27
  misc_feature: MA Experiment 20001557 PARAMETER Experiment Name: At_Drought_Soil_Dry_P Parameter: Organism Value: A. thaliana
  misc_feature: MA Experiment 20001557 PARAMETER Experiment Name: At_Drought_Soil_Dry_P Parameter: Plant Line Value: WS
  misc_feature: MA Experiment 20001557 PARAMETER Experiment Name: At_Drought_Soil_Dry_P Parameter: Post Timepoint (hr) Value: 3
  misc_feature: MA Experiment 20001557 PARAMETER Experiment Name: At_Drought_Soil_Dry_P Parameter: Post-Treatment Value: Re-Water vs. No Drought
  misc_feature: MA Experiment 20001557 PARAMETER Experiment Name: At_Drought_Soil_Dry_P Parameter: Timepoint (day) Value: 13
  misc_feature: MA Experiment 20001557 PARAMETER Experiment Name: At_Drought_Soil_Dry_P Parameter: Treatment Value: Drought vs. No Drought
  misc_feature: MA Experiment ID: 20001558 Result: Up-regulated in Transcription
  misc_feature: MA Experiment 20001558 PARAMETER Experiment Name: At_Drought_Soil_Dry_P Parameter: Age (day) Value: 27
  misc_feature: MA Experiment 20001558 PARAMETER Experiment Name: At_Drought_Soil_Dry_P Parameter: Organism Value: A. thaliana
  misc_feature: MA Experiment 20001558 PARAMETER Experiment Name: At_Drought_Soil_Dry_P Parameter: Plant Line Value: WS
  misc_feature: MA Experiment 20001558 PARAMETER Experiment Name: At_Drought_Soil_Dry_P Parameter: Post Timepoint (hr) Value: 6
  misc_feature: MA Experiment 20001558 PARAMETER Experiment Name: At_Drought_Soil_Dry_P Parameter: Post-Treatment Value: Re-Water vs. No Drought
  misc_feature: MA Experiment 20001558 PARAMETER Experiment Name: At_Drought_Soil_Dry_P Parameter: Timepoint (day) Value: 13
  misc_feature: MA Experiment 20001558 PARAMETER Experiment Name: At_Drought_Soil_Dry_P Parameter: Treatment Value: Drought vs. No Drought
aattctgggaggagagaggccgccggaggagagagaaaaagagttgggggattgctttttgatttctccttctccatcttcgacctcgagagaagctaaaaatggcagaagaagcggatacgaacatcgagatctggaagattaagaaactaatcaagggacttgaatcagctagaggtaatggaacgagtatgatctctcttattatgcctcctcgtgatcaagtatctcgtgtcacaaagatgcttggtgatgaatatggaactgcttcaaacattaagagtcgagtcaatcgtcaatctgttttgtctgccattacttctgctcaacaaaggttgaagctttacaacaaggttcctactaatggtcttgttctctataccggcaccattgttaatgatgacggtaaagagaagaaggtgacgtttgatttcgagccctttaggccgattaatgcttccttgtacctttgtgacaacaagttccatactgaggcattgaacgagcttcttgagtctgatgacaagtttggtttcattgttatggatggtaatgggacactgtttggaactttgagtgggaatactagagaggttcttcataagtttactgttgatctcccgaagaagcacggaagaggaggacagtctgcacttcgttttgcccgtcttaggatggagaagagacacaattatgttaggaaaaccgctgagcttgctacacagttttacatcaatccagctacgagtcagcctaatgtctctggtctgatccttgctggttcagctgatttcaaaactgagctcagtcaatcagagttgtttgatcctcgtcttcaagctaagatattgaatgttgttgatgtttcttacggaggtgaaaacggtttcaaccaagcgattgagctgtctgctgagattctatccaatgtgaagttcatacaggagaagaaactgattgggaagtactttgaggagataagtcaagataccgggaaatacgttttcggtgtggaggatactctaaaggctctagaaatgggtgctatcgaaacccttatcgtgtgggagaatctggacataaacaggtatgagctaaagaacagtacgacaggagaaatggtggtgaaacactttgggaaagatcaagagtctgatacaagcaacttccatgattcagagactaacgcggagctagaagtacaggagaagatgcctctactcgaatggtttgcaaatgagtacaaacgtttcggctgcactcttgagtttgtgactaacaaatcccaagaagggtcacagttttgcagaggttttggtgggattggtggtatgttacgttaccagcttgacatgaggacatttgatgagttatcagatactgaagtttacgaagattctgattaaagtgggaaaacttttggtgatggtttcagatcgatacagtgagggaaaatgtggcataaagatggtcttttatcaacaaagaagagagatttaagtttcttgttttctatagaacattaaaaagcttgactctttctttctgttagacaatttgtgttgtaatttttgaggattttaaacatctttttgttgttcttctggttttat

SEQ ID NO: 36133 - protein, 434 aa, Arabidopsis thaliana
  peptide (1)..(434): Ceres Seq. ID no. 12325335
  misc_feature (279)..(417): Pfam Name: eRF1 domain 3 Pfam Description: eRF1 domain 3
  misc_feature (1)..(432): Homolog of NCBI NO: 21311419 NR Description: eukaryotic polypeptide releasing factor
  misc_feature (5)..(432): Homolog of NCBI NO: 15213995 NR Description: Eukaryotic peptide chain release factor subunit 1
  misc_feature (4)..(422): Homolog of NCBI NO: 18250310 NR Description: eukaryotic release factor 1 [Chlamydomonas
  misc_feature (2)..(432): Homolog of NCBI NO: 34907268 NR Description: putative peptide chain release factor subunit 1
  misc_feature (48)..(434): Homolog of NCBI NO: 22331351 NR Description: Eukaryotic peptide chain release factor subunit 1
  misc_feature (6)..(432): Homolog of NCBI NO: 15215863 NR Description: AT5g47880/MCA23_22 [Arabidopsis thaliana]
  misc_feature (6)..(432): Homolog of NCBI NO: 1155261 NR Description: eukaryotic release factor 1 homolog
  misc_feature (6)..(432): Homolog of NCBI NO: 15238829 NR Description: eukaryotic release factor 1 homolog
  misc_feature (3)..(434): Homolog of NCBI NO: 549010 NR Description: Eukaryotic peptide chain release factor subunit (eRF1-3) (Eukaryotic release factor 1-3) (Omnipotent suppressor
  misc_feature (1)..(434): Homolog of NCBI NO: 15222115 NR Description: eukaryotic peptide chain release factor subunit
MAEEADTNIEIWKIKKLIKGLESARGNGTSMISLIMPPRDQVSRVTKMLGDEYGTASNIKSRVNRQSVLSAITSAQQRLKLYNKVPTNGLVLYTGTIVNDDGKEKKVTFDFEPFRPINASLYLCDNKFHTEALNELLESDDKFGFIVMDGNGTLFGTLSGNTREVLHKFTVDLPKKHGRGGQSALRFARLRMEKRHNYVRKTAELATQFYINPATSQPNVSGLILAGSADFKTELSQSELFDPRLQAKILNVVDVSYGGENGFNQAIELSAEILSNVKFIQEKKLIGKYFEEISQDTGKYVFGVEDTLKALEMGAIETLIVWENLDINRYELKNSTTGEMVVKHFGKDQESDTSNFHDSETNAELEVQEKMPLLEWFANEYKRFGCTLEFVTNKSQEGSQFCRGFGGIGGMLRYQLDMRTFDELSDTEVYEDSD

SEQ ID NO: 36134 - protein, 404 aa, Arabidopsis thaliana
  peptide (1)..(404): Ceres Seq. ID no. 12325336
  misc_feature (249)..(387): Pfam Name: eRF1 domain 3 Pfam Description: eRF1 domain 3
  misc_feature (1)..(402): Homolog of NCBI NO: 21311419 NR Description: eukaryotic polypeptide releasing factor
  misc_feature (1)..(402): Homolog of NCBI NO: 15213995 NR Description: Eukaryotic peptide chain release factor subunit 1
  misc_feature (1)..(392): Homolog of NCBI NO: 18250310 NR Description: eukaryotic release factor 1 [Chlamydomonas
  misc_feature (1)..(402): Homolog of NCBI NO: 34907268 NR Description: putative peptide chain release factor subunit 1
  misc_feature (18)..(404): Homolog of NCBI NO: 22331351 NR Description: Eukaryotic peptide chain release factor subunit 1
  misc_feature (1)..(402): Homolog of NCBI NO: 15215863 NR Description: AT5g47880/MCA23_22 [Arabidopsis thaliana]
  misc_feature (1)..(402): Homolog of NCBI NO: 1155261 NR Description: eukaryotic release factor 1 homolog
  misc_feature (1)..(402): Homolog of NCBI NO: 15238829 NR Description: eukaryotic release factor 1 homolog
  misc_feature (1)..(404): Homolog of NCBI NO: 549010 NR Description: Eukaryotic peptide chain release factor subunit (eRF1-3) (Eukaryotic release factor 1-3) (Omnipotent suppressor
  misc_feature (1)..(404): Homolog of NCBI NO: 15222115 NR Description: eukaryotic peptide chain release factor subunit
MISLIMPPRDQVSRVTKMLGDEYGTASNIKSRVNRQSVLSAITSAQQRLKLYNKVPTNGLVLYTGTIVNDDGKEKKVTFDFEPFRPINASLYLCDNKFHTEALNELLESDDKFGFIVMDGNGTLFGTLSGNTREVLHKFTVDLPKKHGRGGQSALRFARLRMEKRHNYVRKTAELATQFYINPATSQPNVSGLILAGSADFKTELSQSELFDPRLQAKILNVVDVSYGGENGFNQAIELSAEILSNVKFIQEKKLIGKYFEEISQDTGKYVFGVEDTLKALEMGAIETLIVWENLDINRYELKNSTTGEMVVKHFGKDQESDTSNFHDSETNAELEVQEKMPLLEWFANEYKRFGCTLEFVTNKSQEGSQFCRGFGGIGGMLRYQLDMRTFDELSDTEVYEDSD

SEQ ID NO: 36135 - protein, 399 aa, Arabidopsis thaliana
  peptide (1)..(399): Ceres Seq. ID no. 12325337
  misc_feature (244)..(382): Pfam Name: eRF1 domain 3 Pfam Description: eRF1 domain 3
  misc_feature (1)..(397): Homolog of NCBI NO: 21311419 NR Description: eukaryotic polypeptide releasing factor
  misc_feature (1)..(397): Homolog of NCBI NO: 15213995 NR Description: Eukaryotic peptide chain release factor subunit 1
  misc_feature (1)..(387): Homolog of NCBI NO: 18250310 NR Description: eukaryotic release factor 1 [Chlamydomonas
  misc_feature (1)..(397): Homolog of NCBI NO: 34907268 NR Description: putative peptide chain release factor subunit 1
  misc_feature (13)..(399): Homolog of NCBI NO: 22331351 NR Description: Eukaryotic peptide chain release factor subunit 1
  misc_feature (1)..(397): Homolog of NCBI NO: 15215863 NR Description: AT5g47880/MCA23_22 [Arabidopsis thaliana]
  misc_feature (1)..(397): Homolog of NCBI NO: 1155261 NR Description: eukaryotic release factor 1 homolog
  misc_feature (1)..(397): Homolog of NCBI NO: 15238829 NR Description: eukaryotic release factor 1 homolog
  misc_feature (1)..(399): Homolog of NCBI NO: 549010 NR Description: Eukaryotic peptide chain release factor subunit (eRF1-3) (Eukaryotic release factor 1-3) (Omnipotent suppressor
  misc_feature (1)..(399): Homolog of NCBI NO: 15222115 NR Description: eukaryotic peptide chain release factor subunit
MPPRDQVSRVTKMLGDEYGTASNIKSRVNRQSVLSAITSAQQRLKLYNKVPTNGLVLYTGTIVNDDGKEKKVTFDFEPFRPINASLYLCDNKFHTEALNELLESDDKFGFIVMDGNGTLFGTLSGNTREVLHKFTVDLPKKHGRGGQSALRFARLRMEKRHNYVRKTAELATQFYINPATSQPNVSGLILAGSADFKTELSQSELFDPRLQAKILNVVDVSYGGENGFNQAIELSAEILSNVKFIQEKKLIGKYFEEISQDTGKYVFGVEDTLKALEMGAIETLIVWENLDINRYELKNSTTGEMVVKHFGKDQESDTSNFHDSETNAELEVQEKMPLLEWFANEYKRFGCTLEFVTNKSQEGSQFCRGFGGIGGMLRYQLDMRTFDELSDTEVYEDSD

SEQ ID NO: 36136 - DNA, 1012 bp, Arabidopsis thaliana
  misc_feature (1)..(1012): Ceres Seq. ID no. 13499975
  misc_feature: MA Experiment ID: 108434 Result: Down-regulated in Transcription
  misc_feature: MA Experiment 108434 PARAMETER Experiment Name: At_Root_Tips_cDNA_P Parameter: Tissue Value: Root Tips
  misc_feature: MA Experiment ID: 108435 Result: Down-regulated in Transcription
  misc_feature: MA Experiment 108435 PARAMETER Experiment Name: At_stm_Mutants_cDNA_P Parameter: Plant Line Value: wt Landsburg vs stm
  misc_feature: MA Experiment 108435 PARAMETER Experiment Name: At_stm_Mutants_cDNA_P Parameter: Tissue Value: Shoot Apical Meristem Region
  misc_feature: MA Experiment ID: 108462 Result: Up-regulated in Transcription
  misc_feature: MA Experiment 108462 PARAMETER Experiment Name: At_Germinating_Seeds_cDNA_P Parameter: Age (day) Value: 2 vs. 0
  misc_feature: MA Experiment 108462 PARAMETER Experiment Name: At_Germinating_Seeds_cDNA_P Parameter: Tissue Value: Germinating Seeds
  misc_feature: MA Experiment ID: 108463 Result: Up-regulated in Transcription
  misc_feature: MA Experiment 108463 PARAMETER Experiment Name: At_Germinating_Seeds_cDNA_P Parameter: Age (day) Value: 3 vs. 0
  misc_feature: MA Experiment 108463 PARAMETER Experiment Name: At_Germinating_Seeds_cDNA_P Parameter: Tissue Value: Germinating Seeds
  misc_feature: MA Experiment ID: 108488 Result: Up-regulated in Transcription
  misc_feature: MA Experiment ID: 108489 Result: Down-regulated in Transcription
  misc_feature: MA Experiment ID: 108573 Result: Up-regulated in Transcription
  misc_feature: MA Experiment 108573 PARAMETER Experiment Name: At_Drought_cDNA_P Parameter: Timepoint (hr) Value: 6
  misc_feature: MA Experiment 108573 PARAMETER Experiment Name: At_Drought_cDNA_P Parameter: Tissue Value: Aerial
  misc_feature: MA Experiment 108573 PARAMETER Experiment Name: At_Drought_cDNA_P Parameter: Treatment Value: Drought vs. No Drought
  misc_feature: MA Experiment ID: 108577 Result: Up-regulated in Transcription
  misc_feature: MA Experiment 108577 PARAMETER Experiment Name: At_42deg_Heat_cDNA_P Parameter: Temperature (deg C) Value: 42 vs. 22
  misc_feature: MA Experiment 108577 PARAMETER Experiment Name: At_42deg_Heat_cDNA_P Parameter: Timepoint (hr) Value: 6
  misc_feature: MA Experiment 108577 PARAMETER Experiment Name: At_42deg_Heat_cDNA_P Parameter: Tissue Value: Aerial
  misc_feature: MA Experiment ID: 108579 Result: Up-regulated in Transcription
  misc_feature: MA Experiment 108579 PARAMETER Experiment Name: At_4deg_Cold_cDNA_P Parameter: Temperature (deg C) Value: 4 vs. 22
  misc_feature: MA Experiment 108579 PARAMETER Experiment Name: At_4deg_Cold_cDNA_P Parameter: Timepoint (hr) Value: 6
  misc_feature: MA Experiment 108579 PARAMETER Experiment Name: At_4deg_Cold_cDNA_P Parameter: Tissue Value: Aerial
  misc_feature: MA Experiment ID: 108609 Result: Down-regulated in Transcription
  misc_feature: MA Experiment 108609 PARAMETER Experiment Name: At_100uM_ABA_cDNA_P Parameter: Timepoint (hr) Value: 24
  misc_feature: MA Experiment 108609 PARAMETER Experiment Name: At_100uM_ABA_cDNA_P Parameter: Tissue Value: Aerial
  misc_feature: MA Experiment 108609 PARAMETER Experiment Name: At_100uM_ABA_cDNA_P Parameter: Treatment Value: 100uM ABA vs. No Treatment
  misc_feature: MA Experiment ID: 20000069 Result: Down-regulated in Transcription
  misc_feature: MA Experiment 20000069 PARAMETER Experiment Name: At_100uM_ABA_Mutants_cDNA_P Parameter: Plant Line Value: CS23
  misc_feature: MA Experiment 20000069 PARAMETER Experiment Name: At_100uM_ABA_Mutants_cDNA_P Parameter: Timepoint (hr) Value: 6
  misc_feature: MA Experiment 20000069 PARAMETER Experiment Name: At_100uM_ABA_Mutants_cDNA_P Parameter: Tissue Value: Aerial
  misc_feature: MA Experiment 20000069 PARAMETER Experiment Name: At_100uM_ABA_Mutants_cDNA_P Parameter: Treatment Value: 100uM ABA vs. No Treatment
  misc_feature: MA Experiment ID: 20000070 Result: Down-regulated in Transcription
  misc_feature: MA Experiment 20000070 PARAMETER Experiment Name: At_100uM_ABA_Mutants_cDNA_P Parameter: Plant Line Value: CS24
  misc_feature: MA Experiment 20000070 PARAMETER Experiment Name: At_100uM_ABA_Mutants_cDNA_P Parameter: Timepoint (hr) Value: 6
  misc_feature: MA Experiment 20000070 PARAMETER Experiment Name: At_100uM_ABA_Mutants_cDNA_P Parameter: Tissue Value: Aerial
  misc_feature: MA Experiment 20000070 PARAMETER Experiment Name: At_100uM_ABA_Mutants_cDNA_P Parameter: Treatment Value: 100uM ABA vs. No Treatment
  misc_feature: MA Experiment ID: 20000071 Result: Down-regulated in Transcription
  misc_feature: MA Experiment 20000071 PARAMETER Experiment Name: At_100uM_ABA_Mutants_cDNA_P Parameter: Plant Line Value: CS8104
  misc_feature: MA Experiment 20000071 PARAMETER Experiment Name: At_100uM_ABA_Mutants_cDNA_P Parameter: Timepoint (hr) Value: 6
  misc_feature: MA Experiment 20000071 PARAMETER Experiment Name: At_100uM_ABA_Mutants_cDNA_P Parameter: Tissue Value: Aerial
  misc_feature: MA Experiment 20000071 PARAMETER Experiment Name: At_100uM_ABA_Mutants_cDNA_P Parameter: Treatment Value: 100uM ABA vs. No Treatment
  misc_feature: MA Experiment ID: 20000086 Result: Down-regulated in Transcription
  misc_feature: MA Experiment 20000086 PARAMETER Experiment Name: At_100uM_ABA_Mutants_cDNA_P Parameter: Plant Line Value: CS22
  misc_feature: MA Experiment 20000086 PARAMETER Experiment Name: At_100uM_ABA_Mutants_cDNA_P Parameter: Timepoint (hr) Value: 6
  misc_feature: MA Experiment 20000086 PARAMETER Experiment Name: At_100uM_ABA_Mutants_cDNA_P Parameter: Tissue Value: Aerial
  misc_feature: MA Experiment 20000086 PARAMETER Experiment Name: At_100uM_ABA_Mutants_cDNA_P Parameter: Treatment Value: 100uM ABA vs. No Treatment
  misc_feature: MA Experiment ID: 20000087 Result: Down-regulated in Transcription
  misc_feature: MA Experiment 20000087 PARAMETER Experiment Name: At_100uM_ABA_Mutants_cDNA_P Parameter: Plant Line Value: WS
  misc_feature: MA Experiment 20000087 PARAMETER Experiment Name: At_100uM_ABA_Mutants_cDNA_P Parameter: Timepoint (hr) Value: 6
  misc_feature: MA Experiment 20000087 PARAMETER Experiment Name: At_100uM_ABA_Mutants_cDNA_P Parameter: Tissue Value: Aerial
  misc_feature: MA Experiment 20000087 PARAMETER Experiment Name: At_100uM_ABA_Mutants_cDNA_P Parameter: Treatment Value: 100uM ABA vs. No Treatment
  misc_feature: MA Experiment ID: 20000089 Result: Down-regulated in Transcription
  misc_feature: MA Experiment ID: 20000090 Result: Down-regulated in Transcription
  misc_feature: MA Experiment ID: 20000180 Result: Up-regulated in Transcription
  misc_feature: MA Experiment 20000180 PARAMETER Experiment Name: At_Germinating_Seeds_P Parameter: Age (hr) Value: 24 vs. 0
  misc_feature: MA Experiment 20000180 PARAMETER Experiment Name: At_Germinating_Seeds_P Parameter: Tissue Value: Germinating Seeds
  misc_feature: MA Experiment ID: 20000185 Result: Down-regulated in Transcription
  misc_feature: MA Experiment 20000185 PARAMETER Experiment Name: At_Roots__P Parameter: Age (day) Value: 7 vs. 21
  misc_feature: MA Experiment 20000185 PARAMETER Experiment Name: At_Roots__P Parameter: Organism Value: A. thaliana
  misc_feature: MA Experiment 20000185 PARAMETER Experiment Name: At_Roots__P Parameter: Tissue Value: Roots vs. Whole Plant
  misc_feature: MA Experiment ID: 20000213 Result: Up-regulated in Transcription
  misc_feature: MA Experiment 20000213 PARAMETER Experiment Name: At_4deg_Cold_P Parameter: Timepoint (hr) Value: 2
  misc_feature: MA Experiment ID: 20000234 Result: Up-regulated in Transcription
  misc_feature: MA Experiment 20000234 PARAMETER Experiment Name: At_Siliques_P Parameter: Age (day) Value: 21
  misc_feature: MA Experiment 20000234 PARAMETER Experiment Name: At_Siliques_P Parameter: Organism Value: A. thaliana
  misc_feature: MA Experiment 20000234 PARAMETER Experiment Name: At_Siliques_P Parameter: Plant Line Value: WS
  misc_feature: MA Experiment 20000234 PARAMETER Experiment Name: At_Siliques_P Parameter: Tissue Value: Less Than 5mm Siliques vs. Whole Plant
  misc_feature: MA Experiment ID: 20000264 Result: Up-regulated in Transcription
  misc_feature: MA Experiment 20000264 PARAMETER Experiment Name: At_Open_Flower_P Parameter: Age (day) Value: 21
  misc_feature: MA Experiment 20000264 PARAMETER Experiment Name: At_Open_Flower_P Parameter: Plant Line Value: WS
  misc_feature: MA Experiment 20000264 PARAMETER Experiment Name: At_Open_Flower_P Parameter: Tissue Value: Open Flower vs. Whole Plant
  misc_feature: MA Experiment ID: 20000265 Result: Up-regulated in Transcription
  misc_feature: MA Experiment 20000265 PARAMETER Experiment Name: At_Open_Flower_P Parameter: Age (day) Value: 21
  misc_feature: MA Experiment 20000265 PARAMETER Experiment Name: At_Open_Flower_P Parameter: Plant Line Value: WS
  misc_feature: MA Experiment 20000265 PARAMETER Experiment Name: At_Open_Flower_P Parameter: Tissue Value: Closed Flower vs. Whole Plant
  misc_feature: MA Experiment ID: 20000286 Result: Up-regulated in Transcription
  misc_feature: MA Experiment 20000286 PARAMETER Experiment Name: At_Open_Flower_P Parameter: Age (day) Value: 21
  misc_feature: MA Experiment 20000286 PARAMETER Experiment Name: At_Open_Flower_P Parameter: Plant Line Value: WS
  misc_feature: MA Experiment 20000286 PARAMETER Experiment Name: At_Open_Flower_P Parameter: Tissue Value: Half Open vs. Whole Plant
  misc_feature: MA Experiment ID: 20000437 Result: Down-regulated in Transcription
  misc_feature: MA Experiment 20000437 PARAMETER Experiment Name: At_Drought_P Parameter: Age (day) Value: 8
  misc_feature: MA Experiment 20000437 PARAMETER Experiment Name: At_Drought_P Parameter: Organism Value: A. thaliana
  misc_feature: MA Experiment 20000437 PARAMETER Experiment Name: At_Drought_P Parameter: Plant Line Value: WS
  misc_feature: MA Experiment 20000437 PARAMETER Experiment Name: At_Drought_P Parameter: Timepoint (hr) Value: 24
  misc_feature: MA Experiment 20000437 PARAMETER Experiment Name: At_Drought_P Parameter: Tissue Value: Whole Plant
  misc_feature: MA Experiment 20000437 PARAMETER Experiment Name: At_Drought_P Parameter: Treatment Value: Drought vs. No Drought
  misc_feature: MA Experiment ID: 20000438 Result: Down-regulated in Transcription
  misc_feature: MA Experiment 20000438 PARAMETER Experiment Name: At_Shoots__P Parameter: Age (day) Value: 14
  misc_feature: MA Experiment 20000438 PARAMETER Experiment Name: At_Shoots__P Parameter: Tissue Value: Shoots vs. Whole Plant
  misc_feature: MA Experiment ID: 20000439 Result: Down-regulated in Transcription
  misc_feature: MA Experiment 20000439 PARAMETER Experiment Name: At_Roots__P Parameter: Age (day) Value: 14 vs. 21
  misc_feature: MA Experiment 20000439 PARAMETER Experiment Name: At_Roots__P Parameter: Organism Value: A. thaliana
  misc_feature: MA Experiment 20000439 PARAMETER Experiment Name: At_Roots__P Parameter: Tissue Value: Roots vs. Whole Plant
  misc_feature: MA Experiment ID: 20000453 Result: Down-regulated in Transcription
  misc_feature: MA Experiment 20000453 PARAMETER Experiment Name: At_100uM_ABA_P Parameter: Age (day) Value: 15
  misc_feature: MA Experiment 20000453 PARAMETER Experiment Name: At_100uM_ABA_P Parameter: Organism Value: A. thaliana
  misc_feature: MA Experiment 20000453 PARAMETER Experiment Name: At_100uM_ABA_P Parameter: Plant Line Value: WS
  misc_feature: MA Experiment 20000453 PARAMETER Experiment Name: At_100uM_ABA_P Parameter: Timepoint (hr) Value: 24
  misc_feature: MA Experiment 20000453 PARAMETER Experiment Name: At_100uM_ABA_P Parameter: Tissue Value: Aerial
  misc_feature: MA Experiment 20000453 PARAMETER Experiment Name: At_100uM_ABA_P Parameter: Treatment Value: 100uM ABA vs. No Treatment
  misc_feature: MA Experiment ID: 20000455 Result: Down-regulated in Transcription
  misc_feature: MA Experiment 20000455 PARAMETER Experiment Name: At_100uM_ABA_P Parameter: Age (day) Value: 16
  misc_feature: MA Experiment 20000455 PARAMETER Experiment Name: At_100uM_ABA_P Parameter: Organism Value: A. thaliana
  misc_feature: MA Experiment 20000455 PARAMETER Experiment Name: At_100uM_ABA_P Parameter: Plant Line Value: WS
  misc_feature: MA Experiment 20000455 PARAMETER Experiment Name: At_100uM_ABA_P Parameter: Timepoint (hr) Value: 48
  misc_feature: MA Experiment 20000455 PARAMETER Experiment Name: At_100uM_ABA_P Parameter: Tissue Value: Aerial
  misc_feature: MA Experiment 20000455 PARAMETER Experiment Name: At_100uM_ABA_P Parameter: Treatment Value: 100uM ABA vs. No Treatment
  misc_feature: MA Experiment ID: 20000495 Result: Down-regulated in Transcription
  misc_feature: MA Experiment 20000495 PARAMETER Experiment Name: At_Guard_Cells_P Parameter: Harvest Date Value: 8/2/2002
  misc_feature: MA Experiment 20000495 PARAMETER Experiment Name: At_Guard_Cells_P Parameter: Organism Value: A. thaliana
  misc_feature: MA Experiment 20000495 PARAMETER Experiment Name: At_Guard_Cells_P Parameter: Tissue Value: Guard Cells vs. Leaves
  misc_feature: MA Experiment ID: 20000496 Result: Down-regulated in Transcription
  misc_feature: MA Experiment 20000496 PARAMETER Experiment Name: At_Guard_Cells_P Parameter: Harvest Date Value: 7/19/2002
  misc_feature: MA Experiment 20000496 PARAMETER Experiment Name: At_Guard_Cells_P Parameter: Organism Value: Canola
  misc_feature: MA Experiment 20000496 PARAMETER Experiment Name: At_Guard_Cells_P Parameter: Tissue Value: Guard Cells vs. Leaves
  misc_feature: MA Experiment ID: 20000794 Result: Up-regulated in Transcription
  misc_feature: MA Experiment 20000794 PARAMETER Experiment Name: At_Petals_P Parameter: Age (day) Value: 23-25 days
  misc_feature: MA Experiment 20000794 PARAMETER Experiment Name: At_Petals_P Parameter: Plant Line Value: WS
  misc_feature: MA Experiment 20000794 PARAMETER Experiment Name: At_Petals_P Parameter: Tissue Value: Petals vs. Whole plant
  misc_feature: MA Experiment ID: 20001248 Result: Down-regulated in Transcription
  misc_feature: MA Experiment 20001248 PARAMETER Experiment Name: At_Far-red-induction_P Parameter: Age (day) Value: 7
  misc_feature: MA Experiment 20001248 PARAMETER Experiment Name: At_Far-red-induction_P Parameter: Light Value: Far-red vs. White
  misc_feature: MA Experiment 20001248 PARAMETER Experiment Name: At_Far-red-induction_P Parameter: Organism Value: A. thaliana
  misc_feature: MA Experiment 20001248 PARAMETER Experiment Name: At_Far-red-induction_P Parameter: Plant Line Value: Columbia
  misc_feature: MA Experiment 20001248 PARAMETER Experiment Name: At_Far-red-induction_P Parameter: Timepoint (hr) Value: 4
  misc_feature: MA Experiment 20001248 PARAMETER Experiment Name: At_Far-red-induction_P Parameter: Tissue Value: Whole Plant
  misc_feature: MA Experiment ID: 20001450 Result: Down-regulated in Transcription
  misc_feature: MA Experiment 20001450 PARAMETER Experiment Name: At_Far-red-induction_P Parameter: Age (day) Value: 7
  misc_feature: MA Experiment 20001450 PARAMETER Experiment Name: At_Far-red-induction_P Parameter: Light Value: Far-red vs. White
  misc_feature: MA Experiment 20001450 PARAMETER Experiment Name: At_Far-red-induction_P Parameter: Organism Value: A. thaliana
  misc_feature: MA Experiment 20001450 PARAMETER Experiment Name: At_Far-red-induction_P Parameter: Plant Line Value: Columbia
  misc_feature: MA Experiment 20001450 PARAMETER Experiment Name: At_Far-red-induction_P Parameter: Timepoint (hr) Value: 8
  misc_feature: MA Experiment 20001450 PARAMETER Experiment Name: At_Far-red-induction_P Parameter: Tissue Value: Whole Plant
  misc_feature: MA Experiment ID: 20001451 Result: Down-regulated in Transcription
  misc_feature: MA Experiment 20001451 PARAMETER Experiment Name: At_Far-red-induction_P Parameter: Age (day) Value: 7
  misc_feature: MA Experiment 20001451 PARAMETER Experiment Name: At_Far-red-induction_P Parameter: Light Value: Far-red vs. White
  misc_feature: MA Experiment 20001451 PARAMETER Experiment Name: At_Far-red-induction_P Parameter: Organism Value: A. thaliana
  misc_feature: MA Experiment 20001451 PARAMETER Experiment Name: At_Far-red-induction_P Parameter: Plant Line Value: Columbia
  misc_feature: MA Experiment 20001451 PARAMETER Experiment Name: At_Far-red-induction_P Parameter: Timepoint (hr) Value: 24
  misc_feature: MA Experiment 20001451 PARAMETER Experiment Name: At_Far-red-induction_P Parameter: Tissue Value: Whole Plant
  misc_feature: MA Experiment ID: 20001503 Result: Up-regulated in Transcription
  misc_feature: MA Experiment 20001503 PARAMETER Experiment Name: At_Far-red-enriched_P Parameter: Age (day) Value: 7
  misc_feature: MA Experiment 20001503 PARAMETER Experiment Name: At_Far-red-enriched_P Parameter: Light Value: Far-red enriched vs. White
  misc_feature: MA Experiment 20001503 PARAMETER Experiment Name: At_Far-red-enriched_P Parameter: Organism Value: A. thaliana
  misc_feature: MA Experiment 20001503 PARAMETER Experiment Name: At_Far-red-enriched_P Parameter: Plant Line Value: Columbia
  misc_feature: MA Experiment 20001503 PARAMETER Experiment Name: At_Far-red-enriched_P Parameter: Timepoint (day) Value: 3
  misc_feature: MA Experiment 20001503 PARAMETER Experiment Name: At_Far-red-enriched_P Parameter: Tissue Value: Whole Plant
  misc_feature: MA Experiment ID: 20001504 Result: Up-regulated in Transcription
  misc_feature: MA Experiment 20001504 PARAMETER Experiment Name: At_Far-red-enriched_P Parameter: Age (day) Value: 10
  misc_feature: MA Experiment 20001504 PARAMETER Experiment Name: At_Far-red-enriched_P Parameter: Light Value: Far-red enriched vs. White
  misc_feature: MA Experiment 20001504 PARAMETER Experiment Name: At_Far-red-enriched_P Parameter: Organism Value: A. thaliana
  misc_feature: MA Experiment 20001504 PARAMETER Experiment Name: At_Far-red-enriched_P Parameter: Plant Line Value: Columbia
  misc_feature: MA Experiment 20001504 PARAMETER Experiment Name: At_Far-red-enriched_P Parameter: Timepoint (day) Value: 6
  misc_feature: MA Experiment 20001504 PARAMETER Experiment Name: At_Far-red-enriched_P Parameter: Tissue Value: Whole Plant
  misc_feature: MA Experiment ID: 20001555 Result: Down-regulated in Transcription
  misc_feature: MA Experiment 20001555 PARAMETER Experiment Name: At_Drought_Soil_Dry_P Parameter: Age (day) Value: 24
  misc_feature: MA Experiment 20001555 PARAMETER Experiment Name: At_Drought_Soil_Dry_P Parameter: Organism Value: A. thaliana
  misc_feature: MA Experiment 20001555 PARAMETER Experiment Name: At_Drought_Soil_Dry_P Parameter: Plant Line Value: WS
  misc_feature: MA Experiment 20001555 PARAMETER Experiment Name: At_Drought_Soil_Dry_P Parameter: Post Timepoint (hr) Value: None
  misc_feature: MA Experiment 20001555 PARAMETER Experiment Name: At_Drought_Soil_Dry_P Parameter: Post-Treatment Value: None
  misc_feature: MA Experiment 20001555 PARAMETER Experiment Name: At_Drought_Soil_Dry_P Parameter: Timepoint (day) Value: 10
  misc_feature: MA Experiment 20001555 PARAMETER Experiment Name: At_Drought_Soil_Dry_P Parameter: Treatment Value: Drought vs. No Drought
  misc_feature: MA Experiment ID: 20001559 Result: Down-regulated in Transcription
  misc_feature: MA Experiment 20001559 PARAMETER Experiment Name: At_Drought_Soil_Dry_P Parameter: Age (day) Value: 28
  misc_feature: MA Experiment 20001559 PARAMETER Experiment Name: At_Drought_Soil_Dry_P Parameter: Organism Value: A. thaliana
  misc_feature: MA Experiment 20001559 PARAMETER Experiment Name: At_Drought_Soil_Dry_P Parameter: Plant Line Value: WS
  misc_feature: MA Experiment 20001559 PARAMETER Experiment Name: At_Drought_Soil_Dry_P Parameter: Post Timepoint (hr) Value: 29
  misc_feature: MA Experiment 20001559 PARAMETER Experiment Name: At_Drought_Soil_Dry_P Parameter: Post-Treatment Value: Re-Water vs. No Drought
  misc_feature: MA Experiment 20001559 PARAMETER Experiment Name: At_Drought_Soil_Dry_P Parameter: Timepoint (day) Value: 14
  misc_feature: MA Experiment 20001559 PARAMETER Experiment Name: At_Drought_Soil_Dry_P Parameter: Treatment Value: Drought vs. No Drought
  misc_feature: MA Experiment ID: 20001905 Result: Down-regulated in Transcription
  misc_feature: MA Experiment 20001905 PARAMETER Experiment Name: At_Drought_Reproduction_P Parameter: Age (day) Value: 40
  misc_feature: MA Experiment 20001905 PARAMETER Experiment Name: At_Drought_Reproduction_P Parameter: Organism Value: A. thaliana
  misc_feature: MA Experiment 20001905 PARAMETER Experiment Name: At_Drought_Reproduction_P Parameter: Plant Line Value: WS
  misc_feature: MA Experiment 20001905 PARAMETER Experiment Name: At_Drought_Reproduction_P Parameter: Timepoint (day) Value: 10
  misc_feature: MA Experiment 20001905 PARAMETER Experiment Name: At_Drought_Reproduction_P Parameter: Tissue Value: Rosettes
  misc_feature: MA Experiment 20001905 PARAMETER Experiment Name: At_Drought_Reproduction_P Parameter: Treatment Value: Drought vs. No Drought
actattattctaaaatccaaaaaaactatatgttataacattggaatcatcagtctctaagcagtatcacaccaactcaatatggctaccaccactgcagcagcagcctcaggtatttttgggatccggattcaagatcctagacctggaaccggtagggtccaagcccggttcgggttcagtttcggaaaaaagaaaccggctccaccgccaaagaaatcaaggcaggtccaagacgatggagacagactagtttggttccccggcgcaaacccgccggaatggttggacggatcgatgatcggagaccgtggatttgatccgtttggtttaggtaaaccggctgagtatcttcagtacgatttcgatggacttgaccaaaaccttgccaagaacgtggcgggtgacatcatcgggatcatccaagaatcttcggagatcaaaccgacgccgtttcagccgtacactgaagtctttgggatccaacggttcagagaatgtgagctgatccatggaaggtgggccatgcttggcactctaggcgccatcgccgtagaggctcttacaggaattgcatggcaagacgccggaaaggtggaattggtggaaggatcatcgtatttgggacaaccattgccgttctcgttgacgacgttgatatggatagaagtgttagtggtcggatacattgagttccaacgtaactctgaactggatccagagaaacggatttacccgggtgggtattttgacccgttgggactcgcggctgatccagagaagttggatactttgaagctggctgagataaagcactctcgtctcgctatggtcgcatttctcatctttgctcttcaggcggcctttaccggcaaaggccctgtcagcttccttgccacctttaacaattagttaatgaacctttctatctttattttatcaaaataaaattatacttcaaaaactgtataatgcatgttacgctatacttataaagaagtcttttattgtt

SEQ ID NO: 36137 - protein, 276 aa, Arabidopsis thaliana
  peptide (1)..(276): Ceres Seq. ID no. 13499976
  misc_feature (64)..(261): Pfam Name: Chlorophyll A-B binding protein Pfam Description: Chlorophyll A-B binding protein
  misc_feature (1)..(273): Homolog of NCBI NO: 15081739 NR Description: AT5g01530/F7A7_50 [Arabidopsis thaliana]
  misc_feature (1)..(273): Homolog of NCBI NO: 13877547 NR Description: chlorophyll a/b-binding protein CP29 [Arabidopsis
  misc_feature (1)..(273): Homolog of NCBI NO: 15241005 NR Description: light-harvesting chlorophyll a/b binding protein
  misc_feature (1)..(273): Homolog of NCBI NO: 20260162 NR Description: chlorophyll a/b-binding protein CP29 [Arabidopsis
  misc_feature (1)..(276): Homolog of NCBI NO: 7443230 NR Description: probable chlorophyll a/b-binding protein - rice
  misc_feature (2)..(273): Homolog of NCBI NO: 4689382 NR Description: chlorophyll a/b binding protein CP29 [Vigna
  misc_feature (1)..(276): Homolog of NCBI NO: 7443231 NR Description: chlorophyll a/b-binding protein CP29 precursor -
  misc_feature (1)..(276): Homolog of NCBI NO: 445116 NR Description: light-harvesting complex IIa protein;
  misc_feature (1)..(276): Homolog of NCBI NO: 21594018 NR Description: putative chlorophyll a/b binding protein
  misc_feature (1)..(276): Homolog of NCBI NO: 15225630 NR Description: light-harvesting chlorophyll a/b binding protein
MATTTAAAASGIFGIRIQDPRPGTGRVQARFGFSFGKKKPAPPPKKSRQVQDDGDRLVWFPGANPPEWLDGSMIGDRGFDPFGLGKPAEYLQYDFDGLDQNLAKNVAGDIIGIIQESSEIKPTPFQPYTEVFGIQRFRECELIHGRWAMLGTLGAIAVEALTGIAWQDAGKVELVEGSSYLGQPLPFSLTTLIWIEVLVVGYIEFQRNSELDPEKRIYPGGYFDPLGLAADPEKLDTLKLAEIKHSRLAMVAFLIFALQAAFTGKGPVSFLATFNN

SEQ ID NO: 36138 - protein, 204 aa, Arabidopsis thaliana
  peptide (1)..(204): Ceres Seq. ID no. 13499977
  misc_feature (1)..(189): Pfam Name: Chlorophyll A-B binding protein Pfam Description: Chlorophyll A-B binding protein
  misc_feature (1)..(201): Homolog of NCBI NO: 15081739 NR Description: AT5g01530/F7A7_50 [Arabidopsis thaliana]
  misc_feature (1)..(201): Homolog of NCBI NO: 13877547 NR Description: chlorophyll a/b-binding protein CP29 [Arabidopsis
  misc_feature (1)..(201): Homolog of NCBI NO: 15241005 NR Description: light-harvesting chlorophyll a/b binding protein
  misc_feature (1)..(201): Homolog of NCBI NO: 20260162 NR Description: chlorophyll a/b-binding protein CP29 [Arabidopsis
  misc_feature (1)..(204): Homolog of NCBI NO: 7443230 NR Description: probable chlorophyll a/b-binding protein - rice
  misc_feature (1)..(201): Homolog of NCBI NO: 4689382 NR Description: chlorophyll a/b binding protein CP29 [Vigna
  misc_feature (1)..(204): Homolog of NCBI NO: 7443231 NR Description: chlorophyll a/b-binding protein CP29 precursor -
  misc_feature (1)..(204): Homolog of NCBI NO: 445116 NR Description: light-harvesting complex IIa protein;
  misc_feature (1)..(204): Homolog of NCBI NO: 21594018 NR Description: putative chlorophyll a/b binding protein
  misc_feature (1)..(204): Homolog of NCBI NO: 15225630 NR Description: light-harvesting chlorophyll a/b binding protein
MIGDRGFDPFGLGKPAEYLQYDFDGLDQNLAKNVAGDIIGIIQESSEIKPTPFQPYTEVFGIQRFRECELIHGRWAMLGTLGAIAVEALTGIAWQDAGKVELVEGSSYLGQPLPFSLTTLIWIEVLVVGYIEFQRNSELDPEKRIYPGGYFDPLGLAADPEKLDTLKLAEIKHSRLAMVAFLIFALQAAFTGKGPVSFLATFNN

SEQ ID NO: 36139 - DNA, 1187 bp, Arabidopsis thaliana
  misc_feature (1)..(1187): Ceres Seq. ID no. 12674479
  misc_feature: MA Experiment ID: 108462 Result: Up-regulated in Transcription
  misc_feature: MA Experiment 108462 PARAMETER Experiment Name: At_Germinating_Seeds_cDNA_P Parameter: Age (day) Value: 2 vs. 0
  misc_feature: MA Experiment 108462 PARAMETER Experiment Name: At_Germinating_Seeds_cDNA_P Parameter: Tissue Value: Germinating Seeds
  misc_feature: MA Experiment ID: 108463 Result: Up-regulated in Transcription
  misc_feature: MA Experiment 108463 PARAMETER Experiment Name: At_Germinating_Seeds_cDNA_P Parameter: Age (day) Value: 3 vs. 0
  misc_feature: MA Experiment 108463 PARAMETER Experiment Name: At_Germinating_Seeds_cDNA_P Parameter: Tissue Value: Germinating Seeds
  misc_feature: MA Experiment ID: 108464 Result: Up-regulated in Transcription
  misc_feature: MA Experiment 108464 PARAMETER Experiment Name: At_Germinating_Seeds_cDNA_P Parameter: Age (day) Value: 4 vs. 0
  misc_feature: MA Experiment 108464 PARAMETER Experiment Name: At_Germinating_Seeds_cDNA_P Parameter: Tissue Value: Germinating Seeds
  misc_feature: MA Experiment ID: 108474 Result: Up-regulated in Transcription
  misc_feature: MA Experiment 108474 PARAMETER Experiment Name: At_Drought_Flowers_cDNA_P Parameter: Timepoint (hr) Value: null
  misc_feature: MA Experiment 108474 PARAMETER Experiment Name: At_Drought_Flowers_cDNA_P Parameter: Treatment Value: Drought vs. No Drought
  misc_feature: MA Experiment ID: 108501 Result: Down-regulated in Transcription
  misc_feature: MA Experiment 108501 PARAMETER Experiment Name: At_ap2_floral_buds_cDNA_P Parameter: Plant Line Value: ap2 (Ler.)
  misc_feature: MA Experiment 108501 PARAMETER Experiment Name: At_ap2_floral_buds_cDNA_P Parameter: Tissue Value: Closed Flower
  misc_feature: MA Experiment ID: 108572 Result: Up-regulated in Transcription
  misc_feature: MA Experiment 108572 PARAMETER Experiment Name: At_Drought_cDNA_P Parameter: Timepoint (hr) Value: 1
  misc_feature: MA Experiment 108572 PARAMETER Experiment Name: At_Drought_cDNA_P Parameter: Tissue Value: Aerial
  misc_feature: MA Experiment 108572 PARAMETER Experiment Name: At_Drought_cDNA_P Parameter: Treatment Value: Drought vs. No Drought
  misc_feature: MA Experiment ID: 108576 Result: Up-regulated in Transcription
  misc_feature: MA Experiment 108576 PARAMETER Experiment Name: At_42deg_Heat_cDNA_P Parameter: Temperature (deg C) Value: 42 vs. 22
  misc_feature: MA Experiment 108576 PARAMETER Experiment Name: At_42deg_Heat_cDNA_P Parameter: Timepoint (hr) Value: 1
  misc_feature: MA Experiment 108576 PARAMETER Experiment Name: At_42deg_Heat_cDNA_P Parameter: Tissue Value: Aerial
  misc_feature: MA Experiment ID: 20000030 Result: Down-regulated in Transcription
  misc_feature: MA Experiment 20000030 PARAMETER Experiment Name: At_CS6630_Roots_cDNA_P Parameter: Plant Line Value: CS6630 vs. WS
  misc_feature: MA Experiment 20000030 PARAMETER Experiment Name: At_CS6630_Roots_cDNA_P Parameter: Tissue Value: Roots
  misc_feature: MA Experiment ID: 20000171 Result: Up-regulated in Transcription
  misc_feature: MA Experiment 20000171 PARAMETER Experiment Name: At_42deg_Heat_P Parameter: Age (day) Value: 14
  misc_feature: MA Experiment 20000171 PARAMETER Experiment Name: At_42deg_Heat_P Parameter: Organism Value: A. thaliana
  misc_feature: MA Experiment 20000171 PARAMETER Experiment Name: At_42deg_Heat_P Parameter: Plant Line Value: WS
  misc_feature: MA Experiment 20000171 PARAMETER Experiment Name: At_42deg_Heat_P Parameter: Temperature (deg C) Value: 42 vs. 22
  misc_feature: MA Experiment 20000171 PARAMETER Experiment Name: At_42deg_Heat_P Parameter: Timepoint (hr) Value: 1
  misc_feature: MA Experiment 20000171 PARAMETER Experiment Name: At_42deg_Heat_P Parameter: Tissue Value: Aerial
  misc_feature: MA Experiment ID: 20000173 Result: Up-regulated in Transcription
  misc_feature: MA Experiment 20000173 PARAMETER Experiment Name: At_42deg_Heat_P Parameter: Age (day) Value: 14
  misc_feature: MA Experiment 20000173 PARAMETER Experiment Name: At_42deg_Heat_P Parameter: Organism Value: A. thaliana
  misc_feature: MA Experiment 20000173 PARAMETER Experiment Name: At_42deg_Heat_P Parameter: Plant Line Value: WS
  misc_feature: MA Experiment 20000173 PARAMETER Experiment Name: At_42deg_Heat_P Parameter: Temperature (deg C) Value: 42 vs. 22
  misc_feature: MA Experiment 20000173 PARAMETER Experiment Name: At_42deg_Heat_P Parameter: Timepoint (hr) Value: 6
  misc_feature: MA Experiment 20000173 PARAMETER Experiment Name: At_42deg_Heat_P Parameter: Tissue Value: Aerial
  misc_feature: MA Experiment ID: 20000182 Result: Down-regulated in Transcription
  misc_feature: MA Experiment 20000182 PARAMETER Experiment Name: At_2mM_SA_P Parameter: Age (day) Value: 14
  misc_feature: MA Experiment 20000182 PARAMETER Experiment Name: At_2mM_SA_P Parameter: Organism Value: A. thaliana
  misc_feature: MA Experiment 20000182 PARAMETER Experiment Name: At_2mM_SA_P Parameter: Plant Line Value: WS
  misc_feature: MA Experiment 20000182 PARAMETER Experiment Name: At_2mM_SA_P Parameter: Timepoint (hr) Value: 6
  misc_feature: MA Experiment 20000182 PARAMETER Experiment Name: At_2mM_SA_P Parameter: Tissue Value: Aerial
  misc_feature: MA Experiment 20000182 PARAMETER Experiment Name: At_2mM_SA_P Parameter: Treatment Value: 2mM SA vs. No Treatment
  misc_feature: MA Experiment ID: 20000185 Result: Up-regulated in Transcription
  misc_feature: MA Experiment 20000185 PARAMETER Experiment Name: At_Roots__P Parameter: Age (day) Value: 7 vs. 21
  misc_feature: MA Experiment 20000185 PARAMETER Experiment Name: At_Roots__P Parameter: Organism Value: A. thaliana
  misc_feature: MA Experiment 20000185 PARAMETER Experiment Name: At_Roots__P Parameter: Tissue Value: Roots vs. Whole Plant
  misc_feature: MA Experiment ID: 20000224 Result: Down-regulated in Transcription
  misc_feature: MA Experiment ID: 20000227 Result: Up-regulated in Transcription
  misc_feature: MA Experiment 20000227 PARAMETER Experiment Name: At_Root-Tips-vs-Tops_P Parameter: Tissue Value: Root Tips vs. Root Tops
  misc_feature: MA Experiment ID: 20000264 Result: Up-regulated in Transcription
  misc_feature: MA Experiment 20000264 PARAMETER Experiment Name: At_Open_Flower_P Parameter: Age (day) Value: 21
  misc_feature: MA Experiment 20000264 PARAMETER Experiment Name: At_Open_Flower_P Parameter: Plant Line Value: WS
  misc_feature: MA Experiment 20000264 PARAMETER Experiment Name: At_Open_Flower_P Parameter: Tissue Value: Open Flower vs. Whole Plant
  misc_feature: MA Experiment ID: 20000265 Result: Up-regulated in Transcription
  misc_feature: MA Experiment 20000265 PARAMETER Experiment Name: At_Open_Flower_P Parameter: Age (day) Value: 21
  misc_feature: MA Experiment 20000265 PARAMETER Experiment Name: At_Open_Flower_P Parameter: Plant Line Value: WS
  misc_feature: MA Experiment 20000265 PARAMETER Experiment Name: At_Open_Flower_P Parameter: Tissue Value: Closed Flower vs. Whole Plant
  misc_feature: MA Experiment ID: 20000286 Result: Up-regulated in Transcription
  misc_feature: MA Experiment 20000286 PARAMETER Experiment Name: At_Open_Flower_P Parameter: Age (day) Value: 21
  misc_feature: MA Experiment 20000286 PARAMETER Experiment Name: At_Open_Flower_P Parameter: Plant Line Value: WS
  misc_feature: MA Experiment 20000286 PARAMETER Experiment Name: At_Open_Flower_P Parameter: Tissue Value: Half Open vs. Whole Plant
  misc_feature: MA Experiment ID: 20000437 Result: Down-regulated in Transcription
  misc_feature: MA Experiment 20000437 PARAMETER Experiment Name: At_Drought_P Parameter: Age (day) Value: 8
  misc_feature: MA Experiment 20000437 PARAMETER Experiment Name: At_Drought_P Parameter: Organism Value: A. thaliana
  misc_feature: MA Experiment 20000437 PARAMETER Experiment Name: At_Drought_P Parameter: Plant Line Value: WS
  misc_feature: MA Experiment 20000437 PARAMETER Experiment Name: At_Drought_P Parameter: Timepoint (hr) Value: 24
  misc_feature: MA Experiment 20000437 PARAMETER Experiment Name: At_Drought_P Parameter: Tissue Value: Whole Plant
  misc_feature: MA Experiment 20000437 PARAMETER Experiment Name: At_Drought_P Parameter: Treatment Value: Drought vs. No Drought
  misc_feature: MA Experiment ID: 20000439 Result: Up-regulated in Transcription
  misc_feature: MA Experiment 20000439 PARAMETER Experiment Name: At_Roots__P Parameter: Age (day) Value: 14 vs. 21
  misc_feature: MA Experiment 20000439 PARAMETER Experiment Name: At_Roots__P Parameter: Organism Value: A. thaliana
  misc_feature: MA Experiment 20000439 PARAMETER Experiment Name: At_Roots__P Parameter: Tissue Value: Roots vs. Whole Plant
  misc_feature: MA Experiment ID: 20000495 Result: Up-regulated in Transcription
  misc_feature: MA Experiment 20000495 PARAMETER Experiment Name: At_Guard_Cells_P Parameter: Harvest Date Value: 8/2/2002
  misc_feature: MA Experiment 20000495 PARAMETER Experiment Name: At_Guard_Cells_P Parameter: Organism Value: A. thaliana
  misc_feature: MA Experiment 20000495 PARAMETER Experiment Name: At_Guard_Cells_P Parameter: Tissue Value: Guard Cells vs. Leaves
  misc_feature: MA Experiment ID: 20000527 Result: Down-regulated in Transcription
  misc_feature: MA Experiment 20000527 PARAMETER Experiment Name: At_10percent_PEG_P Parameter: Age (day) Value: 20
  misc_feature: MA Experiment 20000527 PARAMETER Experiment Name: At_10percent_PEG_P Parameter: Organism Value: A. thaliana
  misc_feature: MA Experiment 20000527 PARAMETER Experiment Name: At_10percent_PEG_P Parameter: Plant Line Value: WS
  misc_feature: MA Experiment 20000527 PARAMETER Experiment Name: At_10percent_PEG_P Parameter: Timepoint (day) Value: 20
  misc_feature: MA Experiment 20000527 PARAMETER Experiment Name: At_10percent_PEG_P Parameter: Tissue Value: Whole Plant
  misc_feature: MA Experiment 20000527 PARAMETER Experiment Name: At_10percent_PEG_P Parameter: Treatment Value: 10percent PEG vs. No Treatment
  misc_feature: MA Experiment ID: 20000709 Result: Down-regulated in Transcription
  misc_feature: MA Experiment 20000709 PARAMETER Experiment Name: At_15mM_NH4NO3_L-to-H_P Parameter: Age (hr) Value: 14
  misc_feature: MA Experiment 20000709 PARAMETER Experiment Name: At_15mM_NH4NO3_L-to-H_P Parameter: Organism Value: A. thaliana
  misc_feature: MA Experiment 20000709 PARAMETER Experiment Name: At_15mM_NH4NO3_L-to-H_P Parameter: Plant Line Value: WS
  misc_feature: MA Experiment 20000709 PARAMETER Experiment Name: At_15mM_NH4NO3_L-to-H_P Parameter: Timepoint (hr) Value: 4
  misc_feature: MA Experiment 20000709 PARAMETER Experiment Name: At_15mM_NH4NO3_L-to-H_P Parameter: Tissue Value: Aerial
  misc_feature: MA Experiment 20000709 PARAMETER Experiment Name: At_15mM_NH4NO3_L-to-H_P Parameter: Treatment Value: 15mM NH4NO3 vs. 30mM Mannitol
  misc_feature: MA Experiment ID: 20001771 Result: Up-regulated in Transcription
  misc_feature: MA Experiment 20001771 PARAMETER Experiment Name: At_Far-red-enriched-adult_P Parameter: Age (day) Value: 28
  misc_feature: MA Experiment 20001771 PARAMETER Experiment Name: At_Far-red-enriched-adult_P Parameter: Light Value: Far-red enriched vs. White
  misc_feature: MA Experiment 20001771 PARAMETER Experiment Name: At_Far-red-enriched-adult_P Parameter: Organism Value: A. thaliana
  misc_feature: MA Experiment 20001771 PARAMETER Experiment Name: At_Far-red-enriched-adult_P Parameter: Plant Line Value: Columbia
  misc_feature: MA Experiment 20001771 PARAMETER Experiment Name: At_Far-red-enriched-adult_P Parameter: Timepoint (hr) Value: 16
  misc_feature: MA Experiment 20001771 PARAMETER Experiment Name: At_Far-red-enriched-adult_P Parameter: Tissue Value: Aerial
  misc_feature: MA Experiment ID: 20001773 Result: Up-regulated in Transcription
  misc_feature: MA Experiment 20001773 PARAMETER Experiment Name: At_Far-red-enriched-adult_P Parameter: Age (day) Value: 30
  misc_feature: MA Experiment 20001773 PARAMETER Experiment Name: At_Far-red-enriched-adult_P Parameter: Light Value: Far-red enriched vs. White
  misc_feature: MA Experiment 20001773 PARAMETER Experiment Name: At_Far-red-enriched-adult_P Parameter: Organism Value: A. thaliana
  misc_feature: MA Experiment 20001773 PARAMETER Experiment Name: At_Far-red-enriched-adult_P Parameter: Plant Line Value: Columbia
  misc_feature: MA Experiment 20001773 PARAMETER Experiment Name: At_Far-red-enriched-adult_P Parameter: Timepoint (hr) Value: 48
  misc_feature: MA Experiment 20001773 PARAMETER Experiment Name: At_Far-red-enriched-adult_P Parameter: Tissue Value: Aerial
atcttaaaactcccaagtaacaaaaatggctatctcaaagcttattcctactcttgtgctctttgttttgttctcttttgatgttagtgttgctcatccaggtctaggatttggatggggaagtaatagtcccattggaggatctttttactcaaatctttacccacaattttaccagttctcttgtccacaagctgatgagattgttatgacggtgctcgaaaaagccatagctaaagaaccaagaatggcagcatctttactcagacttcacttccacgactgcttcgttcagggctgtgatgcatcaatcttgttggatgatagtgcaaccataagaagtgaaaagaatgctggaccaaacaagaactccgttagagggtttcaagtaatcgacgagatcaaagccaaacttgagcaagcttgtcctcaaactgtctcctgcgccgacattctagctctagctgctcgtggctcaactatactgagtggtggaccatcatgggagcttccactagggaggagagactcgaggaccgctagccttaatggcgcaaacacgaacattcctgcacctaactcaactattcaaaatctcttaaccatgttccaacgtaaaggtttgaacgaagaagaccttgtttccctatcaggaggacatacgattggagtagcgaggtgcacaacgtttaaacaaagactatacaatcaaaacggtaataaccaaccagacgagacgctagagaggtcttactactatggtctcaggtcaatttgtccaccaacaggcggtgacaacaatatttcacctctagacttagcctctcctgcaagattcgacaacacatacttcaagctccttctatggggcaaaggcttattgacatcagatgaagtgcttctcactggcaatgtaggcaagactggtgcattagtgaaagcttatgccgaagacgagagacttttcttccaacaattcgcaaagtcgatggttaacatgggaaacattcagcctcttactggttttaatggtgagatcaggaagagttgtcatgtgattaactaaagaaactgtgtgtttttgcattattattgtattaaggggtgattaagaataagtcgtgttatgtttttcgatatgttagtgatctaattaacgtctttgaatgaaaatggacggttgtttt

SEQ ID NO: 36140 - protein, 346 aa, Arabidopsis thaliana
  peptide (1)..(346): Ceres Seq. ID no. 12674480
  misc_feature (61)..(310): Pfam Name: Peroxidase Pfam Description: Peroxidase
  misc_feature (40)..(346): Homolog of NCBI NO: 15234394 NR Description: peroxidase, putative
  misc_feature (35)..(346): Homolog of NCBI NO: 21537275 NR Description: putative peroxidase [Arabidopsis thaliana]
  misc_feature (35)..(346): Homolog of NCBI NO: 15224116 NR Description: peroxidase, putative
  misc_feature (45)..(346): Homolog of NCBI NO: 7453855 NR Description: peroxidase prx15 precursor [Spinacia oleracea]
  misc_feature (35)..(346): Homolog of NCBI NO: 34903044 NR Description: unnamed protein product [Oryza sativa (japonica
  misc_feature (1)..(346): Homolog of NCBI NO: 34903038 NR Description: unnamed protein product [Oryza sativa (japonica
  misc_feature (40)..(346): Homolog of NCBI NO: 14031051 NR Description: peroxidase [Nicotiana tabacum]
  misc_feature (17)..(344): Homolog of NCBI NO: 993004 NR Description: peroxidase [Mercurialis annua]
  misc_feature (1)..(346): Homolog of NCBI NO: 21554765 NR Description: peroxidase, putative [Arabidopsis thaliana]
  misc_feature (1)..(346): Homolog of NCBI NO: 15219493 NR Description: peroxidase, putative
MAISKLIPTLVLFVLFSFDVSVAHPGLGFGWGSNSPIGGSFYSNLYPQFYQFSCPQADEIVMTVLEKAIAKEPRMAASLLRLHFHDCFVQGCDASILLDDSATIRSEKNAGPNKNSVRGFQVIDEIKAKLEQACPQTVSCADILALAARGSTILSGGPSWELPLGRRDSRTASLNGANTNIPAPNSTIQNLLTMFQRKGLNEEDLVSLSGGHTIGVARCTTFKQRLYNQNGNNQPDETLERSYYYGLRSICPPTGGDNNISPLDLASPARFDNTYFKLLLWGKGLLTSDEVLLTGNVGKTGALVKAYAEDERLFFQQFAKSMVNMGNIQPLTGFNGEIRKSCHVIN

SEQ ID NO: 36141 - protein, 285 aa, Arabidopsis thaliana
  peptide (1)..(285): Ceres Seq. ID no. 12674481
  misc_feature (1)..(249): Pfam Name: Peroxidase Pfam Description: Peroxidase
  misc_feature (1)..(285): Homolog of NCBI NO: 15234394 NR Description: peroxidase, putative
  misc_feature (1)..(285): Homolog of NCBI NO: 21537275 NR Description: putative peroxidase [Arabidopsis thaliana]
  misc_feature (1)..(285): Homolog of NCBI NO: 15224116 NR Description: peroxidase, putative
  misc_feature (1)..(285): Homolog of NCBI NO: 7453855 NR Description: peroxidase prx15 precursor [Spinacia oleracea]
  misc_feature (1)..(285): Homolog of NCBI NO: 34903044 NR Description: unnamed protein product [Oryza sativa (japonica
  misc_feature (1)..(285): Homolog of NCBI NO: 34903038 NR Description: unnamed protein product [Oryza sativa (japonica
  misc_feature (1)..(285): Homolog of NCBI NO: 14031051 NR Description: peroxidase [Nicotiana tabacum]
  misc_feature (1)..(283): Homolog of NCBI NO: 993004 NR Description: peroxidase [Mercurialis annua]
  misc_feature (1)..(285): Homolog of NCBI NO: 21554765 NR Description: peroxidase, putative [Arabidopsis thaliana]
  misc_feature (1)..(285): Homolog of NCBI NO: 15219493 NR Description: peroxidase, putative
MTVLEKAIAKEPRMAASLLRLHFHDCFVQGCDASILLDDSATIRSEKNAGPNKNSVRGFQVIDEIKAKLEQACPQTVSCADILALAARGSTILSGGPSWELPLGRRDSRTASLNGANTNIPAPNSTIQNLLTMFQRKGLNEEDLVSLSGGHTIGVARCTTFKQRLYNQNGNNQPDETLERSYYYGLRSICPPTGGDNNISPLDLASPARFDNTYFKLLLWGKGLLTSDEVLLTGNVGKTGALVKAYAEDERLFFQQFAKSMVNMGNIQPLTGFNGEIRKSCHVIN

SEQ ID NO: 36142 - protein, 272 aa, Arabidopsis thaliana
  peptide (1)..(272): Ceres Seq. ID no. 12674482
  misc_feature (1)..(236): Pfam Name: Peroxidase Pfam Description: Peroxidase
  misc_feature (1)..(272): Homolog of NCBI NO: 15234394 NR Description: peroxidase, putative
  misc_feature (1)..(272): Homolog of NCBI NO: 21537275 NR Description: putative peroxidase [Arabidopsis thaliana]
  misc_feature (1)..(272): Homolog of NCBI NO: 15224116 NR Description: peroxidase, putative
  misc_feature (1)..(272): Homolog of NCBI NO: 7453855 NR Description: peroxidase prx15 precursor [Spinacia oleracea]
  misc_feature (1)..(272): Homolog of NCBI NO: 34903044 NR Description: unnamed protein product [Oryza sativa (japonica
  misc_feature (1)..(272): Homolog of NCBI NO: 34903038 NR Description: unnamed protein product [Oryza sativa (japonica
  misc_feature (1)..(272): Homolog of NCBI NO: 14031051 NR Description: peroxidase [Nicotiana tabacum]
  misc_feature (1)..(270): Homolog of NCBI NO: 993004 NR Description: peroxidase [Mercurialis annua]
  misc_feature (1)..(272): Homolog of NCBI NO: 21554765 NR Description: peroxidase, putative [Arabidopsis thaliana]
  misc_feature (1)..(272): Homolog of NCBI NO: 15219493 NR Description: peroxidase, putative
MAASLLRLHFHDCFVQGCDASILLDDSATIRSEKNAGPNKNSVRGFQVIDEIKAKLEQACPQTVSCADILALAARGSTILSGGPSWELPLGRRDSRTASLNGANTNIPAPNSTIQNLLTMFQRKGLNEEDLVSLSGGHTIGVARCTTFKQRLYNQNGNNQPDETLERSYYYGLRSICPPTGGDNNISPLDLASPARFDNTYFKLLLWGKGLLTSDEVLLTGNVGKTGALVKAYAEDERLFFQQFAKSMVNMGNIQPLTGFNGEIRKSCHVIN

SEQ ID NO: 36143 - DNA, 673 bp, Arabidopsis thaliana
  misc_feature (1)..(673): Ceres Seq. ID no. 12396942
  misc_feature: MA Experiment ID: 108434 Result: Up-regulated in Transcription
  misc_feature: MA Experiment 108434 PARAMETER Experiment Name: At_Root_Tips_cDNA_P Parameter: Tissue Value: Root Tips
  misc_feature: MA Experiment ID: 108461 Result: Down-regulated in Transcription
  misc_feature: MA Experiment 108461 PARAMETER Experiment Name: At_Germinating_Seeds_cDNA_P Parameter: Age (day) Value: 1 vs. 0
  misc_feature: MA Experiment 108461 PARAMETER Experiment Name: At_Germinating_Seeds_cDNA_P Parameter: Tissue Value: Germinating Seeds
  misc_feature: MA Experiment ID: 108462 Result: Down-regulated in Transcription
  misc_feature: MA Experiment 108462 PARAMETER Experiment Name: At_Germinating_Seeds_cDNA_P Parameter: Age (day) Value: 2 vs. 0
  misc_feature: MA Experiment 108462 PARAMETER Experiment Name: At_Germinating_Seeds_cDNA_P Parameter: Tissue Value: Germinating Seeds
  misc_feature: MA Experiment ID: 108463 Result: Down-regulated in Transcription
  misc_feature: MA Experiment 108463 PARAMETER Experiment Name: At_Germinating_Seeds_cDNA_P Parameter: Age (day) Value: 3 vs. 0
  misc_feature: MA Experiment 108463 PARAMETER Experiment Name: At_Germinating_Seeds_cDNA_P Parameter: Tissue Value: Germinating Seeds
  misc_feature: MA Experiment ID: 108464 Result: Down-regulated in Transcription
  misc_feature: MA Experiment 108464 PARAMETER Experiment Name: At_Germinating_Seeds_cDNA_P Parameter: Age (day) Value: 4 vs. 0
  misc_feature: MA Experiment 108464 PARAMETER Experiment Name: At_Germinating_Seeds_cDNA_P Parameter: Tissue Value: Germinating Seeds
  misc_feature: MA Experiment ID: 108469 Result: Up-regulated in Transcription
  misc_feature: MA Experiment ID: 108489 Result: Down-regulated in Transcription
  misc_feature: MA Experiment ID: 108561 Result: Up-regulated in Transcription
  misc_feature: MA Experiment 108561 PARAMETER Experiment Name: At_100uM_ABA_cDNA_P Parameter: Timepoint (hr) Value: 6
  misc_feature: MA Experiment 108561 PARAMETER Experiment Name: At_100uM_ABA_cDNA_P Parameter: Tissue Value: Aerial
  misc_feature: MA Experiment 108561 PARAMETER Experiment Name: At_100uM_ABA_cDNA_P Parameter: Treatment Value: 100uM ABA vs. No Treatment
  misc_feature: MA Experiment ID: 108576 Result: Up-regulated in Transcription
  misc_feature: MA Experiment 108576 PARAMETER Experiment Name: At_42deg_Heat_cDNA_P Parameter: Temperature (deg C) Value: 42 vs. 22
  misc_feature: MA Experiment 108576 PARAMETER Experiment Name: At_42deg_Heat_cDNA_P Parameter: Timepoint (hr) Value: 1
  misc_feature: MA Experiment 108576 PARAMETER Experiment Name: At_42deg_Heat_cDNA_P Parameter: Tissue Value: Aerial
  misc_feature: MA Experiment ID: 108577 Result: Up-regulated in Transcription
  misc_feature: MA Experiment 108577 PARAMETER Experiment Name: At_42deg_Heat_cDNA_P Parameter: Temperature (deg C) Value: 42 vs. 22
  misc_feature: MA Experiment 108577 PARAMETER Experiment Name: At_42deg_Heat_cDNA_P Parameter: Timepoint (hr) Value: 6
  misc_feature: MA Experiment 108577 PARAMETER Experiment Name: At_42deg_Heat_cDNA_P Parameter: Tissue Value: Aerial
  misc_feature: MA Experiment ID: 108609 Result: Up-regulated in Transcription
  misc_feature: MA Experiment 108609 PARAMETER Experiment Name: At_100uM_ABA_cDNA_P Parameter: Timepoint (hr) Value: 24
  misc_feature: MA Experiment 108609 PARAMETER Experiment Name: At_100uM_ABA_cDNA_P Parameter: Tissue Value: Aerial
  misc_feature: MA Experiment 108609 PARAMETER Experiment Name: At_100uM_ABA_cDNA_P Parameter: Treatment Value: 100uM ABA vs. No Treatment
  misc_feature: MA Experiment ID: 108667 Result: Up-regulated in Transcription
  misc_feature: MA Experiment 108667 PARAMETER Experiment Name: At_2mM_SA_cDNA_P Parameter: Plant Line Value: WS
  misc_feature: MA Experiment 108667 PARAMETER Experiment Name: At_2mM_SA_cDNA_P Parameter: Timepoint (hr) Value: 1
  misc_feature: MA Experiment 108667 PARAMETER Experiment Name: At_2mM_SA_cDNA_P Parameter: Treatment Value: 2mM SA vs. No Treatment
  misc_feature: MA Experiment ID: 108668 Result: Up-regulated in Transcription
  misc_feature: MA Experiment 108668 PARAMETER Experiment Name: At_2mM_SA_cDNA_P Parameter: Plant Line Value: WS
  misc_feature: MA Experiment 108668 PARAMETER Experiment Name: At_2mM_SA_cDNA_P Parameter: Timepoint (hr) Value: 6
  misc_feature: MA Experiment 108668 PARAMETER Experiment Name: At_2mM_SA_cDNA_P Parameter: Treatment Value: 2mM SA vs. No Treatment
  misc_feature: MA Experiment ID: 20000069 Result: Up-regulated in Transcription
  misc_feature: MA Experiment 20000069 PARAMETER Experiment Name: At_100uM_ABA_Mutants_cDNA_P Parameter: Plant Line Value: CS23
  misc_feature: MA Experiment 20000069 PARAMETER Experiment Name: At_100uM_ABA_Mutants_cDNA_P Parameter: Timepoint (hr) Value: 6
  misc_feature: MA Experiment 20000069 PARAMETER Experiment Name: At_100uM_ABA_Mutants_cDNA_P Parameter: Tissue Value: Aerial
  misc_feature: MA Experiment 20000069 PARAMETER Experiment Name: At_100uM_ABA_Mutants_cDNA_P Parameter: Treatment Value: 100uM ABA vs. No Treatment
  misc_feature: MA Experiment ID: 20000070 Result: Up-regulated in Transcription
  misc_feature: MA Experiment 20000070 PARAMETER Experiment Name: At_100uM_ABA_Mutants_cDNA_P Parameter: Plant Line Value: CS24
  misc_feature: MA Experiment 20000070 PARAMETER Experiment Name: At_100uM_ABA_Mutants_cDNA_P Parameter: Timepoint (hr) Value: 6
  misc_feature: MA Experiment 20000070 PARAMETER Experiment Name: At_100uM_ABA_Mutants_cDNA_P Parameter: Tissue Value: Aerial
  misc_feature: MA Experiment 20000070 PARAMETER Experiment Name: At_100uM_ABA_Mutants_cDNA_P Parameter: Treatment Value: 100uM ABA vs. No Treatment
  misc_feature: MA Experiment ID: 20000087 Result: Up-regulated in Transcription
  misc_feature: MA Experiment 20000087 PARAMETER Experiment Name: At_100uM_ABA_Mutants_cDNA_P Parameter: Plant Line Value: WS
  misc_feature: MA Experiment 20000087 PARAMETER Experiment Name: At_100uM_ABA_Mutants_cDNA_P Parameter: Timepoint (hr) Value: 6
  misc_feature: MA Experiment 20000087 PARAMETER Experiment Name: At_100uM_ABA_Mutants_cDNA_P Parameter: Tissue Value: Aerial
  misc_feature: MA Experiment 20000087 PARAMETER Experiment Name: At_100uM_ABA_Mutants_cDNA_P Parameter: Treatment Value: 100uM ABA vs. No Treatment
  misc_feature: MA Experiment ID: 20000089 Result: Up-regulated in Transcription
  misc_feature: MA Experiment ID: 20000090 Result: Up-regulated in Transcription
  misc_feature: MA Experiment ID: 20000093 Result: Up-regulated in Transcription
  misc_feature: MA Experiment 20000093 PARAMETER Experiment Name: At_42deg_Heat_cDNA_P Parameter: Temperature (deg C) Value: 42 vs. 22
  misc_feature: MA Experiment 20000093 PARAMETER Experiment Name: At_42deg_Heat_cDNA_P Parameter: Timepoint (hr) Value: 0.5
  misc_feature: MA Experiment 20000093 PARAMETER Experiment Name: At_42deg_Heat_cDNA_P Parameter: Tissue Value: Aerial
  misc_feature: MA Experiment ID: 20000111 Result: Up-regulated in Transcription
  misc_feature: MA Experiment 20000111 PARAMETER Experiment Name: At_42deg_Heat_cDNA_P Parameter: Temperature (deg C) Value: 42 vs. 22
  misc_feature: MA Experiment 20000111 PARAMETER Experiment Name: At_42deg_Heat_cDNA_P Parameter: Timepoint (hr) Value: 6
  misc_feature: MA Experiment 20000111 PARAMETER Experiment Name: At_42deg_Heat_cDNA_P Parameter: Tissue Value: Aerial
  misc_feature: MA Experiment ID: 20000113 Result: Up-regulated in Transcription
  misc_feature: MA Experiment 20000113 PARAMETER Experiment Name: At_42deg_Heat_cDNA_P Parameter: Temperature (deg C) Value: 42 vs. 22
  misc_feature: MA Experiment 20000113 PARAMETER Experiment Name: At_42deg_Heat_cDNA_P Parameter: Timepoint (hr) Value: 8
  misc_feature: MA Experiment 20000113 PARAMETER Experiment Name: At_42deg_Heat_cDNA_P Parameter: Tissue Value: Aerial
  misc_feature: MA Experiment ID: 20000144 Result: Up-regulated in Transcription
  misc_feature: MA Experiment 20000144 PARAMETER Experiment Name: At_42deg_Heat_cDNA_P Parameter: Temperature (deg C) Value: 42 vs. 22
  misc_feature: MA Experiment 20000144 PARAMETER Experiment Name: At_42deg_Heat_cDNA_P Parameter: Timepoint (hr) Value: 1
  misc_feature: MA Experiment 20000144 PARAMETER Experiment Name: At_42deg_Heat_cDNA_P Parameter: Tissue Value: Aerial
  misc_feature: MA Experiment ID: 20000306 Result: Down-regulated in Transcription
  misc_feature: MA Experiment 20000306 PARAMETER Experiment Name: At_Germinating_Seeds_Sub_P Parameter: Age (hr) Value: 6 vs. 0
  misc_feature: MA Experiment 20000306 PARAMETER Experiment Name: At_Germinating_Seeds_Sub_P Parameter: Organism Value: A. thaliana
  misc_feature: MA Experiment 20000306 PARAMETER Experiment Name: At_Germinating_Seeds_Sub_P Parameter: Plant Line Value: WS
  misc_feature: MA Experiment 20000306 PARAMETER Experiment Name: At_Germinating_Seeds_Sub_P Parameter: Tissue Value: Germinating Seeds
  misc_feature: MA Experiment ID: 20000307 Result: Down-regulated in Transcription
  misc_feature: MA Experiment 20000307 PARAMETER Experiment Name: At_Germinating_Seeds_Sub_P Parameter: Age (hr) Value: 24 vs. 0
  misc_feature: MA Experiment 20000307 PARAMETER Experiment Name: At_Germinating_Seeds_Sub_P Parameter: Organism Value: A. thaliana
  misc_feature: MA Experiment 20000307 PARAMETER Experiment Name: At_Germinating_Seeds_Sub_P Parameter: Plant Line Value: WS
  misc_feature: MA Experiment 20000307 PARAMETER Experiment Name: At_Germinating_Seeds_Sub_P Parameter: Tissue Value: Germinating Seeds
  misc_feature: MA Experiment ID: 20000315 Result: Up-regulated in Transcription
  misc_feature: MA Experiment 20000315 PARAMETER Experiment Name: At_14day_Shoots-Roots_Sub_P Parameter: Age (day) Value: 14
  misc_feature: MA Experiment 20000315 PARAMETER Experiment Name: At_14day_Shoots-Roots_Sub_P Parameter: Organism Value: A. thaliana
  misc_feature: MA Experiment 20000315 PARAMETER Experiment Name: At_14day_Shoots-Roots_Sub_P Parameter: Plant Line Value: WS
  misc_feature: MA Experiment 20000315 PARAMETER Experiment Name: At_14day_Shoots-Roots_Sub_P Parameter: Tissue Value: Shoots vs. Whole Plant
  misc_feature: MA Experiment ID: 20000327 Result: Up-regulated in Transcription
  misc_feature: MA Experiment 20000327 PARAMETER Experiment Name: At_42deg_Heat_Sub_P Parameter: Age (day) Value: 14
  misc_feature: MA Experiment 20000327 PARAMETER Experiment Name: At_42deg_Heat_Sub_P Parameter: Organism Value: A. thaliana
  misc_feature: MA Experiment 20000327 PARAMETER Experiment Name: At_42deg_Heat_Sub_P Parameter: Plant Line Value: WS
  misc_feature: MA Experiment 20000327 PARAMETER Experiment Name: At_42deg_Heat_Sub_P Parameter: Temperature (deg C) Value: 42 vs. 22
  misc_feature: MA Experiment 20000327 PARAMETER Experiment Name: At_42deg_Heat_Sub_P Parameter: Timepoint (hr) Value: 1
  misc_feature: MA Experiment 20000327 PARAMETER Experiment Name: At_42deg_Heat_Sub_P Parameter: Tissue Value: Aerial
  misc_feature: MA Experiment ID: 20000328 Result: Up-regulated in Transcription
  misc_feature: MA Experiment 20000328 PARAMETER Experiment Name: At_42deg_Heat_Sub_P Parameter: Age (day) Value: 14
  misc_feature: MA Experiment 20000328 PARAMETER Experiment Name: At_42deg_Heat_Sub_P Parameter: Organism Value: A. thaliana
  misc_feature: MA Experiment 20000328 PARAMETER Experiment Name: At_42deg_Heat_Sub_P Parameter: Plant Line Value: WS
  misc_feature: MA Experiment 20000328 PARAMETER Experiment Name: At_42deg_Heat_Sub_P Parameter: Temperature (deg C) Value: 42 vs. 22
  misc_feature: MA Experiment 20000328 PARAMETER Experiment Name: At_42deg_Heat_Sub_P Parameter: Timepoint (hr) Value: 6
  misc_feature: MA Experiment 20000328 PARAMETER Experiment Name: At_42deg_Heat_Sub_P Parameter: Tissue Value: Aerial
  misc_feature: MA Experiment ID: 20000347 Result: Up-regulated in Transcription
  misc_feature: MA Experiment 20000347 PARAMETER Experiment Name: At_2mM_SA_Sub_P Parameter: Age (day) Value: 14
  misc_feature: MA Experiment 20000347 PARAMETER Experiment Name: At_2mM_SA_Sub_P Parameter: Organism Value: A. thaliana
  misc_feature: MA Experiment 20000347 PARAMETER Experiment Name: At_2mM_SA_Sub_P Parameter: Plant Line Value: WS
  misc_feature: MA Experiment 20000347 PARAMETER Experiment Name: At_2mM_SA_Sub_P Parameter: Timepoint (hr) Value: 6
  misc_feature: MA Experiment 20000347 PARAMETER Experiment Name: At_2mM_SA_Sub_P Parameter: Tissue Value: Aerial
  misc_feature: MA Experiment 20000347 PARAMETER Experiment Name: At_2mM_SA_Sub_P Parameter: Treatment Value: 2mM SA vs. No Treatment
attcgaagagagttctagcaaaacaaaacaaaacagagcaaacagagtaagcgaaacgatgtctctagttccgaccttttttggaggccgaagaacaaacgtgttcgacccattttcactagacgtatgggatccgttcgaaggattcttgacgcccgggttgacaaacgcacctgccaaggacgtggcagcgttcacaaacgctaaagtggactggagggagacacctgaagcgcatgtgttcaaggcggacgtgcctgggcttaagaaggaagaggtgaaggtggaggttgaagatggtaacatacttcagataagcggtgagaggagcagtgagaatgaagagaagagtgacacatggcaccgtgtggagcggtcaagtgggaagttcatgaggaggtttcggttgccagagaatgcaaaggtggaggaagtaaaggcgagtatggagaatggggtgttgtcggttacggtgccgaaagttcaggagagtaagccggaggtcaagtccgttgatatctctggttaagaggaactctgaagttggaaagcttaagacagtaatatgtgatagtgtgaaataaatggtgcgactttcctttcttctttttcttgtaatcaccaatctcgttgtatcaatataagtaatcgtaataaaagagtgttttgatac

SEQ ID NO: 36144 - protein, 175 aa, Arabidopsis thaliana
  peptide (1)..(175): Ceres Seq. ID no. 12396943
  misc_feature (20)..(175): Homolog of NCBI NO: 7441323 NR Description: heat shock protein 18p - common tobacco
  misc_feature (20)..(175): Homolog of NCBI NO: 15238509 NR Description: heat shock protein 18
  misc_feature (20)..(175): Homolog of NCBI NO: 21618106 NR Description: heat shock protein 18 [Arabidopsis thaliana]
  misc_feature (20)..(175): Homolog of NCBI NO: 8250119 NR Description: HSP17.7-a protein [Brassica oleracea]
  misc_feature (20)..(175): Homolog of NCBI NO: 15220832 NR Description: 17.6 kDa heat shock protein (AA 1-156); protein
  misc_feature (20)..(175): Homolog of NCBI NO: 7441319 NR Description: heat-shock protein 17.6, low molecular weight -
  misc_feature (3)..(175): Homolog of NCBI NO: 8671873 NR Description: Contains similarity to 17.6 KD class I heat shock from Arabidopsis thaliana gi|P13853 and contains Hsp20/alpha PF|00011 and signal peptidase I PF|00461 domains. ESTs
  misc_feature (20)..(175): Homolog of NCBI NO: 81639 NR Description: heat shock protein 17 - Arabidopsis thaliana
  misc_feature (20)..(175): Homolog of NCBI NO: 15231372 NR Description: heat shock protein 17
  misc_feature (20)..(175): Homolog of NCBI NO: 15294150 NR Description: AT3g46230/F12M12_200 [Arabidopsis thaliana]
FEESSSKTKQNRANRVSETMSLVPTFFGGRRTNVFDPFSLDVWDPFEGFLTPGLTNAPAKDVAAFTNAKVDWRETPEAHVFKADVPGLKKEEVKVEVEDGNILQISGERSSENEEKSDTWHRVERSSGKFMRRFRLPENAKVEEVKASMENGVLSVTVPKVQESKPEVKSVDISG

SEQ ID NO: 36145 - protein, 156 aa, Arabidopsis thaliana
  peptide (1)..(156): Ceres Seq. ID no. 12396944
  misc_feature (1)..(156): Homolog of NCBI NO: 7441323 NR Description: heat shock protein 18p - common tobacco
  misc_feature (1)..(156): Homolog of NCBI NO: 15238509 NR Description: heat shock protein 18
  misc_feature (1)..(156): Homolog of NCBI NO: 21618106 NR Description: heat shock protein 18 [Arabidopsis thaliana]
  misc_feature (1)..(156): Homolog of NCBI NO: 8250119 NR Description: HSP17.7-a protein [Brassica oleracea]
  misc_feature (1)..(156): Homolog of NCBI NO: 15220832 NR Description: 17.6 kDa heat shock protein (AA 1-156); protein
  misc_feature (1)..(156): Homolog of NCBI NO: 7441319 NR Description: heat-shock protein 17.6, low molecular weight -
  misc_feature (1)..(156): Homolog of NCBI NO: 8671873 NR Description: Contains similarity to 17.6 KD class I heat shock from Arabidopsis thaliana gi|P13853 and contains Hsp20/alpha PF|00011 and signal peptidase I PF|00461 domains. ESTs
  misc_feature (1)..(156): Homolog of NCBI NO: 81639 NR Description: heat shock protein 17 - Arabidopsis thaliana
  misc_feature (1)..(156): Homolog of NCBI NO: 15231372 NR Description: heat shock protein 17
  misc_feature (1)..(156): Homolog of NCBI NO: 15294150 NR Description: AT3g46230/F12M12_200 [Arabidopsis thaliana]
MSLVPTFFGGRRTNVFDPFSLDVWDPFEGFLTPGLTNAPAKDVAAFTNAKVDWRETPEAHVFKADVPGLKKEEVKVEVEDGNILQISGERSSENEEKSDTWHRVERSSGKFMRRFRLPENAKVEEVKASMENGVLSVTVPKVQESKPEVKSVDISG

SEQ ID NO: 36146 - DNA, 1040 bp, Arabidopsis thaliana; identical to SEQ ID NO: 34910
  misc_feature (1)..(1040): Ceres Seq. ID no. 13501435
  misc_feature: MA Experiment ID: 108434 Result: Down-regulated in Transcription
  misc_feature: MA Experiment 108434 PARAMETER Experiment Name: At_Root_Tips_cDNA_P Parameter: Tissue Value: Root Tips
  misc_feature: MA Experiment ID: 108595 Result: Down-regulated in Transcription
  misc_feature: MA Experiment 108595 PARAMETER Experiment Name: At_Ler-pi_Ovule_cDNA_P Parameter: Plant Line Value: null
  misc_feature: MA Experiment ID: 20000069 Result: Up-regulated in Transcription
  misc_feature: MA Experiment 20000069 PARAMETER Experiment Name: At_100uM_ABA_Mutants_cDNA_P Parameter: Plant Line Value: CS23
  misc_feature: MA Experiment 20000069 PARAMETER Experiment Name: At_100uM_ABA_Mutants_cDNA_P Parameter: Timepoint (hr) Value: 6
  misc_feature: MA Experiment 20000069 PARAMETER Experiment Name: At_100uM_ABA_Mutants_cDNA_P Parameter: Tissue Value: Aerial
  misc_feature: MA Experiment 20000069 PARAMETER Experiment Name: At_100uM_ABA_Mutants_cDNA_P Parameter: Treatment Value: 100uM ABA vs. No Treatment
  misc_feature: MA Experiment ID: 20000071 Result: Up-regulated in Transcription
  misc_feature: MA Experiment 20000071 PARAMETER Experiment Name: At_100uM_ABA_Mutants_cDNA_P Parameter: Plant Line Value: CS8104
  misc_feature: MA Experiment 20000071 PARAMETER Experiment Name: At_100uM_ABA_Mutants_cDNA_P Parameter: Timepoint (hr) Value: 6
  misc_feature: MA Experiment 20000071 PARAMETER Experiment Name: At_100uM_ABA_Mutants_cDNA_P Parameter: Tissue Value: Aerial
  misc_feature: MA Experiment 20000071 PARAMETER Experiment Name: At_100uM_ABA_Mutants_cDNA_P Parameter: Treatment Value: 100uM ABA vs. No Treatment
  misc_feature: MA Experiment ID: 20000072 Result: Up-regulated in Transcription
  misc_feature: MA Experiment 20000072 PARAMETER Experiment Name: At_100uM_ABA_Mutants_cDNA_P Parameter: Plant Line Value: CS8105
  misc_feature: MA Experiment 20000072 PARAMETER Experiment Name: At_100uM_ABA_Mutants_cDNA_P Parameter: Timepoint (hr) Value: 6
  misc_feature: MA Experiment 20000072 PARAMETER Experiment Name: At_100uM_ABA_Mutants_cDNA_P Parameter: Tissue Value: Aerial
  misc_feature: MA Experiment 20000072 PARAMETER Experiment Name: At_100uM_ABA_Mutants_cDNA_P Parameter: Treatment Value: 100uM ABA vs. No Treatment
  misc_feature: MA Experiment ID: 20000117 Result: Up-regulated in Transcription
  misc_feature: MA Experiment 20000117 PARAMETER Experiment Name: At_100uM_ABA_Mutants_cDNA_P Parameter: Plant Line Value: Columbia
  misc_feature: MA Experiment 20000117 PARAMETER Experiment Name: At_100uM_ABA_Mutants_cDNA_P Parameter: Timepoint (hr) Value: 6
  misc_feature: MA Experiment 20000117 PARAMETER Experiment Name: At_100uM_ABA_Mutants_cDNA_P Parameter: Tissue Value: Aerial
  misc_feature: MA Experiment 20000117 PARAMETER Experiment Name: At_100uM_ABA_Mutants_cDNA_P Parameter: Treatment Value: 100uM ABA vs. No Treatment
  misc_feature: MA Experiment ID: 20000437 Result: Up-regulated in Transcription
  misc_feature: MA Experiment 20000437 PARAMETER Experiment Name: At_Drought_P Parameter: Age (day) Value: 8
  misc_feature: MA Experiment 20000437 PARAMETER Experiment Name: At_Drought_P Parameter: Organism Value: A. thaliana
  misc_feature: MA Experiment 20000437 PARAMETER Experiment Name: At_Drought_P Parameter: Plant Line Value: WS
  misc_feature: MA Experiment 20000437 PARAMETER Experiment Name: At_Drought_P Parameter: Timepoint (hr) Value: 24
  misc_feature: MA Experiment 20000437 PARAMETER Experiment Name: At_Drought_P Parameter: Tissue Value: Whole Plant
  misc_feature: MA Experiment 20000437 PARAMETER Experiment Name: At_Drought_P Parameter: Treatment Value: Drought vs. No Drought

SEQ ID NO: 36147 - protein, 231 aa, Arabidopsis thaliana; identical to SEQ ID NO: 34911
  peptide (1)..(231): Ceres Seq. ID no. 13501436
  misc_feature (90)..(158): Pfam Name: NifU-like domain Pfam Description: NifU-like domain
  misc_feature (90)..(158): Pfam Name: NifU-like domain Pfam Description: NifU-like domain
  misc_feature (79)..(158): Homolog of NCBI NO: 33860975 NR Description: NifU-like protein
  misc_feature (79)..(159): Homolog of NCBI NO: 24414813 NR Description: putative NifU-like protein [Synechococcus sp. PCC
  misc_feature (85)..(223): Homolog of NCBI NO: 7485833 NR Description: hypothetical protein F20B18.20 - Arabidopsis
  misc_feature (68)..(223): Homolog of NCBI NO: 30698492 NR Description: NifU1 [Oryza sativa (japonica cultivar-group)]
  misc_feature (8)..(223): Homolog of NCBI NO: 18416645 NR Description: nitrogen fixation protein, putative  (NifU)
  misc_feature (79)..(158): Homolog of NCBI NO: 33860975 NR Description: NifU-like protein
  misc_feature (85)..(223): Homolog of NCBI NO: 7485833 NR Description: hypothetical protein F20B18.20 - Arabidopsis
  misc_feature (8)..(223): Homolog of NCBI NO: 18416645 NR Description: nitrogen fixation protein, putative  (NifU)
  misc_feature (1)..(231): Homolog of NCBI NO: 18411785 NR Description: NifU-related metallocluster assembly factor
  misc_feature (2)..(173): Homolog of NCBI NO: 25407141 NR Description: hypothetical protein AT4g01940 [imported] -
  misc_feature (84)..(158): Homolog of NCBI NO: 2688826 NR Description: putative NifU protein [Prunus armeniaca]
  misc_feature (85)..(223): Homolog of NCBI NO: 18423084 NR Description: expressed protein [Arabidopsis thaliana]
  misc_feature (8)..(223): Homolog of NCBI NO: 21554503 NR Description: nitrogen fixation like protein [Arabidopsis
  misc_feature (68)..(223): Homolog of NCBI NO: 30698492 NR Description: NifU1 [Oryza sativa (japonica cultivar-group)]
  misc_feature (79)..(159): Homolog of NCBI NO: 24414813 NR Description: putative NifU-like protein [Synechococcus sp. PCC
  misc_feature (8)..(223): Homolog of NCBI NO: 21554503 NR Description: nitrogen fixation like protein [Arabidopsis
  misc_feature (85)..(223): Homolog of NCBI NO: 18423084 NR Description: expressed protein [Arabidopsis thaliana]
  misc_feature (84)..(158): Homolog of NCBI NO: 2688826 NR Description: putative NifU protein [Prunus armeniaca]
  misc_feature (2)..(173): Homolog of NCBI NO: 25407141 NR Description: hypothetical protein AT4g01940 [imported] -
  misc_feature (1)..(231): Homolog of NCBI NO: 18411785 NR Description: NifU-related metallocluster assembly factor

SEQ ID NO: 36148 - protein, 230 aa, Arabidopsis thaliana; identical to SEQ ID NO: 34912
  peptide (1)..(230): Ceres Seq. ID no. 13501437
  misc_feature (89)..(157): Pfam Name: NifU-like domain Pfam Description: NifU-like domain
  misc_feature (89)..(157): Pfam Name: NifU-like domain Pfam Description: NifU-like domain
  misc_feature (78)..(157): Homolog of NCBI NO: 33860975 NR Description: NifU-like protein
  misc_feature (78)..(158): Homolog of NCBI NO: 24414813 NR Description: putative NifU-like protein [Synechococcus sp. PCC
  misc_feature (84)..(222): Homolog of NCBI NO: 7485833 NR Description: hypothetical protein F20B18.20 - Arabidopsis
  misc_feature (67)..(222): Homolog of NCBI NO: 30698492 NR Description: NifU1 [Oryza sativa (japonica cultivar-group)]
  misc_feature (7)..(222): Homolog of NCBI NO: 18416645 NR Description: nitrogen fixation protein, putative  (NifU)
  misc_feature (78)..(157): Homolog of NCBI NO: 33860975 NR Description: NifU-like protein
  misc_feature (84)..(222): Homolog of NCBI NO: 7485833 NR Description: hypothetical protein F20B18.20 - Arabidopsis
  misc_feature (7)..(222): Homolog of NCBI NO: 18416645 NR Description: nitrogen fixation protein, putative  (NifU)
  misc_feature (1)..(230): Homolog of NCBI NO: 18411785 NR Description: NifU-related metallocluster assembly factor
  misc_feature (1)..(172): Homolog of NCBI NO: 25407141 NR Description: hypothetical protein AT4g01940 [imported] -
  misc_feature (83)..(157): Homolog of NCBI NO: 2688826 NR Description: putative NifU protein [Prunus armeniaca]
  misc_feature (84)..(222): Homolog of NCBI NO: 18423084 NR Description: expressed protein [Arabidopsis thaliana]
  misc_feature (7)..(222): Homolog of NCBI NO: 21554503 NR Description: nitrogen fixation like protein [Arabidopsis
  misc_feature (67)..(222): Homolog of NCBI NO: 30698492 NR Description: NifU1 [Oryza sativa (japonica cultivar-group)]
  misc_feature (78)..(158): Homolog of NCBI NO: 24414813 NR Description: putative NifU-like protein [Synechococcus sp. PCC
  misc_feature (7)..(222): Homolog of NCBI NO: 21554503 NR Description: nitrogen fixation like protein [Arabidopsis
  misc_feature (84)..(222): Homolog of NCBI NO: 18423084 NR Description: expressed protein [Arabidopsis thaliana]
  misc_feature (83)..(157): Homolog of NCBI NO: 2688826 NR Description: putative NifU protein [Prunus armeniaca]
  misc_feature (1)..(172): Homolog of NCBI NO: 25407141 NR Description: hypothetical protein AT4g01940 [imported] -
  misc_feature (1)..(230): Homolog of NCBI NO: 18411785 NR Description: NifU-related metallocluster assembly factor

SEQ ID NO: 36149 - DNA, 747 bp, Arabidopsis thaliana
  misc_feature (1)..(747): Ceres Seq. ID no. 12678432
  misc_feature: MA Experiment ID: 20000111 Result: Up-regulated in Transcription
  misc_feature: MA Experiment 20000111 PARAMETER Experiment Name: At_42deg_Heat_cDNA_P Parameter: Temperature (deg C) Value: 42 vs. 22
  misc_feature: MA Experiment 20000111 PARAMETER Experiment Name: At_42deg_Heat_cDNA_P Parameter: Timepoint (hr) Value: 6
  misc_feature: MA Experiment 20000111 PARAMETER Experiment Name: At_42deg_Heat_cDNA_P Parameter: Tissue Value: Aerial
  misc_feature: MA Experiment ID: 20000113 Result: Up-regulated in Transcription
  misc_feature: MA Experiment 20000113 PARAMETER Experiment Name: At_42deg_Heat_cDNA_P Parameter: Temperature (deg C) Value: 42 vs. 22
  misc_feature: MA Experiment 20000113 PARAMETER Experiment Name: At_42deg_Heat_cDNA_P Parameter: Timepoint (hr) Value: 8
  misc_feature: MA Experiment 20000113 PARAMETER Experiment Name: At_42deg_Heat_cDNA_P Parameter: Tissue Value: Aerial
  misc_feature: MA Experiment ID: 20000144 Result: Up-regulated in Transcription
  misc_feature: MA Experiment 20000144 PARAMETER Experiment Name: At_42deg_Heat_cDNA_P Parameter: Temperature (deg C) Value: 42 vs. 22
  misc_feature: MA Experiment 20000144 PARAMETER Experiment Name: At_42deg_Heat_cDNA_P Parameter: Timepoint (hr) Value: 1
  misc_feature: MA Experiment 20000144 PARAMETER Experiment Name: At_42deg_Heat_cDNA_P Parameter: Tissue Value: Aerial
  misc_feature: MA Experiment ID: 20000173 Result: Up-regulated in Transcription
  misc_feature: MA Experiment 20000173 PARAMETER Experiment Name: At_42deg_Heat_P Parameter: Age (day) Value: 14
  misc_feature: MA Experiment 20000173 PARAMETER Experiment Name: At_42deg_Heat_P Parameter: Organism Value: A. thaliana
  misc_feature: MA Experiment 20000173 PARAMETER Experiment Name: At_42deg_Heat_P Parameter: Plant Line Value: WS
  misc_feature: MA Experiment 20000173 PARAMETER Experiment Name: At_42deg_Heat_P Parameter: Temperature (deg C) Value: 42 vs. 22
  misc_feature: MA Experiment 20000173 PARAMETER Experiment Name: At_42deg_Heat_P Parameter: Timepoint (hr) Value: 6
  misc_feature: MA Experiment 20000173 PARAMETER Experiment Name: At_42deg_Heat_P Parameter: Tissue Value: Aerial
  misc_feature: MA Experiment ID: 20000179 Result: Up-regulated in Transcription
  misc_feature: MA Experiment 20000179 PARAMETER Experiment Name: At_Germinating_Seeds_P Parameter: Age (hr) Value: 6 vs. 0
  misc_feature: MA Experiment 20000179 PARAMETER Experiment Name: At_Germinating_Seeds_P Parameter: Tissue Value: Germinating Seeds
  misc_feature: MA Experiment ID: 20000184 Result: Down-regulated in Transcription
  misc_feature: MA Experiment 20000184 PARAMETER Experiment Name: At_Shoots__P Parameter: Age (day) Value: 7
  misc_feature: MA Experiment 20000184 PARAMETER Experiment Name: At_Shoots__P Parameter: Tissue Value: Shoots vs. Whole Plant
  misc_feature: MA Experiment ID: 20001558 Result: Down-regulated in Transcription
  misc_feature: MA Experiment 20001558 PARAMETER Experiment Name: At_Drought_Soil_Dry_P Parameter: Age (day) Value: 27
  misc_feature: MA Experiment 20001558 PARAMETER Experiment Name: At_Drought_Soil_Dry_P Parameter: Organism Value: A. thaliana
  misc_feature: MA Experiment 20001558 PARAMETER Experiment Name: At_Drought_Soil_Dry_P Parameter: Plant Line Value: WS
  misc_feature: MA Experiment 20001558 PARAMETER Experiment Name: At_Drought_Soil_Dry_P Parameter: Post Timepoint (hr) Value: 6
  misc_feature: MA Experiment 20001558 PARAMETER Experiment Name: At_Drought_Soil_Dry_P Parameter: Post-Treatment Value: Re-Water vs. No Drought
  misc_feature: MA Experiment 20001558 PARAMETER Experiment Name: At_Drought_Soil_Dry_P Parameter: Timepoint (day) Value: 13
  misc_feature: MA Experiment 20001558 PARAMETER Experiment Name: At_Drought_Soil_Dry_P Parameter: Treatment Value: Drought vs. No Drought
atggcttcgtctctcaccactagattatcggcggtaatcggatctcgacggagttttccgatcgtcggagcgttttgcgttctgtcaactctctcaatctcttctctttcttcttcatctcccttcaaatcgggttgtgcacagtctttctctgttgttcctctcttaaggtctaagtttagcagtaaggctttttcttcgtcgatcagaatggaggagagcagcaaaactgtgcccagcattgttgtctatgtcactgttcctaacagagaagcagggaagaagttggctaacagcattgtccaggaaaagcttgcagcgtgtgtgaacattgtgcctggcattgaatcggtgtacgagtgggaggggaaggttcagagtgattcagaggagctcctgataatcaaaacaaggcaatcccttctagaacctctaaccgagcatgtcaatgcaaatcacgaatacgatgtgccagaagtaattgcgttgcccatcactggtgggagcgacaagtatttagaatggttgaaaaacagtacaaggaactgagatctcgacatctcgtagctgcccatcgtcaatggctttctagtattagtttcttttacatttcagtaacctctgtattaaagataaaacgtgtgaagtgtaatactggaccagttcgtcaaatgaaataaacaatgacattgttccatataatggatggacatttgcttaaaagatttcagatcaagtctttgattc

SEQ ID NO: 36150 - protein, 182 aa, Arabidopsis thaliana
  peptide (1)..(182): Ceres Seq. ID no. 12678433
  misc_feature (80)..(181): Pfam Name: CutA1 divalent ion tolerance protein Pfam Description: CutA1 divalent ion tolerance protein
  misc_feature (78)..(182): Homolog of NCBI NO: 39654385 NR Description: Chain A, Crystal Structure Of Rat Cuta1 At 2.15 A
  misc_feature (78)..(182): Homolog of NCBI NO: 34852227 NR Description: similar to divalent cation tolerant protein CUTA
  misc_feature (78)..(182): Homolog of NCBI NO: 21702737 NR Description: divalent cation tolerant protein CUTA [Mus
  misc_feature (72)..(182): Homolog of NCBI NO: 7341255 NR Description: brain acetylcholinesterase putative membrane
  misc_feature (55)..(182): Homolog of NCBI NO: 7706244 NR Description: divalent cation tolerant protein CUTA [Homo
  misc_feature (2)..(176): Homolog of NCBI NO: 24641937 NR Description: CG11590-PA [Drosophila melanogaster]
  misc_feature (26)..(176): Homolog of NCBI NO: 21430094 NR Description: GM24986p [Drosophila melanogaster]
  misc_feature (58)..(181): Homolog of NCBI NO: 23509167 NR Description: cutA, putative [Plasmodium falciparum 3D7]
  misc_feature (1)..(156): Homolog of NCBI NO: 30685818 NR Description: putative related to microbial divalent cation
  misc_feature (1)..(182): Homolog of NCBI NO: 15226156 NR Description: putative related to microbial divalent cation
MASSLTTRLSAVIGSRRSFPIVGAFCVLSTLSISSLSSSSPFKSGCAQSFSVVPLLRSKFSSKAFSSSIRMEESSKTVPSIVVYVTVPNREAGKKLANSIVQEKLAACVNIVPGIESVYEWEGKVQSDSEELLIIKTRQSLLEPLTEHVNANHEYDVPEVIALPITGGSDKYLEWLKNSTRN

SEQ ID NO: 36151 - protein, 112 aa, Arabidopsis thaliana
  peptide (1)..(112): Ceres Seq. ID no. 12678434
  misc_feature (10)..(111): Pfam Name: CutA1 divalent ion tolerance protein Pfam Description: CutA1 divalent ion tolerance protein
  misc_feature (8)..(112): Homolog of NCBI NO: 39654385 NR Description: Chain A, Crystal Structure Of Rat Cuta1 At 2.15 A
  misc_feature (8)..(112): Homolog of NCBI NO: 34852227 NR Description: similar to divalent cation tolerant protein CUTA
  misc_feature (8)..(112): Homolog of NCBI NO: 21702737 NR Description: divalent cation tolerant protein CUTA [Mus
  misc_feature (2)..(112): Homolog of NCBI NO: 7341255 NR Description: brain acetylcholinesterase putative membrane
  misc_feature (1)..(112): Homolog of NCBI NO: 7706244 NR Description: divalent cation tolerant protein CUTA [Homo
  misc_feature (1)..(106): Homolog of NCBI NO: 24641937 NR Description: CG11590-PA [Drosophila melanogaster]
  misc_feature (1)..(106): Homolog of NCBI NO: 21430094 NR Description: GM24986p [Drosophila melanogaster]
  misc_feature (1)..(111): Homolog of NCBI NO: 23509167 NR Description: cutA, putative [Plasmodium falciparum 3D7]
  misc_feature (1)..(86): Homolog of NCBI NO: 30685818 NR Description: putative related to microbial divalent cation
  misc_feature (1)..(112): Homolog of NCBI NO: 15226156 NR Description: putative related to microbial divalent cation
MEESSKTVPSIVVYVTVPNREAGKKLANSIVQEKLAACVNIVPGIESVYEWEGKVQSDSEELLIIKTRQSLLEPLTEHVNANHEYDVPEVIALPITGGSDKYLEWLKNSTRN

SEQ ID NO: 36152 - DNA, 1059 bp, Arabidopsis thaliana
  misc_feature (1)..(1059): Ceres Seq. ID no. 12395617
  misc_feature: MA Experiment ID: 108434 Result: Up-regulated in Transcription
  misc_feature: MA Experiment 108434 PARAMETER Experiment Name: At_Root_Tips_cDNA_P Parameter: Tissue Value: Root Tips
  misc_feature: MA Experiment ID: 108585 Result: Down-regulated in Transcription
  misc_feature: MA Experiment 108585 PARAMETER Experiment Name: At_5mM_NaNP_cDNA_P Parameter: Timepoint (hr) Value: 6
  misc_feature: MA Experiment 108585 PARAMETER Experiment Name: At_5mM_NaNP_cDNA_P Parameter: Tissue Value: Aerial
  misc_feature: MA Experiment 108585 PARAMETER Experiment Name: At_5mM_NaNP_cDNA_P Parameter: Treatment Value: null
  misc_feature: MA Experiment ID: 108595 Result: Down-regulated in Transcription
  misc_feature: MA Experiment 108595 PARAMETER Experiment Name: At_Ler-pi_Ovule_cDNA_P Parameter: Plant Line Value: null
  misc_feature: MA Experiment ID: 20000182 Result: Down-regulated in Transcription
  misc_feature: MA Experiment 20000182 PARAMETER Experiment Name: At_2mM_SA_P Parameter: Age (day) Value: 14
  misc_feature: MA Experiment 20000182 PARAMETER Experiment Name: At_2mM_SA_P Parameter: Organism Value: A. thaliana
  misc_feature: MA Experiment 20000182 PARAMETER Experiment Name: At_2mM_SA_P Parameter: Plant Line Value: WS
  misc_feature: MA Experiment 20000182 PARAMETER Experiment Name: At_2mM_SA_P Parameter: Timepoint (hr) Value: 6
  misc_feature: MA Experiment 20000182 PARAMETER Experiment Name: At_2mM_SA_P Parameter: Tissue Value: Aerial
  misc_feature: MA Experiment 20000182 PARAMETER Experiment Name: At_2mM_SA_P Parameter: Treatment Value: 2mM SA vs. No Treatment
  misc_feature: MA Experiment ID: 20000495 Result: Down-regulated in Transcription
  misc_feature: MA Experiment 20000495 PARAMETER Experiment Name: At_Guard_Cells_P Parameter: Harvest Date Value: 8/2/2002
  misc_feature: MA Experiment 20000495 PARAMETER Experiment Name: At_Guard_Cells_P Parameter: Organism Value: A. thaliana
  misc_feature: MA Experiment 20000495 PARAMETER Experiment Name: At_Guard_Cells_P Parameter: Tissue Value: Guard Cells vs. Leaves
  misc_feature: MA Experiment ID: 20001248 Result: Down-regulated in Transcription
  misc_feature: MA Experiment 20001248 PARAMETER Experiment Name: At_Far-red-induction_P Parameter: Age (day) Value: 7
  misc_feature: MA Experiment 20001248 PARAMETER Experiment Name: At_Far-red-induction_P Parameter: Light Value: Far-red vs. White
  misc_feature: MA Experiment 20001248 PARAMETER Experiment Name: At_Far-red-induction_P Parameter: Organism Value: A. thaliana
  misc_feature: MA Experiment 20001248 PARAMETER Experiment Name: At_Far-red-induction_P Parameter: Plant Line Value: Columbia
  misc_feature: MA Experiment 20001248 PARAMETER Experiment Name: At_Far-red-induction_P Parameter: Timepoint (hr) Value: 4
  misc_feature: MA Experiment 20001248 PARAMETER Experiment Name: At_Far-red-induction_P Parameter: Tissue Value: Whole Plant
  misc_feature: MA Experiment ID: 20001450 Result: Down-regulated in Transcription
  misc_feature: MA Experiment 20001450 PARAMETER Experiment Name: At_Far-red-induction_P Parameter: Age (day) Value: 7
  misc_feature: MA Experiment 20001450 PARAMETER Experiment Name: At_Far-red-induction_P Parameter: Light Value: Far-red vs. White
  misc_feature: MA Experiment 20001450 PARAMETER Experiment Name: At_Far-red-induction_P Parameter: Organism Value: A. thaliana
  misc_feature: MA Experiment 20001450 PARAMETER Experiment Name: At_Far-red-induction_P Parameter: Plant Line Value: Columbia
  misc_feature: MA Experiment 20001450 PARAMETER Experiment Name: At_Far-red-induction_P Parameter: Timepoint (hr) Value: 8
  misc_feature: MA Experiment 20001450 PARAMETER Experiment Name: At_Far-red-induction_P Parameter: Tissue Value: Whole Plant
  misc_feature: MA Experiment ID: 20001451 Result: Down-regulated in Transcription
  misc_feature: MA Experiment 20001451 PARAMETER Experiment Name: At_Far-red-induction_P Parameter: Age (day) Value: 7
  misc_feature: MA Experiment 20001451 PARAMETER Experiment Name: At_Far-red-induction_P Parameter: Light Value: Far-red vs. White
  misc_feature: MA Experiment 20001451 PARAMETER Experiment Name: At_Far-red-induction_P Parameter: Organism Value: A. thaliana
  misc_feature: MA Experiment 20001451 PARAMETER Experiment Name: At_Far-red-induction_P Parameter: Plant Line Value: Columbia
  misc_feature: MA Experiment 20001451 PARAMETER Experiment Name: At_Far-red-induction_P Parameter: Timepoint (hr) Value: 24
  misc_feature: MA Experiment 20001451 PARAMETER Experiment Name: At_Far-red-induction_P Parameter: Tissue Value: Whole Plant
aaagccattgtttcagttgatgatggtgatgatatctcttcacttctctactccgccgctagcttttctcaaatctgattccaattccagatttctcaagaaccctaatcctaatgttatccaattcaccccaaaatcccaacttcttttcccccaacgtctcaatttcaacaccggaacaaatttaaaccggcgaactctgagttgctatgggattaaggattcaagtgagacaacaaagtctgcgccgtcattagactccggcgacggtggcggcggaggaggtgacggcggagatgctggtggtgatgatgataaaggtgaagtggaggaaaaaaacagactttttccggaatggttggattttacctcggatgatgcacagactgtgtttgtggctatagctgtatcgttggcgtttcgttattttatcgcagaaccaagatatattccttctttgtctatgtatcctacctttgatgttggagacagattagttgcagagaaggtgagttattatttcaggaagccttgtgcaaatgatattgtcatctttaaaagtccaccagttcttcaggaagttgggtatactgatgccgatgtatttattaaacggattattgccaaagaaggtgaccttgtggaggtacataatgggaaactgatggttaatggtgttgctaggaatgaaaaattcatcttagagcctcctggttatgaaatgacaccaattagggtaccggaaaattcagtctttgtgatgggtgataaccggaataacagttatgattcgcatgtgtggggtcctctgcctttgaagaatatcattggacggtcagtttttcggtattggccaccaaacagagtaagcgggacagtgctagaaggtggctgtgctgtggataagcaatagaacatattgtaacgttttgattcggcatgtcttcatttgaaacacttgtgcagataaaaacgaaaacaatgtacctttttatgaaggagagagttgcacatttgaattggattgcagattaatgaggaaacaagaaattcttattt

SEQ ID NO: 36153 - protein, 303 aa, Arabidopsis thaliana
  peptide (1)..(303): Ceres Seq. ID no. 12395618
  misc_feature (122)..(277): Pfam Name: Signal peptidase I Pfam Description: Signal peptidase I
  misc_feature (130)..(289): Homolog of NCBI NO: 17230467 NR Description: signal peptidase I [Nostoc sp. PCC 7120]
  misc_feature (112)..(288): Homolog of NCBI NO: 16329254 NR Description: leader peptidase I [Synechocystis sp. PCC 6803]
  misc_feature (113)..(293): Homolog of NCBI NO: 23042815 NR Description: hypothetical protein [Trichodesmium erythraeum
  misc_feature (120)..(293): Homolog of NCBI NO: 21553622 NR Description: chloroplast thylakoidal processing peptidase,
  misc_feature (120)..(293): Homolog of NCBI NO: 15222236 NR Description: chloroplast thylakoidal processing peptidase,
  misc_feature (76)..(293): Homolog of NCBI NO: 30684587 NR Description: signal peptidase I -related [Arabidopsis
  misc_feature (76)..(293): Homolog of NCBI NO: 25408074 NR Description: probable signal peptidase I [imported] -
  misc_feature (7)..(303): Homolog of NCBI NO: 25082936 NR Description: chloroplast thylakoidal processing peptidase,
  misc_feature (7)..(303): Homolog of NCBI NO: 30687572 NR Description: chloroplast thylakoidal processing peptidase
  misc_feature (1)..(303): Homolog of NCBI NO: 9294054 NR Description: contains similarity to signal peptidase (leader
KPLFQLMMVMISLHFSTPPLAFLKSDSNSRFLKNPNPNVIQFTPKSQLLFPQRLNFNTGTNLNRRTLSCYGIKDSSETTKSAPSLDSGDGGGGGGDGGDAGGDDDKGEVEEKNRLFPEWLDFTSDDAQTVFVAIAVSLAFRYFIAEPRYIPSLSMYPTFDVGDRLVAEKVSYYFRKPCANDIVIFKSPPVLQEVGYTDADVFIKRIIAKEGDLVEVHNGKLMVNGVARNEKFILEPPGYEMTPIRVPENSVFVMGDNRNNSYDSHVWGPLPLKNIIGRSVFRYWPPNRVSGTVLEGGCAVDKQ

SEQ ID NO: 36154 - protein, 297 aa, Arabidopsis thaliana
  peptide (1)..(297): Ceres Seq. ID no. 12395619
  misc_feature (116)..(271): Pfam Name: Signal peptidase I Pfam Description: Signal peptidase I
  misc_feature (124)..(283): Homolog of NCBI NO: 17230467 NR Description: signal peptidase I [Nostoc sp. PCC 7120]
  misc_feature (106)..(282): Homolog of NCBI NO: 16329254 NR Description: leader peptidase I [Synechocystis sp. PCC 6803]
  misc_feature (107)..(287): Homolog of NCBI NO: 23042815 NR Description: hypothetical protein [Trichodesmium erythraeum
  misc_feature (114)..(287): Homolog of NCBI NO: 21553622 NR Description: chloroplast thylakoidal processing peptidase,
  misc_feature (114)..(287): Homolog of NCBI NO: 15222236 NR Description: chloroplast thylakoidal processing peptidase,
  misc_feature (70)..(287): Homolog of NCBI NO: 30684587 NR Description: signal peptidase I -related [Arabidopsis
  misc_feature (70)..(287): Homolog of NCBI NO: 25408074 NR Description: probable signal peptidase I [imported] -
  misc_feature (1)..(297): Homolog of NCBI NO: 25082936 NR Description: chloroplast thylakoidal processing peptidase,
  misc_feature (1)..(297): Homolog of NCBI NO: 30687572 NR Description: chloroplast thylakoidal processing peptidase
  misc_feature (1)..(297): Homolog of NCBI NO: 9294054 NR Description: contains similarity to signal peptidase (leader
MMVMISLHFSTPPLAFLKSDSNSRFLKNPNPNVIQFTPKSQLLFPQRLNFNTGTNLNRRTLSCYGIKDSSETTKSAPSLDSGDGGGGGGDGGDAGGDDDKGEVEEKNRLFPEWLDFTSDDAQTVFVAIAVSLAFRYFIAEPRYIPSLSMYPTFDVGDRLVAEKVSYYFRKPCANDIVIFKSPPVLQEVGYTDADVFIKRIIAKEGDLVEVHNGKLMVNGVARNEKFILEPPGYEMTPIRVPENSVFVMGDNRNNSYDSHVWGPLPLKNIIGRSVFRYWPPNRVSGTVLEGGCAVDKQ

SEQ ID NO: 36155 - protein, 296 aa, Arabidopsis thaliana
  peptide (1)..(296): Ceres Seq. ID no. 12395620
  misc_feature (115)..(270): Pfam Name: Signal peptidase I Pfam Description: Signal peptidase I
  misc_feature (123)..(282): Homolog of NCBI NO: 17230467 NR Description: signal peptidase I [Nostoc sp. PCC 7120]
  misc_feature (105)..(281): Homolog of NCBI NO: 16329254 NR Description: leader peptidase I [Synechocystis sp. PCC 6803]
  misc_feature (106)..(286): Homolog of NCBI NO: 23042815 NR Description: hypothetical protein [Trichodesmium erythraeum
  misc_feature (113)..(286): Homolog of NCBI NO: 21553622 NR Description: chloroplast thylakoidal processing peptidase,
  misc_feature (113)..(286): Homolog of NCBI NO: 15222236 NR Description: chloroplast thylakoidal processing peptidase,
  misc_feature (69)..(286): Homolog of NCBI NO: 30684587 NR Description: signal peptidase I -related [Arabidopsis
  misc_feature (69)..(286): Homolog of NCBI NO: 25408074 NR Description: probable signal peptidase I [imported] -
  misc_feature (1)..(296): Homolog of NCBI NO: 25082936 NR Description: chloroplast thylakoidal processing peptidase,
  misc_feature (1)..(296): Homolog of NCBI NO: 30687572 NR Description: chloroplast thylakoidal processing peptidase
  misc_feature (1)..(296): Homolog of NCBI NO: 9294054 NR Description: contains similarity to signal peptidase (leader
MVMISLHFSTPPLAFLKSDSNSRFLKNPNPNVIQFTPKSQLLFPQRLNFNTGTNLNRRTLSCYGIKDSSETTKSAPSLDSGDGGGGGGDGGDAGGDDDKGEVEEKNRLFPEWLDFTSDDAQTVFVAIAVSLAFRYFIAEPRYIPSLSMYPTFDVGDRLVAEKVSYYFRKPCANDIVIFKSPPVLQEVGYTDADVFIKRIIAKEGDLVEVHNGKLMVNGVARNEKFILEPPGYEMTPIRVPENSVFVMGDNRNNSYDSHVWGPLPLKNIIGRSVFRYWPPNRVSGTVLEGGCAVDKQ

SEQ ID NO: 36156 - DNA, 1194 bp, Arabidopsis thaliana
  misc_feature (1)..(1194): Ceres Seq. ID no. 12337726
  misc_feature: MA Experiment ID: 20000180 Result: Up-regulated in Transcription
  misc_feature: MA Experiment 20000180 PARAMETER Experiment Name: At_Germinating_Seeds_P Parameter: Age (hr) Value: 24 vs. 0
  misc_feature: MA Experiment 20000180 PARAMETER Experiment Name: At_Germinating_Seeds_P Parameter: Tissue Value: Germinating Seeds
  misc_feature: MA Experiment ID: 20000184 Result: Up-regulated in Transcription
  misc_feature: MA Experiment 20000184 PARAMETER Experiment Name: At_Shoots__P Parameter: Age (day) Value: 7
  misc_feature: MA Experiment 20000184 PARAMETER Experiment Name: At_Shoots__P Parameter: Tissue Value: Shoots vs. Whole Plant
  misc_feature: MA Experiment ID: 20000185 Result: Down-regulated in Transcription
  misc_feature: MA Experiment 20000185 PARAMETER Experiment Name: At_Roots__P Parameter: Age (day) Value: 7 vs. 21
  misc_feature: MA Experiment 20000185 PARAMETER Experiment Name: At_Roots__P Parameter: Organism Value: A. thaliana
  misc_feature: MA Experiment 20000185 PARAMETER Experiment Name: At_Roots__P Parameter: Tissue Value: Roots vs. Whole Plant
  misc_feature: MA Experiment ID: 20000211 Result: Down-regulated in Transcription
  misc_feature: MA Experiment 20000211 PARAMETER Experiment Name: At_0.001percent_MeJA__P Parameter: Age (day) Value: 14
  misc_feature: MA Experiment 20000211 PARAMETER Experiment Name: At_0.001percent_MeJA__P Parameter: Organism Value: A. thaliana
  misc_feature: MA Experiment 20000211 PARAMETER Experiment Name: At_0.001percent_MeJA__P Parameter: Plant Line Value: WS
  misc_feature: MA Experiment 20000211 PARAMETER Experiment Name: At_0.001percent_MeJA__P Parameter: Timepoint (hr) Value: 1
  misc_feature: MA Experiment 20000211 PARAMETER Experiment Name: At_0.001percent_MeJA__P Parameter: Tissue Value: Aerial
  misc_feature: MA Experiment 20000211 PARAMETER Experiment Name: At_0.001percent_MeJA__P Parameter: Treatment Value: 0.001percent MeJA vs. No Treatment
  misc_feature: MA Experiment ID: 20000234 Result: Up-regulated in Transcription
  misc_feature: MA Experiment 20000234 PARAMETER Experiment Name: At_Siliques_P Parameter: Age (day) Value: 21
  misc_feature: MA Experiment 20000234 PARAMETER Experiment Name: At_Siliques_P Parameter: Organism Value: A. thaliana
  misc_feature: MA Experiment 20000234 PARAMETER Experiment Name: At_Siliques_P Parameter: Plant Line Value: WS
  misc_feature: MA Experiment 20000234 PARAMETER Experiment Name: At_Siliques_P Parameter: Tissue Value: Less Than 5mm Siliques vs. Whole Plant
  misc_feature: MA Experiment ID: 20000235 Result: Up-regulated in Transcription
  misc_feature: MA Experiment 20000235 PARAMETER Experiment Name: At_Siliques_P Parameter: Age (day) Value: 21
  misc_feature: MA Experiment 20000235 PARAMETER Experiment Name: At_Siliques_P Parameter: Organism Value: A. thaliana
  misc_feature: MA Experiment 20000235 PARAMETER Experiment Name: At_Siliques_P Parameter: Plant Line Value: WS
  misc_feature: MA Experiment 20000235 PARAMETER Experiment Name: At_Siliques_P Parameter: Tissue Value: 5-10mm Siliques vs. Whole Plant
  misc_feature: MA Experiment ID: 20000264 Result: Up-regulated in Transcription
  misc_feature: MA Experiment 20000264 PARAMETER Experiment Name: At_Open_Flower_P Parameter: Age (day) Value: 21
  misc_feature: MA Experiment 20000264 PARAMETER Experiment Name: At_Open_Flower_P Parameter: Plant Line Value: WS
  misc_feature: MA Experiment 20000264 PARAMETER Experiment Name: At_Open_Flower_P Parameter: Tissue Value: Open Flower vs. Whole Plant
  misc_feature: MA Experiment ID: 20000265 Result: Up-regulated in Transcription
  misc_feature: MA Experiment 20000265 PARAMETER Experiment Name: At_Open_Flower_P Parameter: Age (day) Value: 21
  misc_feature: MA Experiment 20000265 PARAMETER Experiment Name: At_Open_Flower_P Parameter: Plant Line Value: WS
  misc_feature: MA Experiment 20000265 PARAMETER Experiment Name: At_Open_Flower_P Parameter: Tissue Value: Closed Flower vs. Whole Plant
  misc_feature: MA Experiment ID: 20000286 Result: Up-regulated in Transcription
  misc_feature: MA Experiment 20000286 PARAMETER Experiment Name: At_Open_Flower_P Parameter: Age (day) Value: 21
  misc_feature: MA Experiment 20000286 PARAMETER Experiment Name: At_Open_Flower_P Parameter: Plant Line Value: WS
  misc_feature: MA Experiment 20000286 PARAMETER Experiment Name: At_Open_Flower_P Parameter: Tissue Value: Half Open vs. Whole Plant
  misc_feature: MA Experiment ID: 20000308 Result: Down-regulated in Transcription
  misc_feature: MA Experiment 20000308 PARAMETER Experiment Name: At_100mM_NaCl__P Parameter: Age (day) Value: 17
  misc_feature: MA Experiment 20000308 PARAMETER Experiment Name: At_100mM_NaCl__P Parameter: Organism Value: A. thaliana
  misc_feature: MA Experiment 20000308 PARAMETER Experiment Name: At_100mM_NaCl__P Parameter: Plant Line Value: WS
  misc_feature: MA Experiment 20000308 PARAMETER Experiment Name: At_100mM_NaCl__P Parameter: Timepoint (hr) Value: 72
  misc_feature: MA Experiment 20000308 PARAMETER Experiment Name: At_100mM_NaCl__P Parameter: Tissue Value: Whole Plant
  misc_feature: MA Experiment 20000308 PARAMETER Experiment Name: At_100mM_NaCl__P Parameter: Treatment Value: 100mM NaCl vs. No Treatment
  misc_feature: MA Experiment ID: 20000437 Result: Down-regulated in Transcription
  misc_feature: MA Experiment 20000437 PARAMETER Experiment Name: At_Drought_P Parameter: Age (day) Value: 8
  misc_feature: MA Experiment 20000437 PARAMETER Experiment Name: At_Drought_P Parameter: Organism Value: A. thaliana
  misc_feature: MA Experiment 20000437 PARAMETER Experiment Name: At_Drought_P Parameter: Plant Line Value: WS
  misc_feature: MA Experiment 20000437 PARAMETER Experiment Name: At_Drought_P Parameter: Timepoint (hr) Value: 24
  misc_feature: MA Experiment 20000437 PARAMETER Experiment Name: At_Drought_P Parameter: Tissue Value: Whole Plant
  misc_feature: MA Experiment 20000437 PARAMETER Experiment Name: At_Drought_P Parameter: Treatment Value: Drought vs. No Drought
  misc_feature: MA Experiment ID: 20000438 Result: Up-regulated in Transcription
  misc_feature: MA Experiment 20000438 PARAMETER Experiment Name: At_Shoots__P Parameter: Age (day) Value: 14
  misc_feature: MA Experiment 20000438 PARAMETER Experiment Name: At_Shoots__P Parameter: Tissue Value: Shoots vs. Whole Plant
  misc_feature: MA Experiment ID: 20000439 Result: Down-regulated in Transcription
  misc_feature: MA Experiment 20000439 PARAMETER Experiment Name: At_Roots__P Parameter: Age (day) Value: 14 vs. 21
  misc_feature: MA Experiment 20000439 PARAMETER Experiment Name: At_Roots__P Parameter: Organism Value: A. thaliana
  misc_feature: MA Experiment 20000439 PARAMETER Experiment Name: At_Roots__P Parameter: Tissue Value: Roots vs. Whole Plant
  misc_feature: MA Experiment ID: 20001247 Result: Up-regulated in Transcription
  misc_feature: MA Experiment 20001247 PARAMETER Experiment Name: At_Far-red-induction_P Parameter: Age (day) Value: 7
  misc_feature: MA Experiment 20001247 PARAMETER Experiment Name: At_Far-red-induction_P Parameter: Light Value: Far-red vs. White
  misc_feature: MA Experiment 20001247 PARAMETER Experiment Name: At_Far-red-induction_P Parameter: Organism Value: A. thaliana
  misc_feature: MA Experiment 20001247 PARAMETER Experiment Name: At_Far-red-induction_P Parameter: Plant Line Value: Columbia
  misc_feature: MA Experiment 20001247 PARAMETER Experiment Name: At_Far-red-induction_P Parameter: Timepoint (hr) Value: 1
  misc_feature: MA Experiment 20001247 PARAMETER Experiment Name: At_Far-red-induction_P Parameter: Tissue Value: Whole Plant
  misc_feature: MA Experiment ID: 20001248 Result: Up-regulated in Transcription
  misc_feature: MA Experiment 20001248 PARAMETER Experiment Name: At_Far-red-induction_P Parameter: Age (day) Value: 7
  misc_feature: MA Experiment 20001248 PARAMETER Experiment Name: At_Far-red-induction_P Parameter: Light Value: Far-red vs. White
  misc_feature: MA Experiment 20001248 PARAMETER Experiment Name: At_Far-red-induction_P Parameter: Organism Value: A. thaliana
  misc_feature: MA Experiment 20001248 PARAMETER Experiment Name: At_Far-red-induction_P Parameter: Plant Line Value: Columbia
  misc_feature: MA Experiment 20001248 PARAMETER Experiment Name: At_Far-red-induction_P Parameter: Timepoint (hr) Value: 4
  misc_feature: MA Experiment 20001248 PARAMETER Experiment Name: At_Far-red-induction_P Parameter: Tissue Value: Whole Plant
  misc_feature: MA Experiment ID: 20001450 Result: Up-regulated in Transcription
  misc_feature: MA Experiment 20001450 PARAMETER Experiment Name: At_Far-red-induction_P Parameter: Age (day) Value: 7
  misc_feature: MA Experiment 20001450 PARAMETER Experiment Name: At_Far-red-induction_P Parameter: Light Value: Far-red vs. White
  misc_feature: MA Experiment 20001450 PARAMETER Experiment Name: At_Far-red-induction_P Parameter: Organism Value: A. thaliana
  misc_feature: MA Experiment 20001450 PARAMETER Experiment Name: At_Far-red-induction_P Parameter: Plant Line Value: Columbia
  misc_feature: MA Experiment 20001450 PARAMETER Experiment Name: At_Far-red-induction_P Parameter: Timepoint (hr) Value: 8
  misc_feature: MA Experiment 20001450 PARAMETER Experiment Name: At_Far-red-induction_P Parameter: Tissue Value: Whole Plant
  misc_feature: MA Experiment ID: 20001554 Result: Down-regulated in Transcription
  misc_feature: MA Experiment 20001554 PARAMETER Experiment Name: At_Drought_Soil_Dry_P Parameter: Age (day) Value: 21
  misc_feature: MA Experiment 20001554 PARAMETER Experiment Name: At_Drought_Soil_Dry_P Parameter: Organism Value: A. thaliana
  misc_feature: MA Experiment 20001554 PARAMETER Experiment Name: At_Drought_Soil_Dry_P Parameter: Plant Line Value: WS
  misc_feature: MA Experiment 20001554 PARAMETER Experiment Name: At_Drought_Soil_Dry_P Parameter: Post Timepoint (hr) Value: None
  misc_feature: MA Experiment 20001554 PARAMETER Experiment Name: At_Drought_Soil_Dry_P Parameter: Post-Treatment Value: None
  misc_feature: MA Experiment 20001554 PARAMETER Experiment Name: At_Drought_Soil_Dry_P Parameter: Timepoint (day) Value: 7
  misc_feature: MA Experiment 20001554 PARAMETER Experiment Name: At_Drought_Soil_Dry_P Parameter: Treatment Value: Drought vs. No Drought
  misc_feature: MA Experiment ID: 20001555 Result: Down-regulated in Transcription
  misc_feature: MA Experiment 20001555 PARAMETER Experiment Name: At_Drought_Soil_Dry_P Parameter: Age (day) Value: 24
  misc_feature: MA Experiment 20001555 PARAMETER Experiment Name: At_Drought_Soil_Dry_P Parameter: Organism Value: A. thaliana
  misc_feature: MA Experiment 20001555 PARAMETER Experiment Name: At_Drought_Soil_Dry_P Parameter: Plant Line Value: WS
  misc_feature: MA Experiment 20001555 PARAMETER Experiment Name: At_Drought_Soil_Dry_P Parameter: Post Timepoint (hr) Value: None
  misc_feature: MA Experiment 20001555 PARAMETER Experiment Name: At_Drought_Soil_Dry_P Parameter: Post-Treatment Value: None
  misc_feature: MA Experiment 20001555 PARAMETER Experiment Name: At_Drought_Soil_Dry_P Parameter: Timepoint (day) Value: 10
  misc_feature: MA Experiment 20001555 PARAMETER Experiment Name: At_Drought_Soil_Dry_P Parameter: Treatment Value: Drought vs. No Drought
  misc_feature: MA Experiment ID: 20001769 Result: Up-regulated in Transcription
  misc_feature: MA Experiment 20001769 PARAMETER Experiment Name: At_Far-red-enriched-adult_P Parameter: Age (day) Value: 28
  misc_feature: MA Experiment 20001769 PARAMETER Experiment Name: At_Far-red-enriched-adult_P Parameter: Light Value: Far-red enriched vs. White
  misc_feature: MA Experiment 20001769 PARAMETER Experiment Name: At_Far-red-enriched-adult_P Parameter: Organism Value: A. thaliana
  misc_feature: MA Experiment 20001769 PARAMETER Experiment Name: At_Far-red-enriched-adult_P Parameter: Plant Line Value: Columbia
  misc_feature: MA Experiment 20001769 PARAMETER Experiment Name: At_Far-red-enriched-adult_P Parameter: Timepoint (hr) Value: 4
  misc_feature: MA Experiment 20001769 PARAMETER Experiment Name: At_Far-red-enriched-adult_P Parameter: Tissue Value: Aerial
  misc_feature: MA Experiment ID: 20001770 Result: Up-regulated in Transcription
  misc_feature: MA Experiment 20001770 PARAMETER Experiment Name: At_Far-red-enriched-adult_P Parameter: Age (day) Value: 28
  misc_feature: MA Experiment 20001770 PARAMETER Experiment Name: At_Far-red-enriched-adult_P Parameter: Light Value: Far-red enriched vs. White
  misc_feature: MA Experiment 20001770 PARAMETER Experiment Name: At_Far-red-enriched-adult_P Parameter: Organism Value: A. thaliana
  misc_feature: MA Experiment 20001770 PARAMETER Experiment Name: At_Far-red-enriched-adult_P Parameter: Plant Line Value: Columbia
  misc_feature: MA Experiment 20001770 PARAMETER Experiment Name: At_Far-red-enriched-adult_P Parameter: Timepoint (hr) Value: 8
  misc_feature: MA Experiment 20001770 PARAMETER Experiment Name: At_Far-red-enriched-adult_P Parameter: Tissue Value: Aerial
  misc_feature: MA Experiment ID: 20001906 Result: Down-regulated in Transcription
  misc_feature: MA Experiment 20001906 PARAMETER Experiment Name: At_Drought_Reproduction_P Parameter: Age (day) Value: 35
  misc_feature: MA Experiment 20001906 PARAMETER Experiment Name: At_Drought_Reproduction_P Parameter: Organism Value: A. thaliana
  misc_feature: MA Experiment 20001906 PARAMETER Experiment Name: At_Drought_Reproduction_P Parameter: Plant Line Value: WS
  misc_feature: MA Experiment 20001906 PARAMETER Experiment Name: At_Drought_Reproduction_P Parameter: Timepoint (day) Value: 5
  misc_feature: MA Experiment 20001906 PARAMETER Experiment Name: At_Drought_Reproduction_P Parameter: Tissue Value: Siliques
  misc_feature: MA Experiment 20001906 PARAMETER Experiment Name: At_Drought_Reproduction_P Parameter: Treatment Value: Drought vs. No Drought
  misc_feature: MA Experiment ID: 20001911 Result: Down-regulated in Transcription
  misc_feature: MA Experiment 20001911 PARAMETER Experiment Name: At_Drought_Reproduction_P Parameter: Age (day) Value: 40
  misc_feature: MA Experiment 20001911 PARAMETER Experiment Name: At_Drought_Reproduction_P Parameter: Organism Value: A. thaliana
  misc_feature: MA Experiment 20001911 PARAMETER Experiment Name: At_Drought_Reproduction_P Parameter: Plant Line Value: WS
  misc_feature: MA Experiment 20001911 PARAMETER Experiment Name: At_Drought_Reproduction_P Parameter: Timepoint (day) Value: 10
  misc_feature: MA Experiment 20001911 PARAMETER Experiment Name: At_Drought_Reproduction_P Parameter: Tissue Value: Flowers
  misc_feature: MA Experiment 20001911 PARAMETER Experiment Name: At_Drought_Reproduction_P Parameter: Treatment Value: Drought vs. No Drought
aaatcttcttcttcctctcttgtctctctcgctctctctcttctacattgtttcttgaggtcaatccattaaaaatgggattatattcactaatcacaggaagaaaaggaccaagtggatttggttcagcttcaacagctgaagaggttactcaagggattgatgcaactaatctcactgcaattatcacaagagggacaggaggaatagggatggagacagcgagagtgctgtcgaagagaggtgctcatgtggtgatcggtgcccgaaacatgggagctgcagaaaacgccaaaacagagattctcagacaaaacgcaaacgcacgtgtcactcttcttcaattagatctctcttccatcaaatccatcaaagcctttgttcgtgaatttcatgccctccatcttcctctcaatctcctcataaacaatgcaggagtaatgttctgtccataccaactctctgaagatggaatcgaattgcagtttgctacaaatcacattggtcactttctgttgacaaacttgctcttggacacaatgaagaacacagctaaaaccagtggtgttgaaggaagaattttgaatgtatcatctgtagctcatatctatacttaccaagaaggaatccaattcgacagcatcaatgacatttgcagttactcggataagcgagcttacggacaatcgaaactagccaatatattgcatgctaatgagctctcccgtcagcttcaggaagaaggagtaaacataacagcaaattcagttcaccctggtcttattctcaccaatctcttccaacacactgctcttttaatgaggttcttgaagttcttcagcttctacttgtggaaaaatatacctcagggagcagcaacaacatgttatgttgctctgcatccaagtgtgaagggagtaacaggaaagtactttgctgattgcaacgaagtcactccaagcaaacttgctagagatgagactttggcacagaaactctgggatttcagtgttaagctcattaactcggtttctaaaaagaactacctcggtttcgatgacaccacttgaatctctacggtgttcttgttgaatgttacctaaagagtgaaaaaaaagtaagaacaagtagagattgtgatgtttctttccacattatcgtatggtaactcatgagatgcattgttgtatgctc

SEQ ID NO: 36157 - protein, 355 aa, Arabidopsis thaliana
  peptide (1)..(355): Ceres Seq. ID no. 12337727
  misc_feature (33)..(344): Homolog of NCBI NO: 18416145 NR Description: putative protein
  misc_feature (33)..(344): Homolog of NCBI NO: 30686197 NR Description: short-chain dehydrogenase/reductase family
  misc_feature (33)..(342): Homolog of NCBI NO: 23297050 NR Description: unknown protein [Arabidopsis thaliana]
  misc_feature (25)..(345): Homolog of NCBI NO: 34895876 NR Description: P0009G03.18 [Oryza sativa (japonica
  misc_feature (27)..(355): Homolog of NCBI NO: 11250521 NR Description: hypothetical protein T22P11.130 - Arabidopsis
  misc_feature (25)..(345): Homolog of NCBI NO: 15224306 NR Description: putative oxidoreductase
  misc_feature (25)..(343): Homolog of NCBI NO: 629592 NR Description: hypothetical protein - rape
  misc_feature (25)..(355): Homolog of NCBI NO: 20260302 NR Description: putative protein [Arabidopsis thaliana]
  misc_feature (25)..(355): Homolog of NCBI NO: 18413950 NR Description: putative protein
  misc_feature (25)..(355): Homolog of NCBI NO: 21554820 NR Description: putativepod-specific dehydrogenase SAC25
IFFFLSCLSRSLSSTLFLEVNPLKMGLYSLITGRKGPSGFGSASTAEEVTQGIDATNLTAIITRGTGGIGMETARVLSKRGAHVVIGARNMGAAENAKTEILRQNANARVTLLQLDLSSIKSIKAFVREFHALHLPLNLLINNAGVMFCPYQLSEDGIELQFATNHIGHFLLTNLLLDTMKNTAKTSGVEGRILNVSSVAHIYTYQEGIQFDSINDICSYSDKRAYGQSKLANILHANELSRQLQEEGVNITANSVHPGLILTNLFQHTALLMRFLKFFSFYLWKNIPQGAATTCYVALHPSVKGVTGKYFADCNEVTPSKLARDETLAQKLWDFSVKLINSVSKKNYLGFDDTT

SEQ ID NO: 36158 - protein, 331 aa, Arabidopsis thaliana
  peptide (1)..(331): Ceres Seq. ID no. 12337728
  misc_feature (9)..(320): Homolog of NCBI NO: 18416145 NR Description: putative protein
  misc_feature (9)..(320): Homolog of NCBI NO: 30686197 NR Description: short-chain dehydrogenase/reductase family
  misc_feature (9)..(318): Homolog of NCBI NO: 23297050 NR Description: unknown protein [Arabidopsis thaliana]
  misc_feature (1)..(321): Homolog of NCBI NO: 34895876 NR Description: P0009G03.18 [Oryza sativa (japonica
  misc_feature (3)..(331): Homolog of NCBI NO: 11250521 NR Description: hypothetical protein T22P11.130 - Arabidopsis
  misc_feature (1)..(321): Homolog of NCBI NO: 15224306 NR Description: putative oxidoreductase
  misc_feature (1)..(319): Homolog of NCBI NO: 629592 NR Description: hypothetical protein - rape
  misc_feature (1)..(331): Homolog of NCBI NO: 20260302 NR Description: putative protein [Arabidopsis thaliana]
  misc_feature (1)..(331): Homolog of NCBI NO: 18413950 NR Description: putative protein
  misc_feature (1)..(331): Homolog of NCBI NO: 21554820 NR Description: putativepod-specific dehydrogenase SAC25
MGLYSLITGRKGPSGFGSASTAEEVTQGIDATNLTAIITRGTGGIGMETARVLSKRGAHVVIGARNMGAAENAKTEILRQNANARVTLLQLDLSSIKSIKAFVREFHALHLPLNLLINNAGVMFCPYQLSEDGIELQFATNHIGHFLLTNLLLDTMKNTAKTSGVEGRILNVSSVAHIYTYQEGIQFDSINDICSYSDKRAYGQSKLANILHANELSRQLQEEGVNITANSVHPGLILTNLFQHTALLMRFLKFFSFYLWKNIPQGAATTCYVALHPSVKGVTGKYFADCNEVTPSKLARDETLAQKLWDFSVKLINSVSKKNYLGFDDTT

SEQ ID NO: 36159 - protein, 285 aa, Arabidopsis thaliana
  peptide (1)..(285): Ceres Seq. ID no. 12337729
  misc_feature (1)..(274): Homolog of NCBI NO: 18416145 NR Description: putative protein
  misc_feature (1)..(274): Homolog of NCBI NO: 30686197 NR Description: short-chain dehydrogenase/reductase family
  misc_feature (1)..(272): Homolog of NCBI NO: 23297050 NR Description: unknown protein [Arabidopsis thaliana]
  misc_feature (1)..(275): Homolog of NCBI NO: 34895876 NR Description: P0009G03.18 [Oryza sativa (japonica
  misc_feature (1)..(285): Homolog of NCBI NO: 11250521 NR Description: hypothetical protein T22P11.130 - Arabidopsis
  misc_feature (1)..(275): Homolog of NCBI NO: 15224306 NR Description: putative oxidoreductase
  misc_feature (1)..(273): Homolog of NCBI NO: 629592 NR Description: hypothetical protein - rape
  misc_feature (1)..(285): Homolog of NCBI NO: 20260302 NR Description: putative protein [Arabidopsis thaliana]
  misc_feature (1)..(285): Homolog of NCBI NO: 18413950 NR Description: putative protein
  misc_feature (1)..(285): Homolog of NCBI NO: 21554820 NR Description: putativepod-specific dehydrogenase SAC25
METARVLSKRGAHVVIGARNMGAAENAKTEILRQNANARVTLLQLDLSSIKSIKAFVREFHALHLPLNLLINNAGVMFCPYQLSEDGIELQFATNHIGHFLLTNLLLDTMKNTAKTSGVEGRILNVSSVAHIYTYQEGIQFDSINDICSYSDKRAYGQSKLANILHANELSRQLQEEGVNITANSVHPGLILTNLFQHTALLMRFLKFFSFYLWKNIPQGAATTCYVALHPSVKGVTGKYFADCNEVTPSKLARDETLAQKLWDFSVKLINSVSKKNYLGFDDTT

SEQ ID NO: 36160 - DNA, 720 bp, Arabidopsis thaliana
  misc_feature (1)..(720): Ceres Seq. ID no. 12334547
  misc_feature: MA Experiment ID: 108462 Result: Up-regulated in Transcription
  misc_feature: MA Experiment 108462 PARAMETER Experiment Name: At_Germinating_Seeds_cDNA_P Parameter: Age (day) Value: 2 vs. 0
  misc_feature: MA Experiment 108462 PARAMETER Experiment Name: At_Germinating_Seeds_cDNA_P Parameter: Tissue Value: Germinating Seeds
  misc_feature: MA Experiment ID: 108464 Result: Up-regulated in Transcription
  misc_feature: MA Experiment 108464 PARAMETER Experiment Name: At_Germinating_Seeds_cDNA_P Parameter: Age (day) Value: 4 vs. 0
  misc_feature: MA Experiment 108464 PARAMETER Experiment Name: At_Germinating_Seeds_cDNA_P Parameter: Tissue Value: Germinating Seeds
  misc_feature: MA Experiment ID: 108594 Result: Down-regulated in Transcription
  misc_feature: MA Experiment 108594 PARAMETER Experiment Name: At_Ler-rhl_Root_cDNA_P Parameter: Plant Line Value: null
  misc_feature: MA Experiment ID: 108607 Result: Up-regulated in Transcription
  misc_feature: MA Experiment 108607 PARAMETER Experiment Name: At_100uM_ABA_cDNA_P Parameter: Timepoint (hr) Value: 4
  misc_feature: MA Experiment 108607 PARAMETER Experiment Name: At_100uM_ABA_cDNA_P Parameter: Tissue Value: Aerial
  misc_feature: MA Experiment 108607 PARAMETER Experiment Name: At_100uM_ABA_cDNA_P Parameter: Treatment Value: 100uM ABA vs. No Treatment
  misc_feature: MA Experiment ID: 20000070 Result: Up-regulated in Transcription
  misc_feature: MA Experiment 20000070 PARAMETER Experiment Name: At_100uM_ABA_Mutants_cDNA_P Parameter: Plant Line Value: CS24
  misc_feature: MA Experiment 20000070 PARAMETER Experiment Name: At_100uM_ABA_Mutants_cDNA_P Parameter: Timepoint (hr) Value: 6
  misc_feature: MA Experiment 20000070 PARAMETER Experiment Name: At_100uM_ABA_Mutants_cDNA_P Parameter: Tissue Value: Aerial
  misc_feature: MA Experiment 20000070 PARAMETER Experiment Name: At_100uM_ABA_Mutants_cDNA_P Parameter: Treatment Value: 100uM ABA vs. No Treatment
  misc_feature: MA Experiment ID: 20000071 Result: Up-regulated in Transcription
  misc_feature: MA Experiment 20000071 PARAMETER Experiment Name: At_100uM_ABA_Mutants_cDNA_P Parameter: Plant Line Value: CS8104
  misc_feature: MA Experiment 20000071 PARAMETER Experiment Name: At_100uM_ABA_Mutants_cDNA_P Parameter: Timepoint (hr) Value: 6
  misc_feature: MA Experiment 20000071 PARAMETER Experiment Name: At_100uM_ABA_Mutants_cDNA_P Parameter: Tissue Value: Aerial
  misc_feature: MA Experiment 20000071 PARAMETER Experiment Name: At_100uM_ABA_Mutants_cDNA_P Parameter: Treatment Value: 100uM ABA vs. No Treatment
  misc_feature: MA Experiment ID: 20000072 Result: Up-regulated in Transcription
  misc_feature: MA Experiment 20000072 PARAMETER Experiment Name: At_100uM_ABA_Mutants_cDNA_P Parameter: Plant Line Value: CS8105
  misc_feature: MA Experiment 20000072 PARAMETER Experiment Name: At_100uM_ABA_Mutants_cDNA_P Parameter: Timepoint (hr) Value: 6
  misc_feature: MA Experiment 20000072 PARAMETER Experiment Name: At_100uM_ABA_Mutants_cDNA_P Parameter: Tissue Value: Aerial
  misc_feature: MA Experiment 20000072 PARAMETER Experiment Name: At_100uM_ABA_Mutants_cDNA_P Parameter: Treatment Value: 100uM ABA vs. No Treatment
  misc_feature: MA Experiment ID: 20000087 Result: Up-regulated in Transcription
  misc_feature: MA Experiment 20000087 PARAMETER Experiment Name: At_100uM_ABA_Mutants_cDNA_P Parameter: Plant Line Value: WS
  misc_feature: MA Experiment 20000087 PARAMETER Experiment Name: At_100uM_ABA_Mutants_cDNA_P Parameter: Timepoint (hr) Value: 6
  misc_feature: MA Experiment 20000087 PARAMETER Experiment Name: At_100uM_ABA_Mutants_cDNA_P Parameter: Tissue Value: Aerial
  misc_feature: MA Experiment 20000087 PARAMETER Experiment Name: At_100uM_ABA_Mutants_cDNA_P Parameter: Treatment Value: 100uM ABA vs. No Treatment
  misc_feature: MA Experiment ID: 20000088 Result: Up-regulated in Transcription
  misc_feature: MA Experiment 20000088 PARAMETER Experiment Name: At_100uM_ABA_Mutants_cDNA_P Parameter: Plant Line Value: Landsberg
  misc_feature: MA Experiment 20000088 PARAMETER Experiment Name: At_100uM_ABA_Mutants_cDNA_P Parameter: Timepoint (hr) Value: 6
  misc_feature: MA Experiment 20000088 PARAMETER Experiment Name: At_100uM_ABA_Mutants_cDNA_P Parameter: Tissue Value: Aerial
  misc_feature: MA Experiment 20000088 PARAMETER Experiment Name: At_100uM_ABA_Mutants_cDNA_P Parameter: Treatment Value: 100uM ABA vs. No Treatment
  misc_feature: MA Experiment ID: 20000090 Result: Up-regulated in Transcription
  misc_feature: MA Experiment ID: 20000184 Result: Down-regulated in Transcription
  misc_feature: MA Experiment 20000184 PARAMETER Experiment Name: At_Shoots__P Parameter: Age (day) Value: 7
  misc_feature: MA Experiment 20000184 PARAMETER Experiment Name: At_Shoots__P Parameter: Tissue Value: Shoots vs. Whole Plant
  misc_feature: MA Experiment ID: 20000185 Result: Up-regulated in Transcription
  misc_feature: MA Experiment 20000185 PARAMETER Experiment Name: At_Roots__P Parameter: Age (day) Value: 7 vs. 21
  misc_feature: MA Experiment 20000185 PARAMETER Experiment Name: At_Roots__P Parameter: Organism Value: A. thaliana
  misc_feature: MA Experiment 20000185 PARAMETER Experiment Name: At_Roots__P Parameter: Tissue Value: Roots vs. Whole Plant
  misc_feature: MA Experiment ID: 20000227 Result: Down-regulated in Transcription
  misc_feature: MA Experiment 20000227 PARAMETER Experiment Name: At_Root-Tips-vs-Tops_P Parameter: Tissue Value: Root Tips vs. Root Tops
  misc_feature: MA Experiment ID: 20000264 Result: Down-regulated in Transcription
  misc_feature: MA Experiment 20000264 PARAMETER Experiment Name: At_Open_Flower_P Parameter: Age (day) Value: 21
  misc_feature: MA Experiment 20000264 PARAMETER Experiment Name: At_Open_Flower_P Parameter: Plant Line Value: WS
  misc_feature: MA Experiment 20000264 PARAMETER Experiment Name: At_Open_Flower_P Parameter: Tissue Value: Open Flower vs. Whole Plant
  misc_feature: MA Experiment ID: 20000438 Result: Down-regulated in Transcription
  misc_feature: MA Experiment 20000438 PARAMETER Experiment Name: At_Shoots__P Parameter: Age (day) Value: 14
  misc_feature: MA Experiment 20000438 PARAMETER Experiment Name: At_Shoots__P Parameter: Tissue Value: Shoots vs. Whole Plant
  misc_feature: MA Experiment ID: 20000439 Result: Up-regulated in Transcription
  misc_feature: MA Experiment 20000439 PARAMETER Experiment Name: At_Roots__P Parameter: Age (day) Value: 14 vs. 21
  misc_feature: MA Experiment 20000439 PARAMETER Experiment Name: At_Roots__P Parameter: Organism Value: A. thaliana
  misc_feature: MA Experiment 20000439 PARAMETER Experiment Name: At_Roots__P Parameter: Tissue Value: Roots vs. Whole Plant
  misc_feature: MA Experiment ID: 20000453 Result: Up-regulated in Transcription
  misc_feature: MA Experiment 20000453 PARAMETER Experiment Name: At_100uM_ABA_P Parameter: Age (day) Value: 15
  misc_feature: MA Experiment 20000453 PARAMETER Experiment Name: At_100uM_ABA_P Parameter: Organism Value: A. thaliana
  misc_feature: MA Experiment 20000453 PARAMETER Experiment Name: At_100uM_ABA_P Parameter: Plant Line Value: WS
  misc_feature: MA Experiment 20000453 PARAMETER Experiment Name: At_100uM_ABA_P Parameter: Timepoint (hr) Value: 24
  misc_feature: MA Experiment 20000453 PARAMETER Experiment Name: At_100uM_ABA_P Parameter: Tissue Value: Aerial
  misc_feature: MA Experiment 20000453 PARAMETER Experiment Name: At_100uM_ABA_P Parameter: Treatment Value: 100uM ABA vs. No Treatment
  misc_feature: MA Experiment ID: 20000496 Result: Down-regulated in Transcription
  misc_feature: MA Experiment 20000496 PARAMETER Experiment Name: At_Guard_Cells_P Parameter: Harvest Date Value: 7/19/2002
  misc_feature: MA Experiment 20000496 PARAMETER Experiment Name: At_Guard_Cells_P Parameter: Organism Value: Canola
  misc_feature: MA Experiment 20000496 PARAMETER Experiment Name: At_Guard_Cells_P Parameter: Tissue Value: Guard Cells vs. Leaves
  misc_feature: MA Experiment ID: 20000527 Result: Down-regulated in Transcription
  misc_feature: MA Experiment 20000527 PARAMETER Experiment Name: At_10percent_PEG_P Parameter: Age (day) Value: 20
  misc_feature: MA Experiment 20000527 PARAMETER Experiment Name: At_10percent_PEG_P Parameter: Organism Value: A. thaliana
  misc_feature: MA Experiment 20000527 PARAMETER Experiment Name: At_10percent_PEG_P Parameter: Plant Line Value: WS
  misc_feature: MA Experiment 20000527 PARAMETER Experiment Name: At_10percent_PEG_P Parameter: Timepoint (day) Value: 20
  misc_feature: MA Experiment 20000527 PARAMETER Experiment Name: At_10percent_PEG_P Parameter: Tissue Value: Whole Plant
  misc_feature: MA Experiment 20000527 PARAMETER Experiment Name: At_10percent_PEG_P Parameter: Treatment Value: 10percent PEG vs. No Treatment
  misc_feature: MA Experiment ID: 20000709 Result: Up-regulated in Transcription
  misc_feature: MA Experiment 20000709 PARAMETER Experiment Name: At_15mM_NH4NO3_L-to-H_P Parameter: Age (hr) Value: 14
  misc_feature: MA Experiment 20000709 PARAMETER Experiment Name: At_15mM_NH4NO3_L-to-H_P Parameter: Organism Value: A. thaliana
  misc_feature: MA Experiment 20000709 PARAMETER Experiment Name: At_15mM_NH4NO3_L-to-H_P Parameter: Plant Line Value: WS
  misc_feature: MA Experiment 20000709 PARAMETER Experiment Name: At_15mM_NH4NO3_L-to-H_P Parameter: Timepoint (hr) Value: 4
  misc_feature: MA Experiment 20000709 PARAMETER Experiment Name: At_15mM_NH4NO3_L-to-H_P Parameter: Tissue Value: Aerial
  misc_feature: MA Experiment 20000709 PARAMETER Experiment Name: At_15mM_NH4NO3_L-to-H_P Parameter: Treatment Value: 15mM NH4NO3 vs. 30mM Mannitol
  misc_feature: MA Experiment ID: 20001560 Result: Down-regulated in Transcription
  misc_feature: MA Experiment 20001560 PARAMETER Experiment Name: At_Drought_Soil_Dry_P Parameter: Age (day) Value: 28
  misc_feature: MA Experiment 20001560 PARAMETER Experiment Name: At_Drought_Soil_Dry_P Parameter: Organism Value: A. thaliana
  misc_feature: MA Experiment 20001560 PARAMETER Experiment Name: At_Drought_Soil_Dry_P Parameter: Plant Line Value: WS
  misc_feature: MA Experiment 20001560 PARAMETER Experiment Name: At_Drought_Soil_Dry_P Parameter: Post Timepoint (hr) Value: None
  misc_feature: MA Experiment 20001560 PARAMETER Experiment Name: At_Drought_Soil_Dry_P Parameter: Post-Treatment Value: None
  misc_feature: MA Experiment 20001560 PARAMETER Experiment Name: At_Drought_Soil_Dry_P Parameter: Timepoint (day) Value: 14
  misc_feature: MA Experiment 20001560 PARAMETER Experiment Name: At_Drought_Soil_Dry_P Parameter: Treatment Value: Drought vs. No Drought
  misc_feature: MA Experiment ID: 20001904 Result: Up-regulated in Transcription
  misc_feature: MA Experiment 20001904 PARAMETER Experiment Name: At_Drought_Reproduction_P Parameter: Age (day) Value: 37
  misc_feature: MA Experiment 20001904 PARAMETER Experiment Name: At_Drought_Reproduction_P Parameter: Organism Value: A. thaliana
  misc_feature: MA Experiment 20001904 PARAMETER Experiment Name: At_Drought_Reproduction_P Parameter: Plant Line Value: WS
  misc_feature: MA Experiment 20001904 PARAMETER Experiment Name: At_Drought_Reproduction_P Parameter: Timepoint (day) Value: 7
  misc_feature: MA Experiment 20001904 PARAMETER Experiment Name: At_Drought_Reproduction_P Parameter: Tissue Value: Rosettes
  misc_feature: MA Experiment 20001904 PARAMETER Experiment Name: At_Drought_Reproduction_P Parameter: Treatment Value: Drought vs. No Drought
  misc_feature: MA Experiment ID: 20001905 Result: Up-regulated in Transcription
  misc_feature: MA Experiment 20001905 PARAMETER Experiment Name: At_Drought_Reproduction_P Parameter: Age (day) Value: 40
  misc_feature: MA Experiment 20001905 PARAMETER Experiment Name: At_Drought_Reproduction_P Parameter: Organism Value: A. thaliana
  misc_feature: MA Experiment 20001905 PARAMETER Experiment Name: At_Drought_Reproduction_P Parameter: Plant Line Value: WS
  misc_feature: MA Experiment 20001905 PARAMETER Experiment Name: At_Drought_Reproduction_P Parameter: Timepoint (day) Value: 10
  misc_feature: MA Experiment 20001905 PARAMETER Experiment Name: At_Drought_Reproduction_P Parameter: Tissue Value: Rosettes
  misc_feature: MA Experiment 20001905 PARAMETER Experiment Name: At_Drought_Reproduction_P Parameter: Treatment Value: Drought vs. No Drought
  misc_feature: MA Experiment ID: 20001910 Result: Up-regulated in Transcription
  misc_feature: MA Experiment 20001910 PARAMETER Experiment Name: At_Drought_Reproduction_P Parameter: Age (day) Value: 37
  misc_feature: MA Experiment 20001910 PARAMETER Experiment Name: At_Drought_Reproduction_P Parameter: Organism Value: A. thaliana
  misc_feature: MA Experiment 20001910 PARAMETER Experiment Name: At_Drought_Reproduction_P Parameter: Plant Line Value: WS
  misc_feature: MA Experiment 20001910 PARAMETER Experiment Name: At_Drought_Reproduction_P Parameter: Timepoint (day) Value: 7
  misc_feature: MA Experiment 20001910 PARAMETER Experiment Name: At_Drought_Reproduction_P Parameter: Tissue Value: Flowers
  misc_feature: MA Experiment 20001910 PARAMETER Experiment Name: At_Drought_Reproduction_P Parameter: Treatment Value: Drought vs. No Drought
agtttagattctttatccgactactttgttcatcggttttgtttttctttttgtcttccggaaggcgaattacatgtcggaagcagcacagctcagaagaggtctaaagcctaaagggaagacttatgggttgaccaatcagaagagacgagagatcagagagatctttgatcttttcgacatagacggttcaggtagcatcgatgctagcgagctcaacgttgctatgaggtctcttggatttgagatgaataatcagcaaataaacgaattgatggcagaagtagataaaaaccaaagtggagccatagatttcgacgaatttgtgcatatgatgacaaccaaattcggagaacgagactccatagacgaattgtctaaggcgtttaagatcattgaccacgacaatagtgggaagatttcacctcgtgatataaagatgattgctaaagaattgggagaaaatttcacagataatgatatagaagaaatgatcgaagaagcagaccgtgacaaagatggagaagttaacttggaggagttcatgaagatgatgaagagaacctctttcggctaagtataaatcaattagtaatggttgtgaataatatttgttaatcaccttgatttataataataaagaagtttgatttgtggcttggtcgaataaaaatgtattgttgtataaaaataataatgtaattcacatccattattttg

SEQ ID NO: 36161 - protein, 167 aa, Arabidopsis thaliana
  peptide (1)..(167): Ceres Seq. ID no. 12334548
  misc_feature (63)..(91): Pfam Name: EF hand Pfam Description: EF hand
  misc_feature (1)..(165): Homolog of NCBI NO: 2920835 NR Description: centrin [Marsilea vestita]
  misc_feature (3)..(165): Homolog of NCBI NO: 543936 NR Description: CALTRACTIN (CENTRIN)
  misc_feature (6)..(167): Homolog of NCBI NO: 33146874 NR Description: putative caltractin [Oryza sativa (japonica
  misc_feature (1)..(167): Homolog of NCBI NO: 34906754 NR Description: putative caltractin [Oryza sativa (japonica
  misc_feature (1)..(167): Homolog of NCBI NO: 6358511 NR Description: centrin [Nicotiana tabacum]
  misc_feature (1)..(167): Homolog of NCBI NO: 6358509 NR Description: centrin [Nicotiana tabacum]
  misc_feature (12)..(167): Homolog of NCBI NO: 15229732 NR Description: centrin; protein id: At3g50360.1 [Arabidopsis
  misc_feature (1)..(166): Homolog of NCBI NO: 729051 NR Description: CALTRACTIN (CENTRIN)
  misc_feature (1)..(167): Homolog of NCBI NO: 15234588 NR Description: caltractin-like protein; protein id: At4g37010.1
  misc_feature (1)..(167): Homolog of NCBI NO: 21554823 NR Description: caltractin-like protein [Arabidopsis thaliana]
MSEAAQLRRGLKPKGKTYGLTNQKRREIREIFDLFDIDGSGSIDASELNVAMRSLGFEMNNQQINELMAEVDKNQSGAIDFDEFVHMMTTKFGERDSIDELSKAFKIIDHDNSGKISPRDIKMIAKELGENFTDNDIEEMIEEADRDKDGEVNLEEFMKMMKRTSFG

SEQ ID NO: 36162 - protein, 116 aa, Arabidopsis thaliana
  peptide (1)..(116): Ceres Seq. ID no. 12334549
  misc_feature (12)..(40): Pfam Name: EF hand Pfam Description: EF hand
  misc_feature (1)..(114): Homolog of NCBI NO: 2920835 NR Description: centrin [Marsilea vestita]
  misc_feature (1)..(114): Homolog of NCBI NO: 543936 NR Description: CALTRACTIN (CENTRIN)
  misc_feature (1)..(116): Homolog of NCBI NO: 33146874 NR Description: putative caltractin [Oryza sativa (japonica
  misc_feature (1)..(116): Homolog of NCBI NO: 34906754 NR Description: putative caltractin [Oryza sativa (japonica
  misc_feature (1)..(116): Homolog of NCBI NO: 6358511 NR Description: centrin [Nicotiana tabacum]
  misc_feature (1)..(116): Homolog of NCBI NO: 6358509 NR Description: centrin [Nicotiana tabacum]
  misc_feature (1)..(116): Homolog of NCBI NO: 15229732 NR Description: centrin; protein id: At3g50360.1 [Arabidopsis
  misc_feature (1)..(115): Homolog of NCBI NO: 729051 NR Description: CALTRACTIN (CENTRIN)
  misc_feature (1)..(116): Homolog of NCBI NO: 15234588 NR Description: caltractin-like protein; protein id: At4g37010.1
  misc_feature (1)..(116): Homolog of NCBI NO: 21554823 NR Description: caltractin-like protein [Arabidopsis thaliana]
MRSLGFEMNNQQINELMAEVDKNQSGAIDFDEFVHMMTTKFGERDSIDELSKAFKIIDHDNSGKISPRDIKMIAKELGENFTDNDIEEMIEEADRDKDGEVNLEEFMKMMKRTSFG

SEQ ID NO: 36163 - protein, 109 aa, Arabidopsis thaliana
  peptide (1)..(109): Ceres Seq. ID no. 12334550
  misc_feature (5)..(33): Pfam Name: EF hand Pfam Description: EF hand
  misc_feature (1)..(107): Homolog of NCBI NO: 2920835 NR Description: centrin [Marsilea vestita]
  misc_feature (1)..(107): Homolog of NCBI NO: 543936 NR Description: CALTRACTIN (CENTRIN)
  misc_feature (1)..(109): Homolog of NCBI NO: 33146874 NR Description: putative caltractin [Oryza sativa (japonica
  misc_feature (1)..(109): Homolog of NCBI NO: 34906754 NR Description: putative caltractin [Oryza sativa (japonica
  misc_feature (1)..(109): Homolog of NCBI NO: 6358511 NR Description: centrin [Nicotiana tabacum]
  misc_feature (1)..(109): Homolog of NCBI NO: 6358509 NR Description: centrin [Nicotiana tabacum]
  misc_feature (1)..(109): Homolog of NCBI NO: 15229732 NR Description: centrin; protein id: At3g50360.1 [Arabidopsis
  misc_feature (1)..(108): Homolog of NCBI NO: 729051 NR Description: CALTRACTIN (CENTRIN)
  misc_feature (1)..(109): Homolog of NCBI NO: 15234588 NR Description: caltractin-like protein; protein id: At4g37010.1
  misc_feature (1)..(109): Homolog of NCBI NO: 21554823 NR Description: caltractin-like protein [Arabidopsis thaliana]
MNNQQINELMAEVDKNQSGAIDFDEFVHMMTTKFGERDSIDELSKAFKIIDHDNSGKISPRDIKMIAKELGENFTDNDIEEMIEEADRDKDGEVNLEEFMKMMKRTSFG

SEQ ID NO: 36164 - DNA, 2758 bp, Arabidopsis thaliana
  misc_feature (1)..(2758): Ceres Seq. ID no. 13497291
  misc_feature: MA Experiment ID: 108434 Result: Up-regulated in Transcription
  misc_feature: MA Experiment 108434 PARAMETER Experiment Name: At_Root_Tips_cDNA_P Parameter: Tissue Value: Root Tips
  misc_feature: MA Experiment ID: 108462 Result: Down-regulated in Transcription
  misc_feature: MA Experiment 108462 PARAMETER Experiment Name: At_Germinating_Seeds_cDNA_P Parameter: Age (day) Value: 2 vs. 0
  misc_feature: MA Experiment 108462 PARAMETER Experiment Name: At_Germinating_Seeds_cDNA_P Parameter: Tissue Value: Germinating Seeds
  misc_feature: MA Experiment ID: 108463 Result: Down-regulated in Transcription
  misc_feature: MA Experiment 108463 PARAMETER Experiment Name: At_Germinating_Seeds_cDNA_P Parameter: Age (day) Value: 3 vs. 0
  misc_feature: MA Experiment 108463 PARAMETER Experiment Name: At_Germinating_Seeds_cDNA_P Parameter: Tissue Value: Germinating Seeds
  misc_feature: MA Experiment ID: 108595 Result: Down-regulated in Transcription
  misc_feature: MA Experiment 108595 PARAMETER Experiment Name: At_Ler-pi_Ovule_cDNA_P Parameter: Plant Line Value: null
  misc_feature: MA Experiment ID: 20000087 Result: Down-regulated in Transcription
  misc_feature: MA Experiment 20000087 PARAMETER Experiment Name: At_100uM_ABA_Mutants_cDNA_P Parameter: Plant Line Value: WS
  misc_feature: MA Experiment 20000087 PARAMETER Experiment Name: At_100uM_ABA_Mutants_cDNA_P Parameter: Timepoint (hr) Value: 6
  misc_feature: MA Experiment 20000087 PARAMETER Experiment Name: At_100uM_ABA_Mutants_cDNA_P Parameter: Tissue Value: Aerial
  misc_feature: MA Experiment 20000087 PARAMETER Experiment Name: At_100uM_ABA_Mutants_cDNA_P Parameter: Treatment Value: 100uM ABA vs. No Treatment
  misc_feature: MA Experiment ID: 20000117 Result: Down-regulated in Transcription
  misc_feature: MA Experiment 20000117 PARAMETER Experiment Name: At_100uM_ABA_Mutants_cDNA_P Parameter: Plant Line Value: Columbia
  misc_feature: MA Experiment 20000117 PARAMETER Experiment Name: At_100uM_ABA_Mutants_cDNA_P Parameter: Timepoint (hr) Value: 6
  misc_feature: MA Experiment 20000117 PARAMETER Experiment Name: At_100uM_ABA_Mutants_cDNA_P Parameter: Tissue Value: Aerial
  misc_feature: MA Experiment 20000117 PARAMETER Experiment Name: At_100uM_ABA_Mutants_cDNA_P Parameter: Treatment Value: 100uM ABA vs. No Treatment
acagcctcacttccaaacccttcgtttacagcaaaaaatcgaaaatggttgcctcagccgccgcacgacctcttgtcaccgtccaaggacttgacggtgacatgagcaccgatcaatccaccaccgtcactttaccagacgtcatgactgctccagttcgacctgacattgtcaacttcgtccacgcccaaatctccaacaacagccgtcagccttacgcagtctccaaaaaggccggtcaccaaacctccgccgagtcctggggaaccggaagagccgtgtcacgtatccctcgtgttcctggtggtggaactcaccgtgccggtcaagcagcgttcggaaacatgtgtcgtggtggtcgtatgtttgctccgactaagatctggagacgctggcaccgtcgtgtcaatgtcaacatgaagaggcacgcgattgtttctgcaatcgctgctactgctgttccagctcttgtgatggctcgtggtcacaagatcgagaatgttcctgagatgcctcttgttgttagcgactcagctgaagctgtggagaagacatcagctgcgatcaaggtattgaagcagatcggtgcttacgacgatgcggagaaagctaagaacagtattggaattcgtcctggtaaaggtaaaatgaggaatcgtcgttacatttctaggaaaggtcctcttgttgtgtttggaactgaaggagccaagattgtgaaagcttttaggaatcttcctggtgttgagctttgtcacgttgagaggcttaacttgttgaaattagcccctggtggtcaccttggtaggtttgtgatttggactaagtctgcttttgagaagcttgaatctatctatggctcgtttgagaaaccatcagagaagaagaagggttacgtcttgcctcgtgcgaagatggtgaatgctgatcttgctaggattattaactccgatgaggtacagagtgtggtgaacccgattaaggatggttccaagagagcggttctgaagaagaatccattgaagaaccttaatgtgatgttcaagttgaatccttatgctaagaccgcaaagagaatgtctctgttggctgaagcttcaagggttaaggctaagaaggagaagctcgagaagaagaggaaagtcgtcactaaggaggaggcccaagcgatcaaagcagcaggcaaggcttggtatcagactatgatttcagacagtgactacaccgagttcgataacttcaccaagtggcttggcgctagtcagtaatgatgctctcgtcatcgcaaagtctcttatatctaggcaaagattttggttttctgatttatgttcttcgtttgtattggatttatctgggattttatgttgttgagttggtaagacgatttttaagaactatgatggtgtttttcaaactcttttcaatctgtttccaaaaaaaaaaaaaaaactgacttccattgccaccacaacaaccaaaaccatatctcgccgccgccgtcgacgacgacgacacttgcttcaccaccgtatcgctatcaacagaggaaagagataagaagcgtgttaactctttcttctaattccatggatatttgtggcgttgattccgaaggaaaagagtttaatagcgtacaagagatgtggagagaagaaattggagaaggagacgaaactaaaaaaacccaatggtatagagatggtgtttcttattgggaaggtgttgaagcttctgttgatggagtattaggaggatatgggcatgtgaatgatgctgatattataggaagtgaggtttttcttaagactcttttgcaagaaagattagttaacaatgttggagctaatcagcatttagtagctcttgattgtggatctggtattggaagaatcactaaaaatcttctgattcgatactttaacgaggttgatcttcttgagcctgtagcacaatttttggatgcagctcgtgaaaatttggcatctgcaggctctgaaacgcacaaagctactaactttttctgtgtacctcttcaggagtttactccagctgctgggaggtatgatgtaatatgggttcaatggtgcattgggcatctcacggacaatgactttgtttctttctttaaccgcgcaaagggataccttaaacctggtgggtttttcgtcgtgaaagagaatctcgctaaaaatggatttgttttggataaagaggatcatagcatcaccagatcggatccatacttcaaacagctctttcgccaatgtgggttacatctctatagaacaaaggatcagaaaggtcttccacaagagttatttgctgtaaaaatgtatgcgttaacggttgacacaccacccaaaatccaccgaaccaggtcaaaaactcgaagcaacagaccgcagattatcaaatgacaaagcttccgattggtttactacggagtcttaatcgtttggtgtaaagagagaagctaccaaaggtgttgtaagatctggatcaaggcttggctgcttcattgtcacatggtttggttttgtgcatgctcgattctcctctcctccatcaccttaccaagtcataaactctcgtgtactcatgactaaacctgtttctgctccattctgttttttatctgataatttgtccggacttgaagaaattagaattgtgatccttttactgtagccacatattcctatatcatttttgtttaaaatatttaattgtactatatttcgatgttctacaagtc

SEQ ID NO: 36165 - protein, 421 aa, Arabidopsis thaliana
  peptide (1)..(421): Ceres Seq. ID no. 13497292
  misc_feature (40)..(284): Pfam Name: Ribosomal protein L4/L1 family Pfam Description: Ribosomal protein L4/L1 family
  misc_feature (40)..(284): Pfam Name: Ribosomal protein L4/L1 family Pfam Description: Ribosomal protein L4/L1 family
  misc_feature (20)..(386): Homolog of NCBI NO: 1350686 NR Description: 60S RIBOSOMAL PROTEIN L4 (L1)
  misc_feature (64)..(421): Homolog of NCBI NO: 6441068 NR Description: 60S ribosomal protein L4 [Chlamydomonas sp. HS-5]
  misc_feature (18)..(421): Homolog of NCBI NO: 34897236 NR Description: putative 60S ribosomal protein L1
  misc_feature (115)..(421): Homolog of NCBI NO: 13605831 NR Description: AT5g02870/F9G14_180 [Arabidopsis thaliana]
  misc_feature (22)..(421): Homolog of NCBI NO: 34393487 NR Description: putative 60S ribosomal protein L4/L1
  misc_feature (20)..(386): Homolog of NCBI NO: 1350686 NR Description: 60S RIBOSOMAL PROTEIN L4 (L1)
  misc_feature (18)..(421): Homolog of NCBI NO: 34897236 NR Description: putative 60S ribosomal protein L1
  misc_feature (22)..(421): Homolog of NCBI NO: 34393487 NR Description: putative 60S ribosomal protein L4/L1
  misc_feature (15)..(421): Homolog of NCBI NO: 15242558 NR Description: 60S ribosomal protein L4/L1 (RPL4D) [Arabidopsis
  misc_feature (15)..(421): Homolog of NCBI NO: 26450328 NR Description: putative 60S ribosomal protein [Arabidopsis
  misc_feature (16)..(421): Homolog of NCBI NO: 15232723 NR Description: 60S ribosomal protein L4/L1 (RPL4A) [Arabidopsis
  misc_feature (16)..(421): Homolog of NCBI NO: 21593543 NR Description: 60S ribosomal protein L4-B (L1) [Arabidopsis
  misc_feature (17)..(421): Homolog of NCBI NO: 17367847 NR Description: 60S ribosomal protein L4 (L1)
  misc_feature (115)..(421): Homolog of NCBI NO: 13605831 NR Description: AT5g02870/F9G14_180 [Arabidopsis thaliana]
  misc_feature (64)..(421): Homolog of NCBI NO: 6441068 NR Description: 60S ribosomal protein L4 [Chlamydomonas sp. HS-5]
  misc_feature (17)..(421): Homolog of NCBI NO: 17367847 NR Description: 60S ribosomal protein L4 (L1)
  misc_feature (16)..(421): Homolog of NCBI NO: 21593543 NR Description: 60S ribosomal protein L4-B (L1) [Arabidopsis
  misc_feature (16)..(421): Homolog of NCBI NO: 15232723 NR Description: 60S ribosomal protein L4/L1 (RPL4A) [Arabidopsis
  misc_feature (15)..(421): Homolog of NCBI NO: 26450328 NR Description: putative 60S ribosomal protein [Arabidopsis
  misc_feature (15)..(421): Homolog of NCBI NO: 15242558 NR Description: 60S ribosomal protein L4/L1 (RPL4D) [Arabidopsis
SLTSKPFVYSKKSKMVASAAARPLVTVQGLDGDMSTDQSTTVTLPDVMTAPVRPDIVNFVHAQISNNSRQPYAVSKKAGHQTSAESWGTGRAVSRIPRVPGGGTHRAGQAAFGNMCRGGRMFAPTKIWRRWHRRVNVNMKRHAIVSAIAATAVPALVMARGHKIENVPEMPLVVSDSAEAVEKTSAAIKVLKQIGAYDDAEKAKNSIGIRPGKGKMRNRRYISRKGPLVVFGTEGAKIVKAFRNLPGVELCHVERLNLLKLAPGGHLGRFVIWTKSAFEKLESIYGSFEKPSEKKKGYVLPRAKMVNADLARIINSDEVQSVVNPIKDGSKRAVLKKNPLKNLNVMFKLNPYAKTAKRMSLLAEASRVKAKKEKLEKKRKVVTKEEAQAIKAAGKAWYQTMISDSDYTEFDNFTKWLGASQ

SEQ ID NO: 36166 - protein, 407 aa, Arabidopsis thaliana
  peptide (1)..(407): Ceres Seq. ID no. 13497293
  misc_feature (26)..(270): Pfam Name: Ribosomal protein L4/L1 family Pfam Description: Ribosomal protein L4/L1 family
  misc_feature (26)..(270): Pfam Name: Ribosomal protein L4/L1 family Pfam Description: Ribosomal protein L4/L1 family
  misc_feature (6)..(372): Homolog of NCBI NO: 1350686 NR Description: 60S RIBOSOMAL PROTEIN L4 (L1)
  misc_feature (50)..(407): Homolog of NCBI NO: 6441068 NR Description: 60S ribosomal protein L4 [Chlamydomonas sp. HS-5]
  misc_feature (4)..(407): Homolog of NCBI NO: 34897236 NR Description: putative 60S ribosomal protein L1
  misc_feature (101)..(407): Homolog of NCBI NO: 13605831 NR Description: AT5g02870/F9G14_180 [Arabidopsis thaliana]
  misc_feature (8)..(407): Homolog of NCBI NO: 34393487 NR Description: putative 60S ribosomal protein L4/L1
  misc_feature (6)..(372): Homolog of NCBI NO: 1350686 NR Description: 60S RIBOSOMAL PROTEIN L4 (L1)
  misc_feature (4)..(407): Homolog of NCBI NO: 34897236 NR Description: putative 60S ribosomal protein L1
  misc_feature (8)..(407): Homolog of NCBI NO: 34393487 NR Description: putative 60S ribosomal protein L4/L1
  misc_feature (1)..(407): Homolog of NCBI NO: 15242558 NR Description: 60S ribosomal protein L4/L1 (RPL4D) [Arabidopsis
  misc_feature (1)..(407): Homolog of NCBI NO: 26450328 NR Description: putative 60S ribosomal protein [Arabidopsis
  misc_feature (2)..(407): Homolog of NCBI NO: 15232723 NR Description: 60S ribosomal protein L4/L1 (RPL4A) [Arabidopsis
  misc_feature (2)..(407): Homolog of NCBI NO: 21593543 NR Description: 60S ribosomal protein L4-B (L1) [Arabidopsis
  misc_feature (3)..(407): Homolog of NCBI NO: 17367847 NR Description: 60S ribosomal protein L4 (L1)
  misc_feature (101)..(407): Homolog of NCBI NO: 13605831 NR Description: AT5g02870/F9G14_180 [Arabidopsis thaliana]
  misc_feature (50)..(407): Homolog of NCBI NO: 6441068 NR Description: 60S ribosomal protein L4 [Chlamydomonas sp. HS-5]
  misc_feature (3)..(407): Homolog of NCBI NO: 17367847 NR Description: 60S ribosomal protein L4 (L1)
  misc_feature (2)..(407): Homolog of NCBI NO: 21593543 NR Description: 60S ribosomal protein L4-B (L1) [Arabidopsis
  misc_feature (2)..(407): Homolog of NCBI NO: 15232723 NR Description: 60S ribosomal protein L4/L1 (RPL4A) [Arabidopsis
  misc_feature (1)..(407): Homolog of NCBI NO: 26450328 NR Description: putative 60S ribosomal protein [Arabidopsis
  misc_feature (1)..(407): Homolog of NCBI NO: 15242558 NR Description: 60S ribosomal protein L4/L1 (RPL4D) [Arabidopsis
MVASAAARPLVTVQGLDGDMSTDQSTTVTLPDVMTAPVRPDIVNFVHAQISNNSRQPYAVSKKAGHQTSAESWGTGRAVSRIPRVPGGGTHRAGQAAFGNMCRGGRMFAPTKIWRRWHRRVNVNMKRHAIVSAIAATAVPALVMARGHKIENVPEMPLVVSDSAEAVEKTSAAIKVLKQIGAYDDAEKAKNSIGIRPGKGKMRNRRYISRKGPLVVFGTEGAKIVKAFRNLPGVELCHVERLNLLKLAPGGHLGRFVIWTKSAFEKLESIYGSFEKPSEKKKGYVLPRAKMVNADLARIINSDEVQSVVNPIKDGSKRAVLKKNPLKNLNVMFKLNPYAKTAKRMSLLAEASRVKAKKEKLEKKRKVVTKEEAQAIKAAGKAWYQTMISDSDYTEFDNFTKWLGASQ

SEQ ID NO: 36167 - protein, 388 aa, Arabidopsis thaliana
  peptide (1)..(388): Ceres Seq. ID no. 13497294
  misc_feature (7)..(251): Pfam Name: Ribosomal protein L4/L1 family Pfam Description: Ribosomal protein L4/L1 family
  misc_feature (7)..(251): Pfam Name: Ribosomal protein L4/L1 family Pfam Description: Ribosomal protein L4/L1 family
  misc_feature (1)..(353): Homolog of NCBI NO: 1350686 NR Description: 60S RIBOSOMAL PROTEIN L4 (L1)
  misc_feature (31)..(388): Homolog of NCBI NO: 6441068 NR Description: 60S ribosomal protein L4 [Chlamydomonas sp. HS-5]
  misc_feature (1)..(388): Homolog of NCBI NO: 34897236 NR Description: putative 60S ribosomal protein L1
  misc_feature (82)..(388): Homolog of NCBI NO: 13605831 NR Description: AT5g02870/F9G14_180 [Arabidopsis thaliana]
  misc_feature (1)..(388): Homolog of NCBI NO: 34393487 NR Description: putative 60S ribosomal protein L4/L1
  misc_feature (1)..(353): Homolog of NCBI NO: 1350686 NR Description: 60S RIBOSOMAL PROTEIN L4 (L1)
  misc_feature (1)..(388): Homolog of NCBI NO: 34897236 NR Description: putative 60S ribosomal protein L1
  misc_feature (1)..(388): Homolog of NCBI NO: 34393487 NR Description: putative 60S ribosomal protein L4/L1
  misc_feature (1)..(388): Homolog of NCBI NO: 15242558 NR Description: 60S ribosomal protein L4/L1 (RPL4D) [Arabidopsis
  misc_feature (1)..(388): Homolog of NCBI NO: 26450328 NR Description: putative 60S ribosomal protein [Arabidopsis
  misc_feature (1)..(388): Homolog of NCBI NO: 15232723 NR Description: 60S ribosomal protein L4/L1 (RPL4A) [Arabidopsis
  misc_feature (1)..(388): Homolog of NCBI NO: 21593543 NR Description: 60S ribosomal protein L4-B (L1) [Arabidopsis
  misc_feature (1)..(388): Homolog of NCBI NO: 17367847 NR Description: 60S ribosomal protein L4 (L1)
  misc_feature (82)..(388): Homolog of NCBI NO: 13605831 NR Description: AT5g02870/F9G14_180 [Arabidopsis thaliana]
  misc_feature (31)..(388): Homolog of NCBI NO: 6441068 NR Description: 60S ribosomal protein L4 [Chlamydomonas sp. HS-5]
  misc_feature (1)..(388): Homolog of NCBI NO: 17367847 NR Description: 60S ribosomal protein L4 (L1)
  misc_feature (1)..(388): Homolog of NCBI NO: 21593543 NR Description: 60S ribosomal protein L4-B (L1) [Arabidopsis
  misc_feature (1)..(388): Homolog of NCBI NO: 15232723 NR Description: 60S ribosomal protein L4/L1 (RPL4A) [Arabidopsis
  misc_feature (1)..(388): Homolog of NCBI NO: 26450328 NR Description: putative 60S ribosomal protein [Arabidopsis
  misc_feature (1)..(388): Homolog of NCBI NO: 15242558 NR Description: 60S ribosomal protein L4/L1 (RPL4D) [Arabidopsis
MSTDQSTTVTLPDVMTAPVRPDIVNFVHAQISNNSRQPYAVSKKAGHQTSAESWGTGRAVSRIPRVPGGGTHRAGQAAFGNMCRGGRMFAPTKIWRRWHRRVNVNMKRHAIVSAIAATAVPALVMARGHKIENVPEMPLVVSDSAEAVEKTSAAIKVLKQIGAYDDAEKAKNSIGIRPGKGKMRNRRYISRKGPLVVFGTEGAKIVKAFRNLPGVELCHVERLNLLKLAPGGHLGRFVIWTKSAFEKLESIYGSFEKPSEKKKGYVLPRAKMVNADLARIINSDEVQSVVNPIKDGSKRAVLKKNPLKNLNVMFKLNPYAKTAKRMSLLAEASRVKAKKEKLEKKRKVVTKEEAQAIKAAGKAWYQTMISDSDYTEFDNFTKWLGASQ

SEQ ID NO: 36168 - DNA, 1509 bp, Arabidopsis thaliana
  misc_feature (1)..(1509): Ceres Seq. ID no. 12602368
  misc_feature: MA Experiment ID: 108434 Result: Down-regulated in Transcription
  misc_feature: MA Experiment 108434 PARAMETER Experiment Name: At_Root_Tips_cDNA_P Parameter: Tissue Value: Root Tips
  misc_feature: MA Experiment ID: 108464 Result: Up-regulated in Transcription
  misc_feature: MA Experiment 108464 PARAMETER Experiment Name: At_Germinating_Seeds_cDNA_P Parameter: Age (day) Value: 4 vs. 0
  misc_feature: MA Experiment 108464 PARAMETER Experiment Name: At_Germinating_Seeds_cDNA_P Parameter: Tissue Value: Germinating Seeds
  misc_feature: MA Experiment ID: 108574 Result: Up-regulated in Transcription
  misc_feature: MA Experiment 108574 PARAMETER Experiment Name: At_Wounding__cDNA_P Parameter: Timepoint (hr) Value: 1
  misc_feature: MA Experiment 108574 PARAMETER Experiment Name: At_Wounding__cDNA_P Parameter: Tissue Value: Aerial
  misc_feature: MA Experiment 108574 PARAMETER Experiment Name: At_Wounding__cDNA_P Parameter: Treatment Value: Wounding vs. No Wounding
  misc_feature: MA Experiment ID: 108595 Result: Up-regulated in Transcription
  misc_feature: MA Experiment 108595 PARAMETER Experiment Name: At_Ler-pi_Ovule_cDNA_P Parameter: Plant Line Value: null
aagttcatacatggtacaaagctttagcaagttgtcgaatttcatcctacaattgaattttctctttactatttcaaagtttgaatgctcctctgttttcttcgttggttcattgagaaaaaaggaacagactttttacttgtgccattgaccaagaaccacaaagaggaggaaatcaaatggtttttgggagtttgatggattgattgattattcagcaaatcccacagaagaaatcagaagctgcttcttattttttggtcacgaccagtcttaatcaaagtagttcgtctcctacttgttattaaaagtgtatatttctgttgggagtttctgttctcctaccacctcattgacctttaatgatggactcatagtttggtgccaagtgacccaaaaaaaaaaaaaaaaaaaaagtcgatcttgaagatttcatactttttctggcaattctgtttggtttcagaggaaggagtcaaaacaatggggatcgtttcagaagaagccattgatgaattccaagagctgatggatcaagttgaggagccactgaagaaaacttatgagagagtccatcagggatatctaagggagaatttgggtcgttttctgaaagcacgagactggaacgtatgcaaagctcacacaatgctggttgagtgtttgcgttggagggtggataatgaaattgacagtatcctatctaaaccaattgttcctactgagttgtatagggatgtacgagattctcaactcataggaatgtcaggttacaccaaagagggcttgccggtctttgctattggcgtcggcctcagcacatttgacaaagcttctgttcactactatgtccaatctcacatacaaatcaatgaatatagagaccgtgttttactgccttctatttctaagaagaatgggaggccaatcaccacctgcgtcaaggttctagacatgacggggttgaagctttcagctctaagccaaatcaagttagtgactatcatatcgaccattgatgatctcaactatccagagaagacaaacacgtactatgttgtgaacgctccatatatattttccgcatgttggaaggttgtaaaacctcttttacaagagaggacaaggaaaaaagttcatgtcttatccggttgcggaagggatgaattattgaagattatggacttcacatccctgccacatttctgtagaagtggaagctctgggtcatctcaccacactcagagcgcaaattgtttttctatcaatcatcccttccatcaacagctatacaactatgtgaagcaccattatgaaacccaaggacaagcagaacctgcaaagcaaggatcattccacgtgggttttcctgagcctgaagctgaacgttgtgtgatagccaaaaccatagaatcggagctgcacaagtttgagaaccgcaacggtctggccgtgtccattgatgacagaaaatccagtcatgaaacactggcaaatggtgacctctga

SEQ ID NO: 36169 - protein, 341 aa, Arabidopsis thaliana
  peptide (1)..(341): Ceres Seq. ID no. 12602369
  misc_feature (135)..(239): Pfam Name: CRAL/TRIO domain Pfam Description: CRAL/TRIO domain
  misc_feature (135)..(239): Pfam Name: CRAL/TRIO domain Pfam Description: CRAL/TRIO domain
  misc_feature (1)..(341): Homolog of NCBI NO: 15238794 NR Description: putative protein; protein id: At5g47730.1
  misc_feature (1)..(341): Homolog of NCBI NO: 15238794 NR Description: putative protein; protein id: At5g47730.1
MGIVSEEAIDEFQELMDQVEEPLKKTYERVHQGYLRENLGRFLKARDWNVCKAHTMLVECLRWRVDNEIDSILSKPIVPTELYRDVRDSQLIGMSGYTKEGLPVFAIGVGLSTFDKASVHYYVQSHIQINEYRDRVLLPSISKKNGRPITTCVKVLDMTGLKLSALSQIKLVTIISTIDDLNYPEKTNTYYVVNAPYIFSACWKVVKPLLQERTRKKVHVLSGCGRDELLKIMDFTSLPHFCRSGSSGSSHHTQSANCFSINHPFHQQLYNYVKHHYETQGQAEPAKQGSFHVGFPEPEAERCVIAKTIESELHKFENRNGLAVSIDDRKSSHETLANGDL

SEQ ID NO: 36170 - protein, 326 aa, Arabidopsis thaliana
  peptide (1)..(326): Ceres Seq. ID no. 12602370
  misc_feature (120)..(224): Pfam Name: CRAL/TRIO domain Pfam Description: CRAL/TRIO domain
  misc_feature (120)..(224): Pfam Name: CRAL/TRIO domain Pfam Description: CRAL/TRIO domain
  misc_feature (1)..(326): Homolog of NCBI NO: 15238794 NR Description: putative protein; protein id: At5g47730.1
  misc_feature (1)..(326): Homolog of NCBI NO: 15238794 NR Description: putative protein; protein id: At5g47730.1
MDQVEEPLKKTYERVHQGYLRENLGRFLKARDWNVCKAHTMLVECLRWRVDNEIDSILSKPIVPTELYRDVRDSQLIGMSGYTKEGLPVFAIGVGLSTFDKASVHYYVQSHIQINEYRDRVLLPSISKKNGRPITTCVKVLDMTGLKLSALSQIKLVTIISTIDDLNYPEKTNTYYVVNAPYIFSACWKVVKPLLQERTRKKVHVLSGCGRDELLKIMDFTSLPHFCRSGSSGSSHHTQSANCFSINHPFHQQLYNYVKHHYETQGQAEPAKQGSFHVGFPEPEAERCVIAKTIESELHKFENRNGLAVSIDDRKSSHETLANGDL

SEQ ID NO: 36171 - protein, 286 aa, Arabidopsis thaliana
  peptide (1)..(286): Ceres Seq. ID no. 12602371
  misc_feature (80)..(184): Pfam Name: CRAL/TRIO domain Pfam Description: CRAL/TRIO domain
  misc_feature (80)..(184): Pfam Name: CRAL/TRIO domain Pfam Description: CRAL/TRIO domain
  misc_feature (1)..(286): Homolog of NCBI NO: 15238794 NR Description: putative protein; protein id: At5g47730.1
  misc_feature (1)..(286): Homolog of NCBI NO: 15238794 NR Description: putative protein; protein id: At5g47730.1
MLVECLRWRVDNEIDSILSKPIVPTELYRDVRDSQLIGMSGYTKEGLPVFAIGVGLSTFDKASVHYYVQSHIQINEYRDRVLLPSISKKNGRPITTCVKVLDMTGLKLSALSQIKLVTIISTIDDLNYPEKTNTYYVVNAPYIFSACWKVVKPLLQERTRKKVHVLSGCGRDELLKIMDFTSLPHFCRSGSSGSSHHTQSANCFSINHPFHQQLYNYVKHHYETQGQAEPAKQGSFHVGFPEPEAERCVIAKTIESELHKFENRNGLAVSIDDRKSSHETLANGDL

SEQ ID NO: 36172 - DNA, 2463 bp, Arabidopsis thaliana
  misc_feature (1)..(2463): Ceres Seq. ID no. 12601343
  misc_feature: MA Experiment ID: 108434 Result: Up-regulated in Transcription
  misc_feature: MA Experiment 108434 PARAMETER Experiment Name: At_Root_Tips_cDNA_P Parameter: Tissue Value: Root Tips
  misc_feature: MA Experiment ID: 108463 Result: Down-regulated in Transcription
  misc_feature: MA Experiment 108463 PARAMETER Experiment Name: At_Germinating_Seeds_cDNA_P Parameter: Age (day) Value: 3 vs. 0
  misc_feature: MA Experiment 108463 PARAMETER Experiment Name: At_Germinating_Seeds_cDNA_P Parameter: Tissue Value: Germinating Seeds
  misc_feature: MA Experiment ID: 108464 Result: Down-regulated in Transcription
  misc_feature: MA Experiment 108464 PARAMETER Experiment Name: At_Germinating_Seeds_cDNA_P Parameter: Age (day) Value: 4 vs. 0
  misc_feature: MA Experiment 108464 PARAMETER Experiment Name: At_Germinating_Seeds_cDNA_P Parameter: Tissue Value: Germinating Seeds
  misc_feature: MA Experiment ID: 108576 Result: Up-regulated in Transcription
  misc_feature: MA Experiment 108576 PARAMETER Experiment Name: At_42deg_Heat_cDNA_P Parameter: Temperature (deg C) Value: 42 vs. 22
  misc_feature: MA Experiment 108576 PARAMETER Experiment Name: At_42deg_Heat_cDNA_P Parameter: Timepoint (hr) Value: 1
  misc_feature: MA Experiment 108576 PARAMETER Experiment Name: At_42deg_Heat_cDNA_P Parameter: Tissue Value: Aerial
  misc_feature: MA Experiment ID: 108577 Result: Up-regulated in Transcription
  misc_feature: MA Experiment 108577 PARAMETER Experiment Name: At_42deg_Heat_cDNA_P Parameter: Temperature (deg C) Value: 42 vs. 22
  misc_feature: MA Experiment 108577 PARAMETER Experiment Name: At_42deg_Heat_cDNA_P Parameter: Timepoint (hr) Value: 6
  misc_feature: MA Experiment 108577 PARAMETER Experiment Name: At_42deg_Heat_cDNA_P Parameter: Tissue Value: Aerial
  misc_feature: MA Experiment ID: 108595 Result: Down-regulated in Transcription
  misc_feature: MA Experiment 108595 PARAMETER Experiment Name: At_Ler-pi_Ovule_cDNA_P Parameter: Plant Line Value: null
  misc_feature: MA Experiment ID: 20000070 Result: Down-regulated in Transcription
  misc_feature: MA Experiment 20000070 PARAMETER Experiment Name: At_100uM_ABA_Mutants_cDNA_P Parameter: Plant Line Value: CS24
  misc_feature: MA Experiment 20000070 PARAMETER Experiment Name: At_100uM_ABA_Mutants_cDNA_P Parameter: Timepoint (hr) Value: 6
  misc_feature: MA Experiment 20000070 PARAMETER Experiment Name: At_100uM_ABA_Mutants_cDNA_P Parameter: Tissue Value: Aerial
  misc_feature: MA Experiment 20000070 PARAMETER Experiment Name: At_100uM_ABA_Mutants_cDNA_P Parameter: Treatment Value: 100uM ABA vs. No Treatment
  misc_feature: MA Experiment ID: 20000071 Result: Down-regulated in Transcription
  misc_feature: MA Experiment 20000071 PARAMETER Experiment Name: At_100uM_ABA_Mutants_cDNA_P Parameter: Plant Line Value: CS8104
  misc_feature: MA Experiment 20000071 PARAMETER Experiment Name: At_100uM_ABA_Mutants_cDNA_P Parameter: Timepoint (hr) Value: 6
  misc_feature: MA Experiment 20000071 PARAMETER Experiment Name: At_100uM_ABA_Mutants_cDNA_P Parameter: Tissue Value: Aerial
  misc_feature: MA Experiment 20000071 PARAMETER Experiment Name: At_100uM_ABA_Mutants_cDNA_P Parameter: Treatment Value: 100uM ABA vs. No Treatment
  misc_feature: MA Experiment ID: 20000072 Result: Down-regulated in Transcription
  misc_feature: MA Experiment 20000072 PARAMETER Experiment Name: At_100uM_ABA_Mutants_cDNA_P Parameter: Plant Line Value: CS8105
  misc_feature: MA Experiment 20000072 PARAMETER Experiment Name: At_100uM_ABA_Mutants_cDNA_P Parameter: Timepoint (hr) Value: 6
  misc_feature: MA Experiment 20000072 PARAMETER Experiment Name: At_100uM_ABA_Mutants_cDNA_P Parameter: Tissue Value: Aerial
  misc_feature: MA Experiment 20000072 PARAMETER Experiment Name: At_100uM_ABA_Mutants_cDNA_P Parameter: Treatment Value: 100uM ABA vs. No Treatment
  misc_feature: MA Experiment ID: 20000087 Result: Down-regulated in Transcription
  misc_feature: MA Experiment 20000087 PARAMETER Experiment Name: At_100uM_ABA_Mutants_cDNA_P Parameter: Plant Line Value: WS
  misc_feature: MA Experiment 20000087 PARAMETER Experiment Name: At_100uM_ABA_Mutants_cDNA_P Parameter: Timepoint (hr) Value: 6
  misc_feature: MA Experiment 20000087 PARAMETER Experiment Name: At_100uM_ABA_Mutants_cDNA_P Parameter: Tissue Value: Aerial
  misc_feature: MA Experiment 20000087 PARAMETER Experiment Name: At_100uM_ABA_Mutants_cDNA_P Parameter: Treatment Value: 100uM ABA vs. No Treatment
  misc_feature: MA Experiment ID: 20000093 Result: Up-regulated in Transcription
  misc_feature: MA Experiment 20000093 PARAMETER Experiment Name: At_42deg_Heat_cDNA_P Parameter: Temperature (deg C) Value: 42 vs. 22
  misc_feature: MA Experiment 20000093 PARAMETER Experiment Name: At_42deg_Heat_cDNA_P Parameter: Timepoint (hr) Value: 0.5
  misc_feature: MA Experiment 20000093 PARAMETER Experiment Name: At_42deg_Heat_cDNA_P Parameter: Tissue Value: Aerial
  misc_feature: MA Experiment ID: 20000111 Result: Up-regulated in Transcription
  misc_feature: MA Experiment 20000111 PARAMETER Experiment Name: At_42deg_Heat_cDNA_P Parameter: Temperature (deg C) Value: 42 vs. 22
  misc_feature: MA Experiment 20000111 PARAMETER Experiment Name: At_42deg_Heat_cDNA_P Parameter: Timepoint (hr) Value: 6
  misc_feature: MA Experiment 20000111 PARAMETER Experiment Name: At_42deg_Heat_cDNA_P Parameter: Tissue Value: Aerial
  misc_feature: MA Experiment ID: 20000112 Result: Up-regulated in Transcription
  misc_feature: MA Experiment 20000112 PARAMETER Experiment Name: At_42deg_Heat_cDNA_P Parameter: Temperature (deg C) Value: 42 vs. 22
  misc_feature: MA Experiment 20000112 PARAMETER Experiment Name: At_42deg_Heat_cDNA_P Parameter: Timepoint (hr) Value: 2
  misc_feature: MA Experiment 20000112 PARAMETER Experiment Name: At_42deg_Heat_cDNA_P Parameter: Tissue Value: Aerial
  misc_feature: MA Experiment ID: 20000113 Result: Up-regulated in Transcription
  misc_feature: MA Experiment 20000113 PARAMETER Experiment Name: At_42deg_Heat_cDNA_P Parameter: Temperature (deg C) Value: 42 vs. 22
  misc_feature: MA Experiment 20000113 PARAMETER Experiment Name: At_42deg_Heat_cDNA_P Parameter: Timepoint (hr) Value: 8
  misc_feature: MA Experiment 20000113 PARAMETER Experiment Name: At_42deg_Heat_cDNA_P Parameter: Tissue Value: Aerial
  misc_feature: MA Experiment ID: 20000144 Result: Up-regulated in Transcription
  misc_feature: MA Experiment 20000144 PARAMETER Experiment Name: At_42deg_Heat_cDNA_P Parameter: Temperature (deg C) Value: 42 vs. 22
  misc_feature: MA Experiment 20000144 PARAMETER Experiment Name: At_42deg_Heat_cDNA_P Parameter: Timepoint (hr) Value: 1
  misc_feature: MA Experiment 20000144 PARAMETER Experiment Name: At_42deg_Heat_cDNA_P Parameter: Tissue Value: Aerial
  misc_feature: MA Experiment ID: 20000171 Result: Up-regulated in Transcription
  misc_feature: MA Experiment 20000171 PARAMETER Experiment Name: At_42deg_Heat_P Parameter: Age (day) Value: 14
  misc_feature: MA Experiment 20000171 PARAMETER Experiment Name: At_42deg_Heat_P Parameter: Organism Value: A. thaliana
  misc_feature: MA Experiment 20000171 PARAMETER Experiment Name: At_42deg_Heat_P Parameter: Plant Line Value: WS
  misc_feature: MA Experiment 20000171 PARAMETER Experiment Name: At_42deg_Heat_P Parameter: Temperature (deg C) Value: 42 vs. 22
  misc_feature: MA Experiment 20000171 PARAMETER Experiment Name: At_42deg_Heat_P Parameter: Timepoint (hr) Value: 1
  misc_feature: MA Experiment 20000171 PARAMETER Experiment Name: At_42deg_Heat_P Parameter: Tissue Value: Aerial
  misc_feature: MA Experiment ID: 20000173 Result: Up-regulated in Transcription
  misc_feature: MA Experiment 20000173 PARAMETER Experiment Name: At_42deg_Heat_P Parameter: Age (day) Value: 14
  misc_feature: MA Experiment 20000173 PARAMETER Experiment Name: At_42deg_Heat_P Parameter: Organism Value: A. thaliana
  misc_feature: MA Experiment 20000173 PARAMETER Experiment Name: At_42deg_Heat_P Parameter: Plant Line Value: WS
  misc_feature: MA Experiment 20000173 PARAMETER Experiment Name: At_42deg_Heat_P Parameter: Temperature (deg C) Value: 42 vs. 22
  misc_feature: MA Experiment 20000173 PARAMETER Experiment Name: At_42deg_Heat_P Parameter: Timepoint (hr) Value: 6
  misc_feature: MA Experiment 20000173 PARAMETER Experiment Name: At_42deg_Heat_P Parameter: Tissue Value: Aerial
  misc_feature: MA Experiment ID: 20000224 Result: Up-regulated in Transcription
  misc_feature: MA Experiment ID: 20001248 Result: Down-regulated in Transcription
  misc_feature: MA Experiment 20001248 PARAMETER Experiment Name: At_Far-red-induction_P Parameter: Age (day) Value: 7
  misc_feature: MA Experiment 20001248 PARAMETER Experiment Name: At_Far-red-induction_P Parameter: Light Value: Far-red vs. White
  misc_feature: MA Experiment 20001248 PARAMETER Experiment Name: At_Far-red-induction_P Parameter: Organism Value: A. thaliana
  misc_feature: MA Experiment 20001248 PARAMETER Experiment Name: At_Far-red-induction_P Parameter: Plant Line Value: Columbia
  misc_feature: MA Experiment 20001248 PARAMETER Experiment Name: At_Far-red-induction_P Parameter: Timepoint (hr) Value: 4
  misc_feature: MA Experiment 20001248 PARAMETER Experiment Name: At_Far-red-induction_P Parameter: Tissue Value: Whole Plant
  misc_feature: MA Experiment ID: 20001450 Result: Down-regulated in Transcription
  misc_feature: MA Experiment 20001450 PARAMETER Experiment Name: At_Far-red-induction_P Parameter: Age (day) Value: 7
  misc_feature: MA Experiment 20001450 PARAMETER Experiment Name: At_Far-red-induction_P Parameter: Light Value: Far-red vs. White
  misc_feature: MA Experiment 20001450 PARAMETER Experiment Name: At_Far-red-induction_P Parameter: Organism Value: A. thaliana
  misc_feature: MA Experiment 20001450 PARAMETER Experiment Name: At_Far-red-induction_P Parameter: Plant Line Value: Columbia
  misc_feature: MA Experiment 20001450 PARAMETER Experiment Name: At_Far-red-induction_P Parameter: Timepoint (hr) Value: 8
  misc_feature: MA Experiment 20001450 PARAMETER Experiment Name: At_Far-red-induction_P Parameter: Tissue Value: Whole Plant
tatatctcttcctcctactttcccttagggtttttcagcttcaaaccctccttgcactctccgcttccctccgttacctttacttctctattgcttagctcgaaaaatggcatcttcagccgcccaaatccacgttctcggcggaattggattcgcttcttcttcttcttccaagagaaatctcaatggtaaaggcggtacctttatgccgagaagtgccttcttcggtacaagaaccggtcctttctccacacccacttctgcttttctcagaatgggcaccagaaatggcggcggcgcttctagatacgcggttggtccggttcgtgtggttaacgagaaggttgttggaattgatttgggtacgactaactctgcagtagctgctatggaaggaggtaagcctacgattgtgactaacgctgaaggtcagaggacaacgccttctgttgtggcttacacgaagagtggtgataggcttgttgggcagattgcgaagaggcaagctgttgttaatcccgagaatactttcttctcagtgaagaggtttattggtaggaagatgaacgaggttgatgaagagtctaagcaggtttcttacagagttgttagagatgagaacaataatgttaagcttgagtgtcctgccattaacaaacaatttgctgctgaggagatttcagctcaggttctaaggaaacttgtggatgatgcatcaagattcttgaacgacaaagtaaccaaggctgtcatcactgtgcctgcttacttcaacgattcacagaggacagctacaaaagatgctggtcgaattgctgggttggaagttcttcgtattatcaatgagcccacagctgcttcattggcttatgggtttgacagaaaagccaatgaaacaatcctagtcttcgatcttggtggtggtacctttgatgtctcagtgcttgaggttggtgatggtgtgtttgaagtgctttccacttctggcgacacacacttgggtggtgatgactttgacaagagagttgttgattggcttgctgcagaattcaagaaagacgaagggatagatcttctgaaagacaagcaagctcttcagaggttaacagaggcagcagaaaaagctaaaattgagctttcttcactgactcagacaaatatgagcttaccttttatcacggccacagctgatggacctaaacacatagaaaccaccctcacacgtgccaagttcgaagaattgtgttcagatttacttgacagggtcaggactcctgtcgagaattccctgcgggatgcaaagctcagcttcaaagatattgatgaagtcatccttgtcggtggatccacacgtattcctgctgttcaggaactcgtgaggaaggtgactgggaaagaacctaatgttacagtaaatcctgacgaggttgtagcgttaggtgctgcagtccaggctggtgttcttgctggagatgtgagtgacattgtgcttcttgatgtgacaccgctttcgattggtttggagaccctaggtggtgttatgactaagattattccaaggaacaccacactgcctacttctaaatcagaagtcttttcaactgctgctgatggacagacaagtgttgagattaatgtgttgcagggtgagagggagtttgttagggataacaagtctcttggtagcttccgtctagatggtatcccccctgcaccacgtggagttccacaaatcgaagtcaaatttgacattgatgccaatggaattctatctgtcagtgctgttgacaagggcacaggaaagaagcaagacatcaccattactggcgcaagtacattgcccaaggatgaggtagaccaaatggtccaggaggcagaaagatttgcaaaagatgacaaagagaagagagacgcaatcgacacgaaaaaccaagcagattcagtggtgtaccagacagagaagcaactgaaagaactaggagagaaaattccaggtgaagtgaaagagaaggtggaggctaagctacaagagctgaaagacaagataggaagtggatcaacccaagaaatcaaagacgccatggctgctcttaaccaagaagtgatgcagattggtcagtctctatacaaccagcctggagctggaggtccaggtgcaggtccttccccgggaggcgaaggtgcttcatcaggagattcatcttcaagtaaaggaggagatggtgatgatgtgatcgatgctgacttcacagacagccaatgagaaaacaaactaggaaggctttggaattcatacatgggatgcgatgggagagacaaatgattttgtaggttggatttgagaacacaaatgaatttaagcaatgcttgtggacaacatttatttgtcgttagaaggaagcagtgtggttacagaggatgatgtttaatacataataatatgcaagccttctcttacacggt

SEQ ID NO: 36173 - protein, 718 aa, Arabidopsis thaliana
  peptide (1)..(718): Ceres Seq. ID no. 12601344
  misc_feature (80)..(675): Pfam Name: Hsp70 protein Pfam Description: Hsp70 protein
  misc_feature (80)..(675): Pfam Name: Hsp70 protein Pfam Description: Hsp70 protein
  misc_feature (80)..(675): Pfam Name: Hsp70 protein Pfam Description: Hsp70 protein
  misc_feature (79)..(666): Homolog of NCBI NO: 23040330 NR Description: hypothetical protein [Trichodesmium erythraeum
  misc_feature (79)..(668): Homolog of NCBI NO: 17230482 NR Description: DnaK-type molecular chaperone [Nostoc sp. PCC
  misc_feature (79)..(668): Homolog of NCBI NO: 3121997 NR Description: Chaperone protein dnaK (Heat shock protein 70)
  misc_feature (64)..(718): Homolog of NCBI NO: 7441862 NR Description: dnaK-type molecular chaperone hsp70b precursor,
  misc_feature (134)..(702): Homolog of NCBI NO: 1708311 NR Description: Stromal 70 kDa heat shock-related protein,
  misc_feature (79)..(666): Homolog of NCBI NO: 23040330 NR Description: hypothetical protein [Trichodesmium erythraeum
  misc_feature (79)..(668): Homolog of NCBI NO: 3121997 NR Description: Chaperone protein dnaK (Heat shock protein 70)
  misc_feature (134)..(702): Homolog of NCBI NO: 1708311 NR Description: Stromal 70 kDa heat shock-related protein,
  misc_feature (64)..(718): Homolog of NCBI NO: 7441862 NR Description: dnaK-type molecular chaperone hsp70b precursor,
  misc_feature (79)..(668): Homolog of NCBI NO: 3121997 NR Description: Chaperone protein dnaK (Heat shock protein 70)
  misc_feature (79)..(668): Homolog of NCBI NO: 17230482 NR Description: DnaK-type molecular chaperone [Nostoc sp. PCC
  misc_feature (79)..(666): Homolog of NCBI NO: 23040330 NR Description: hypothetical protein [Trichodesmium erythraeum
  misc_feature (1)..(718): Homolog of NCBI NO: 7441880 NR Description: dnaK-type molecular chaperone HSC70-9,
  misc_feature (1)..(718): Homolog of NCBI NO: 7441856 NR Description: heat shock protein, 70K, chloroplast - cucumber
  misc_feature (1)..(718): Homolog of NCBI NO: 1928991 NR Description: heat shock protein 70 precursor [Citrullus
  misc_feature (1)..(718): Homolog of NCBI NO: 399942 NR Description: Stromal 70 kDa heat shock-related protein,
  misc_feature (1)..(718): Homolog of NCBI NO: 445605 NR Description: heat shock protein hsp70
  misc_feature (1)..(718): Homolog of NCBI NO: 7441880 NR Description: dnaK-type molecular chaperone HSC70-9,
  misc_feature (1)..(718): Homolog of NCBI NO: 7441856 NR Description: heat shock protein, 70K, chloroplast - cucumber
  misc_feature (1)..(718): Homolog of NCBI NO: 1928991 NR Description: heat shock protein 70 precursor [Citrullus
  misc_feature (1)..(718): Homolog of NCBI NO: 399942 NR Description: Stromal 70 kDa heat shock-related protein,
  misc_feature (1)..(718): Homolog of NCBI NO: 445605 NR Description: heat shock protein hsp70
  misc_feature (134)..(702): Homolog of NCBI NO: 1708311 NR Description: Stromal 70 kDa heat shock-related protein,
  misc_feature (64)..(718): Homolog of NCBI NO: 7441862 NR Description: dnaK-type molecular chaperone hsp70b precursor,
  misc_feature (79)..(668): Homolog of NCBI NO: 17230482 NR Description: DnaK-type molecular chaperone [Nostoc sp. PCC
  misc_feature (1)..(718): Homolog of NCBI NO: 445605 NR Description: heat shock protein hsp70
  misc_feature (1)..(718): Homolog of NCBI NO: 399942 NR Description: Stromal 70 kDa heat shock-related protein,
  misc_feature (1)..(718): Homolog of NCBI NO: 1928991 NR Description: heat shock protein 70 precursor [Citrullus
  misc_feature (1)..(718): Homolog of NCBI NO: 7441856 NR Description: heat shock protein, 70K, chloroplast - cucumber
  misc_feature (1)..(718): Homolog of NCBI NO: 7441880 NR Description: dnaK-type molecular chaperone HSC70-9,
MASSAAQIHVLGGIGFASSSSSKRNLNGKGGTFMPRSAFFGTRTGPFSTPTSAFLRMGTRNGGGASRYAVGPVRVVNEKVVGIDLGTTNSAVAAMEGGKPTIVTNAEGQRTTPSVVAYTKSGDRLVGQIAKRQAVVNPENTFFSVKRFIGRKMNEVDEESKQVSYRVVRDENNNVKLECPAINKQFAAEEISAQVLRKLVDDASRFLNDKVTKAVITVPAYFNDSQRTATKDAGRIAGLEVLRIINEPTAASLAYGFDRKANETILVFDLGGGTFDVSVLEVGDGVFEVLSTSGDTHLGGDDFDKRVVDWLAAEFKKDEGIDLLKDKQALQRLTEAAEKAKIELSSLTQTNMSLPFITATADGPKHIETTLTRAKFEELCSDLLDRVRTPVENSLRDAKLSFKDIDEVILVGGSTRIPAVQELVRKVTGKEPNVTVNPDEVVALGAAVQAGVLAGDVSDIVLLDVTPLSIGLETLGGVMTKIIPRNTTLPTSKSEVFSTAADGQTSVEINVLQGEREFVRDNKSLGSFRLDGIPPAPRGVPQIEVKFDIDANGILSVSAVDKGTGKKQDITITGASTLPKDEVDQMVQEAERFAKDDKEKRDAIDTKNQADSVVYQTEKQLKELGEKIPGEVKEKVEAKLQELKDKIGSGSTQEIKDAMAALNQEVMQIGQSLYNQPGAGGPGAGPSPGGEGASSGDSSSSKGGDGDDVIDADFTDSQ

SEQ ID NO: 36174 - protein, 685 aa, Arabidopsis thaliana
  peptide (1)..(685): Ceres Seq. ID no. 12601345
  misc_feature (47)..(642): Pfam Name: Hsp70 protein Pfam Description: Hsp70 protein
  misc_feature (47)..(642): Pfam Name: Hsp70 protein Pfam Description: Hsp70 protein
  misc_feature (47)..(642): Pfam Name: Hsp70 protein Pfam Description: Hsp70 protein
  misc_feature (46)..(633): Homolog of NCBI NO: 23040330 NR Description: hypothetical protein [Trichodesmium erythraeum
  misc_feature (46)..(635): Homolog of NCBI NO: 17230482 NR Description: DnaK-type molecular chaperone [Nostoc sp. PCC
  misc_feature (46)..(635): Homolog of NCBI NO: 3121997 NR Description: Chaperone protein dnaK (Heat shock protein 70)
  misc_feature (31)..(685): Homolog of NCBI NO: 7441862 NR Description: dnaK-type molecular chaperone hsp70b precursor,
  misc_feature (101)..(669): Homolog of NCBI NO: 1708311 NR Description: Stromal 70 kDa heat shock-related protein,
  misc_feature (46)..(633): Homolog of NCBI NO: 23040330 NR Description: hypothetical protein [Trichodesmium erythraeum
  misc_feature (46)..(635): Homolog of NCBI NO: 3121997 NR Description: Chaperone protein dnaK (Heat shock protein 70)
  misc_feature (101)..(669): Homolog of NCBI NO: 1708311 NR Description: Stromal 70 kDa heat shock-related protein,
  misc_feature (31)..(685): Homolog of NCBI NO: 7441862 NR Description: dnaK-type molecular chaperone hsp70b precursor,
  misc_feature (46)..(635): Homolog of NCBI NO: 3121997 NR Description: Chaperone protein dnaK (Heat shock protein 70)
  misc_feature (46)..(635): Homolog of NCBI NO: 17230482 NR Description: DnaK-type molecular chaperone [Nostoc sp. PCC
  misc_feature (46)..(633): Homolog of NCBI NO: 23040330 NR Description: hypothetical protein [Trichodesmium erythraeum
  misc_feature (1)..(685): Homolog of NCBI NO: 7441880 NR Description: dnaK-type molecular chaperone HSC70-9,
  misc_feature (1)..(685): Homolog of NCBI NO: 7441856 NR Description: heat shock protein, 70K, chloroplast - cucumber
  misc_feature (1)..(685): Homolog of NCBI NO: 1928991 NR Description: heat shock protein 70 precursor [Citrullus
  misc_feature (1)..(685): Homolog of NCBI NO: 399942 NR Description: Stromal 70 kDa heat shock-related protein,
  misc_feature (1)..(685): Homolog of NCBI NO: 445605 NR Description: heat shock protein hsp70
  misc_feature (1)..(685): Homolog of NCBI NO: 7441880 NR Description: dnaK-type molecular chaperone HSC70-9,
  misc_feature (1)..(685): Homolog of NCBI NO: 7441856 NR Description: heat shock protein, 70K, chloroplast - cucumber
  misc_feature (1)..(685): Homolog of NCBI NO: 1928991 NR Description: heat shock protein 70 precursor [Citrullus
  misc_feature (1)..(685): Homolog of NCBI NO: 399942 NR Description: Stromal 70 kDa heat shock-related protein,
  misc_feature (1)..(685): Homolog of NCBI NO: 445605 NR Description: heat shock protein hsp70
  misc_feature (101)..(669): Homolog of NCBI NO: 1708311 NR Description: Stromal 70 kDa heat shock-related protein,
  misc_feature (31)..(685): Homolog of NCBI NO: 7441862 NR Description: dnaK-type molecular chaperone hsp70b precursor,
  misc_feature (46)..(635): Homolog of NCBI NO: 17230482 NR Description: DnaK-type molecular chaperone [Nostoc sp. PCC
  misc_feature (1)..(685): Homolog of NCBI NO: 445605 NR Description: heat shock protein hsp70
  misc_feature (1)..(685): Homolog of NCBI NO: 399942 NR Description: Stromal 70 kDa heat shock-related protein,
  misc_feature (1)..(685): Homolog of NCBI NO: 1928991 NR Description: heat shock protein 70 precursor [Citrullus
  misc_feature (1)..(685): Homolog of NCBI NO: 7441856 NR Description: heat shock protein, 70K, chloroplast - cucumber
  misc_feature (1)..(685): Homolog of NCBI NO: 7441880 NR Description: dnaK-type molecular chaperone HSC70-9,
MPRSAFFGTRTGPFSTPTSAFLRMGTRNGGGASRYAVGPVRVVNEKVVGIDLGTTNSAVAAMEGGKPTIVTNAEGQRTTPSVVAYTKSGDRLVGQIAKRQAVVNPENTFFSVKRFIGRKMNEVDEESKQVSYRVVRDENNNVKLECPAINKQFAAEEISAQVLRKLVDDASRFLNDKVTKAVITVPAYFNDSQRTATKDAGRIAGLEVLRIINEPTAASLAYGFDRKANETILVFDLGGGTFDVSVLEVGDGVFEVLSTSGDTHLGGDDFDKRVVDWLAAEFKKDEGIDLLKDKQALQRLTEAAEKAKIELSSLTQTNMSLPFITATADGPKHIETTLTRAKFEELCSDLLDRVRTPVENSLRDAKLSFKDIDEVILVGGSTRIPAVQELVRKVTGKEPNVTVNPDEVVALGAAVQAGVLAGDVSDIVLLDVTPLSIGLETLGGVMTKIIPRNTTLPTSKSEVFSTAADGQTSVEINVLQGEREFVRDNKSLGSFRLDGIPPAPRGVPQIEVKFDIDANGILSVSAVDKGTGKKQDITITGASTLPKDEVDQMVQEAERFAKDDKEKRDAIDTKNQADSVVYQTEKQLKELGEKIPGEVKEKVEAKLQELKDKIGSGSTQEIKDAMAALNQEVMQIGQSLYNQPGAGGPGAGPSPGGEGASSGDSSSSKGGDGDDVIDADFTDSQ

SEQ ID NO: 36175 - protein, 662 aa, Arabidopsis thaliana
  peptide (1)..(662): Ceres Seq. ID no. 12601346
  misc_feature (24)..(619): Pfam Name: Hsp70 protein Pfam Description: Hsp70 protein
  misc_feature (24)..(619): Pfam Name: Hsp70 protein Pfam Description: Hsp70 protein
  misc_feature (24)..(619): Pfam Name: Hsp70 protein Pfam Description: Hsp70 protein
  misc_feature (23)..(610): Homolog of NCBI NO: 23040330 NR Description: hypothetical protein [Trichodesmium erythraeum
  misc_feature (23)..(612): Homolog of NCBI NO: 17230482 NR Description: DnaK-type molecular chaperone [Nostoc sp. PCC
  misc_feature (23)..(612): Homolog of NCBI NO: 3121997 NR Description: Chaperone protein dnaK (Heat shock protein 70)
  misc_feature (8)..(662): Homolog of NCBI NO: 7441862 NR Description: dnaK-type molecular chaperone hsp70b precursor,
  misc_feature (78)..(646): Homolog of NCBI NO: 1708311 NR Description: Stromal 70 kDa heat shock-related protein,
  misc_feature (23)..(610): Homolog of NCBI NO: 23040330 NR Description: hypothetical protein [Trichodesmium erythraeum
  misc_feature (23)..(612): Homolog of NCBI NO: 3121997 NR Description: Chaperone protein dnaK (Heat shock protein 70)
  misc_feature (78)..(646): Homolog of NCBI NO: 1708311 NR Description: Stromal 70 kDa heat shock-related protein,
  misc_feature (8)..(662): Homolog of NCBI NO: 7441862 NR Description: dnaK-type molecular chaperone hsp70b precursor,
  misc_feature (23)..(612): Homolog of NCBI NO: 3121997 NR Description: Chaperone protein dnaK (Heat shock protein 70)
  misc_feature (23)..(612): Homolog of NCBI NO: 17230482 NR Description: DnaK-type molecular chaperone [Nostoc sp. PCC
  misc_feature (23)..(610): Homolog of NCBI NO: 23040330 NR Description: hypothetical protein [Trichodesmium erythraeum
  misc_feature (1)..(662): Homolog of NCBI NO: 7441880 NR Description: dnaK-type molecular chaperone HSC70-9,
  misc_feature (1)..(662): Homolog of NCBI NO: 7441856 NR Description: heat shock protein, 70K, chloroplast - cucumber
  misc_feature (1)..(662): Homolog of NCBI NO: 1928991 NR Description: heat shock protein 70 precursor [Citrullus
  misc_feature (1)..(662): Homolog of NCBI NO: 399942 NR Description: Stromal 70 kDa heat shock-related protein,
  misc_feature (1)..(662): Homolog of NCBI NO: 445605 NR Description: heat shock protein hsp70
  misc_feature (1)..(662): Homolog of NCBI NO: 7441880 NR Description: dnaK-type molecular chaperone HSC70-9,
  misc_feature (1)..(662): Homolog of NCBI NO: 7441856 NR Description: heat shock protein, 70K, chloroplast - cucumber
  misc_feature (1)..(662): Homolog of NCBI NO: 1928991 NR Description: heat shock protein 70 precursor [Citrullus
  misc_feature (1)..(662): Homolog of NCBI NO: 399942 NR Description: Stromal 70 kDa heat shock-related protein,
  misc_feature (1)..(662): Homolog of NCBI NO: 445605 NR Description: heat shock protein hsp70
  misc_feature (78)..(646): Homolog of NCBI NO: 1708311 NR Description: Stromal 70 kDa heat shock-related protein,
  misc_feature (8)..(662): Homolog of NCBI NO: 7441862 NR Description: dnaK-type molecular chaperone hsp70b precursor,
  misc_feature (23)..(612): Homolog of NCBI NO: 17230482 NR Description: DnaK-type molecular chaperone [Nostoc sp. PCC
  misc_feature (1)..(662): Homolog of NCBI NO: 445605 NR Description: heat shock protein hsp70
  misc_feature (1)..(662): Homolog of NCBI NO: 399942 NR Description: Stromal 70 kDa heat shock-related protein,
  misc_feature (1)..(662): Homolog of NCBI NO: 1928991 NR Description: heat shock protein 70 precursor [Citrullus
  misc_feature (1)..(662): Homolog of NCBI NO: 7441856 NR Description: heat shock protein, 70K, chloroplast - cucumber
  misc_feature (1)..(662): Homolog of NCBI NO: 7441880 NR Description: dnaK-type molecular chaperone HSC70-9,
MGTRNGGGASRYAVGPVRVVNEKVVGIDLGTTNSAVAAMEGGKPTIVTNAEGQRTTPSVVAYTKSGDRLVGQIAKRQAVVNPENTFFSVKRFIGRKMNEVDEESKQVSYRVVRDENNNVKLECPAINKQFAAEEISAQVLRKLVDDASRFLNDKVTKAVITVPAYFNDSQRTATKDAGRIAGLEVLRIINEPTAASLAYGFDRKANETILVFDLGGGTFDVSVLEVGDGVFEVLSTSGDTHLGGDDFDKRVVDWLAAEFKKDEGIDLLKDKQALQRLTEAAEKAKIELSSLTQTNMSLPFITATADGPKHIETTLTRAKFEELCSDLLDRVRTPVENSLRDAKLSFKDIDEVILVGGSTRIPAVQELVRKVTGKEPNVTVNPDEVVALGAAVQAGVLAGDVSDIVLLDVTPLSIGLETLGGVMTKIIPRNTTLPTSKSEVFSTAADGQTSVEINVLQGEREFVRDNKSLGSFRLDGIPPAPRGVPQIEVKFDIDANGILSVSAVDKGTGKKQDITITGASTLPKDEVDQMVQEAERFAKDDKEKRDAIDTKNQADSVVYQTEKQLKELGEKIPGEVKEKVEAKLQELKDKIGSGSTQEIKDAMAALNQEVMQIGQSLYNQPGAGGPGAGPSPGGEGASSGDSSSSKGGDGDDVIDADFTDSQ

SEQ ID NO: 36176 - DNA, 533 bp, Arabidopsis thaliana
  misc_feature (1)..(533): Ceres Seq. ID no. 12673734
  misc_feature: MA Experiment ID: 108434 Result: Down-regulated in Transcription
  misc_feature: MA Experiment 108434 PARAMETER Experiment Name: At_Root_Tips_cDNA_P Parameter: Tissue Value: Root Tips
  misc_feature: MA Experiment ID: 108435 Result: Up-regulated in Transcription
  misc_feature: MA Experiment 108435 PARAMETER Experiment Name: At_stm_Mutants_cDNA_P Parameter: Plant Line Value: wt Landsburg vs stm
  misc_feature: MA Experiment 108435 PARAMETER Experiment Name: At_stm_Mutants_cDNA_P Parameter: Tissue Value: Shoot Apical Meristem Region
  misc_feature: MA Experiment ID: 108461 Result: Up-regulated in Transcription
  misc_feature: MA Experiment 108461 PARAMETER Experiment Name: At_Germinating_Seeds_cDNA_P Parameter: Age (day) Value: 1 vs. 0
  misc_feature: MA Experiment 108461 PARAMETER Experiment Name: At_Germinating_Seeds_cDNA_P Parameter: Tissue Value: Germinating Seeds
  misc_feature: MA Experiment ID: 108462 Result: Up-regulated in Transcription
  misc_feature: MA Experiment 108462 PARAMETER Experiment Name: At_Germinating_Seeds_cDNA_P Parameter: Age (day) Value: 2 vs. 0
  misc_feature: MA Experiment 108462 PARAMETER Experiment Name: At_Germinating_Seeds_cDNA_P Parameter: Tissue Value: Germinating Seeds
  misc_feature: MA Experiment ID: 108561 Result: Down-regulated in Transcription
  misc_feature: MA Experiment 108561 PARAMETER Experiment Name: At_100uM_ABA_cDNA_P Parameter: Timepoint (hr) Value: 6
  misc_feature: MA Experiment 108561 PARAMETER Experiment Name: At_100uM_ABA_cDNA_P Parameter: Tissue Value: Aerial
  misc_feature: MA Experiment 108561 PARAMETER Experiment Name: At_100uM_ABA_cDNA_P Parameter: Treatment Value: 100uM ABA vs. No Treatment
  misc_feature: MA Experiment ID: 108577 Result: Down-regulated in Transcription
  misc_feature: MA Experiment 108577 PARAMETER Experiment Name: At_42deg_Heat_cDNA_P Parameter: Temperature (deg C) Value: 42 vs. 22
  misc_feature: MA Experiment 108577 PARAMETER Experiment Name: At_42deg_Heat_cDNA_P Parameter: Timepoint (hr) Value: 6
  misc_feature: MA Experiment 108577 PARAMETER Experiment Name: At_42deg_Heat_cDNA_P Parameter: Tissue Value: Aerial
  misc_feature: MA Experiment ID: 108595 Result: Up-regulated in Transcription
  misc_feature: MA Experiment 108595 PARAMETER Experiment Name: At_Ler-pi_Ovule_cDNA_P Parameter: Plant Line Value: null
  misc_feature: MA Experiment ID: 20000069 Result: Down-regulated in Transcription
  misc_feature: MA Experiment 20000069 PARAMETER Experiment Name: At_100uM_ABA_Mutants_cDNA_P Parameter: Plant Line Value: CS23
  misc_feature: MA Experiment 20000069 PARAMETER Experiment Name: At_100uM_ABA_Mutants_cDNA_P Parameter: Timepoint (hr) Value: 6
  misc_feature: MA Experiment 20000069 PARAMETER Experiment Name: At_100uM_ABA_Mutants_cDNA_P Parameter: Tissue Value: Aerial
  misc_feature: MA Experiment 20000069 PARAMETER Experiment Name: At_100uM_ABA_Mutants_cDNA_P Parameter: Treatment Value: 100uM ABA vs. No Treatment
  misc_feature: MA Experiment ID: 20000093 Result: Down-regulated in Transcription
  misc_feature: MA Experiment 20000093 PARAMETER Experiment Name: At_42deg_Heat_cDNA_P Parameter: Temperature (deg C) Value: 42 vs. 22
  misc_feature: MA Experiment 20000093 PARAMETER Experiment Name: At_42deg_Heat_cDNA_P Parameter: Timepoint (hr) Value: 0.5
  misc_feature: MA Experiment 20000093 PARAMETER Experiment Name: At_42deg_Heat_cDNA_P Parameter: Tissue Value: Aerial
  misc_feature: MA Experiment ID: 20000111 Result: Down-regulated in Transcription
  misc_feature: MA Experiment 20000111 PARAMETER Experiment Name: At_42deg_Heat_cDNA_P Parameter: Temperature (deg C) Value: 42 vs. 22
  misc_feature: MA Experiment 20000111 PARAMETER Experiment Name: At_42deg_Heat_cDNA_P Parameter: Timepoint (hr) Value: 6
  misc_feature: MA Experiment 20000111 PARAMETER Experiment Name: At_42deg_Heat_cDNA_P Parameter: Tissue Value: Aerial
  misc_feature: MA Experiment ID: 20000112 Result: Down-regulated in Transcription
  misc_feature: MA Experiment 20000112 PARAMETER Experiment Name: At_42deg_Heat_cDNA_P Parameter: Temperature (deg C) Value: 42 vs. 22
  misc_feature: MA Experiment 20000112 PARAMETER Experiment Name: At_42deg_Heat_cDNA_P Parameter: Timepoint (hr) Value: 2
  misc_feature: MA Experiment 20000112 PARAMETER Experiment Name: At_42deg_Heat_cDNA_P Parameter: Tissue Value: Aerial
  misc_feature: MA Experiment ID: 20000113 Result: Down-regulated in Transcription
  misc_feature: MA Experiment 20000113 PARAMETER Experiment Name: At_42deg_Heat_cDNA_P Parameter: Temperature (deg C) Value: 42 vs. 22
  misc_feature: MA Experiment 20000113 PARAMETER Experiment Name: At_42deg_Heat_cDNA_P Parameter: Timepoint (hr) Value: 8
  misc_feature: MA Experiment 20000113 PARAMETER Experiment Name: At_42deg_Heat_cDNA_P Parameter: Tissue Value: Aerial
  misc_feature: MA Experiment ID: 20000117 Result: Down-regulated in Transcription
  misc_feature: MA Experiment 20000117 PARAMETER Experiment Name: At_100uM_ABA_Mutants_cDNA_P Parameter: Plant Line Value: Columbia
  misc_feature: MA Experiment 20000117 PARAMETER Experiment Name: At_100uM_ABA_Mutants_cDNA_P Parameter: Timepoint (hr) Value: 6
  misc_feature: MA Experiment 20000117 PARAMETER Experiment Name: At_100uM_ABA_Mutants_cDNA_P Parameter: Tissue Value: Aerial
  misc_feature: MA Experiment 20000117 PARAMETER Experiment Name: At_100uM_ABA_Mutants_cDNA_P Parameter: Treatment Value: 100uM ABA vs. No Treatment
  misc_feature: MA Experiment ID: 20000144 Result: Down-regulated in Transcription
  misc_feature: MA Experiment 20000144 PARAMETER Experiment Name: At_42deg_Heat_cDNA_P Parameter: Temperature (deg C) Value: 42 vs. 22
  misc_feature: MA Experiment 20000144 PARAMETER Experiment Name: At_42deg_Heat_cDNA_P Parameter: Timepoint (hr) Value: 1
  misc_feature: MA Experiment 20000144 PARAMETER Experiment Name: At_42deg_Heat_cDNA_P Parameter: Tissue Value: Aerial
  misc_feature: MA Experiment ID: 20000171 Result: Down-regulated in Transcription
  misc_feature: MA Experiment 20000171 PARAMETER Experiment Name: At_42deg_Heat_P Parameter: Age (day) Value: 14
  misc_feature: MA Experiment 20000171 PARAMETER Experiment Name: At_42deg_Heat_P Parameter: Organism Value: A. thaliana
  misc_feature: MA Experiment 20000171 PARAMETER Experiment Name: At_42deg_Heat_P Parameter: Plant Line Value: WS
  misc_feature: MA Experiment 20000171 PARAMETER Experiment Name: At_42deg_Heat_P Parameter: Temperature (deg C) Value: 42 vs. 22
  misc_feature: MA Experiment 20000171 PARAMETER Experiment Name: At_42deg_Heat_P Parameter: Timepoint (hr) Value: 1
  misc_feature: MA Experiment 20000171 PARAMETER Experiment Name: At_42deg_Heat_P Parameter: Tissue Value: Aerial
  misc_feature: MA Experiment ID: 20000173 Result: Down-regulated in Transcription
  misc_feature: MA Experiment 20000173 PARAMETER Experiment Name: At_42deg_Heat_P Parameter: Age (day) Value: 14
  misc_feature: MA Experiment 20000173 PARAMETER Experiment Name: At_42deg_Heat_P Parameter: Organism Value: A. thaliana
  misc_feature: MA Experiment 20000173 PARAMETER Experiment Name: At_42deg_Heat_P Parameter: Plant Line Value: WS
  misc_feature: MA Experiment 20000173 PARAMETER Experiment Name: At_42deg_Heat_P Parameter: Temperature (deg C) Value: 42 vs. 22
  misc_feature: MA Experiment 20000173 PARAMETER Experiment Name: At_42deg_Heat_P Parameter: Timepoint (hr) Value: 6
  misc_feature: MA Experiment 20000173 PARAMETER Experiment Name: At_42deg_Heat_P Parameter: Tissue Value: Aerial
  misc_feature: MA Experiment ID: 20000179 Result: Up-regulated in Transcription
  misc_feature: MA Experiment 20000179 PARAMETER Experiment Name: At_Germinating_Seeds_P Parameter: Age (hr) Value: 6 vs. 0
  misc_feature: MA Experiment 20000179 PARAMETER Experiment Name: At_Germinating_Seeds_P Parameter: Tissue Value: Germinating Seeds
  misc_feature: MA Experiment ID: 20000180 Result: Up-regulated in Transcription
  misc_feature: MA Experiment 20000180 PARAMETER Experiment Name: At_Germinating_Seeds_P Parameter: Age (hr) Value: 24 vs. 0
  misc_feature: MA Experiment 20000180 PARAMETER Experiment Name: At_Germinating_Seeds_P Parameter: Tissue Value: Germinating Seeds
  misc_feature: MA Experiment ID: 20000184 Result: Down-regulated in Transcription
  misc_feature: MA Experiment 20000184 PARAMETER Experiment Name: At_Shoots__P Parameter: Age (day) Value: 7
  misc_feature: MA Experiment 20000184 PARAMETER Experiment Name: At_Shoots__P Parameter: Tissue Value: Shoots vs. Whole Plant
  misc_feature: MA Experiment ID: 20000185 Result: Down-regulated in Transcription
  misc_feature: MA Experiment 20000185 PARAMETER Experiment Name: At_Roots__P Parameter: Age (day) Value: 7 vs. 21
  misc_feature: MA Experiment 20000185 PARAMETER Experiment Name: At_Roots__P Parameter: Organism Value: A. thaliana
  misc_feature: MA Experiment 20000185 PARAMETER Experiment Name: At_Roots__P Parameter: Tissue Value: Roots vs. Whole Plant
  misc_feature: MA Experiment ID: 20000224 Result: Up-regulated in Transcription
  misc_feature: MA Experiment ID: 20000227 Result: Down-regulated in Transcription
  misc_feature: MA Experiment 20000227 PARAMETER Experiment Name: At_Root-Tips-vs-Tops_P Parameter: Tissue Value: Root Tips vs. Root Tops
  misc_feature: MA Experiment ID: 20000234 Result: Up-regulated in Transcription
  misc_feature: MA Experiment 20000234 PARAMETER Experiment Name: At_Siliques_P Parameter: Age (day) Value: 21
  misc_feature: MA Experiment 20000234 PARAMETER Experiment Name: At_Siliques_P Parameter: Organism Value: A. thaliana
  misc_feature: MA Experiment 20000234 PARAMETER Experiment Name: At_Siliques_P Parameter: Plant Line Value: WS
  misc_feature: MA Experiment 20000234 PARAMETER Experiment Name: At_Siliques_P Parameter: Tissue Value: Less Than 5mm Siliques vs. Whole Plant
  misc_feature: MA Experiment ID: 20000235 Result: Up-regulated in Transcription
  misc_feature: MA Experiment 20000235 PARAMETER Experiment Name: At_Siliques_P Parameter: Age (day) Value: 21
  misc_feature: MA Experiment 20000235 PARAMETER Experiment Name: At_Siliques_P Parameter: Organism Value: A. thaliana
  misc_feature: MA Experiment 20000235 PARAMETER Experiment Name: At_Siliques_P Parameter: Plant Line Value: WS
  misc_feature: MA Experiment 20000235 PARAMETER Experiment Name: At_Siliques_P Parameter: Tissue Value: 5-10mm Siliques vs. Whole Plant
  misc_feature: MA Experiment ID: 20000264 Result: Up-regulated in Transcription
  misc_feature: MA Experiment 20000264 PARAMETER Experiment Name: At_Open_Flower_P Parameter: Age (day) Value: 21
  misc_feature: MA Experiment 20000264 PARAMETER Experiment Name: At_Open_Flower_P Parameter: Plant Line Value: WS
  misc_feature: MA Experiment 20000264 PARAMETER Experiment Name: At_Open_Flower_P Parameter: Tissue Value: Open Flower vs. Whole Plant
  misc_feature: MA Experiment ID: 20000265 Result: Up-regulated in Transcription
  misc_feature: MA Experiment 20000265 PARAMETER Experiment Name: At_Open_Flower_P Parameter: Age (day) Value: 21
  misc_feature: MA Experiment 20000265 PARAMETER Experiment Name: At_Open_Flower_P Parameter: Plant Line Value: WS
  misc_feature: MA Experiment 20000265 PARAMETER Experiment Name: At_Open_Flower_P Parameter: Tissue Value: Closed Flower vs. Whole Plant
  misc_feature: MA Experiment ID: 20000286 Result: Up-regulated in Transcription
  misc_feature: MA Experiment 20000286 PARAMETER Experiment Name: At_Open_Flower_P Parameter: Age (day) Value: 21
  misc_feature: MA Experiment 20000286 PARAMETER Experiment Name: At_Open_Flower_P Parameter: Plant Line Value: WS
  misc_feature: MA Experiment 20000286 PARAMETER Experiment Name: At_Open_Flower_P Parameter: Tissue Value: Half Open vs. Whole Plant
  misc_feature: MA Experiment ID: 20000437 Result: Down-regulated in Transcription
  misc_feature: MA Experiment 20000437 PARAMETER Experiment Name: At_Drought_P Parameter: Age (day) Value: 8
  misc_feature: MA Experiment 20000437 PARAMETER Experiment Name: At_Drought_P Parameter: Organism Value: A. thaliana
  misc_feature: MA Experiment 20000437 PARAMETER Experiment Name: At_Drought_P Parameter: Plant Line Value: WS
  misc_feature: MA Experiment 20000437 PARAMETER Experiment Name: At_Drought_P Parameter: Timepoint (hr) Value: 24
  misc_feature: MA Experiment 20000437 PARAMETER Experiment Name: At_Drought_P Parameter: Tissue Value: Whole Plant
  misc_feature: MA Experiment 20000437 PARAMETER Experiment Name: At_Drought_P Parameter: Treatment Value: Drought vs. No Drought
  misc_feature: MA Experiment ID: 20000439 Result: Down-regulated in Transcription
  misc_feature: MA Experiment 20000439 PARAMETER Experiment Name: At_Roots__P Parameter: Age (day) Value: 14 vs. 21
  misc_feature: MA Experiment 20000439 PARAMETER Experiment Name: At_Roots__P Parameter: Organism Value: A. thaliana
  misc_feature: MA Experiment 20000439 PARAMETER Experiment Name: At_Roots__P Parameter: Tissue Value: Roots vs. Whole Plant
  misc_feature: MA Experiment ID: 20000451 Result: Up-regulated in Transcription
  misc_feature: MA Experiment 20000451 PARAMETER Experiment Name: At_CS6879_Shoots-Roots_P Parameter: Age (day) Value: 14
  misc_feature: MA Experiment 20000451 PARAMETER Experiment Name: At_CS6879_Shoots-Roots_P Parameter: Organism Value: A. thaliana
  misc_feature: MA Experiment 20000451 PARAMETER Experiment Name: At_CS6879_Shoots-Roots_P Parameter: Plant Line Value: CS6879 vs. WS
  misc_feature: MA Experiment 20000451 PARAMETER Experiment Name: At_CS6879_Shoots-Roots_P Parameter: Tissue Value: Roots
  misc_feature: MA Experiment ID: 20000460 Result: Up-regulated in Transcription
  misc_feature: MA Experiment 20000460 PARAMETER Experiment Name: At_10percent_PEG_P Parameter: Age (day) Value: 12
  misc_feature: MA Experiment 20000460 PARAMETER Experiment Name: At_10percent_PEG_P Parameter: Organism Value: A. thaliana
  misc_feature: MA Experiment 20000460 PARAMETER Experiment Name: At_10percent_PEG_P Parameter: Plant Line Value: WS
  misc_feature: MA Experiment 20000460 PARAMETER Experiment Name: At_10percent_PEG_P Parameter: Timepoint (day) Value: 12
  misc_feature: MA Experiment 20000460 PARAMETER Experiment Name: At_10percent_PEG_P Parameter: Tissue Value: Whole Plant
  misc_feature: MA Experiment 20000460 PARAMETER Experiment Name: At_10percent_PEG_P Parameter: Treatment Value: 10percent PEG vs. No Treatment
  misc_feature: MA Experiment ID: 20000495 Result: Up-regulated in Transcription
  misc_feature: MA Experiment 20000495 PARAMETER Experiment Name: At_Guard_Cells_P Parameter: Harvest Date Value: 8/2/2002
  misc_feature: MA Experiment 20000495 PARAMETER Experiment Name: At_Guard_Cells_P Parameter: Organism Value: A. thaliana
  misc_feature: MA Experiment 20000495 PARAMETER Experiment Name: At_Guard_Cells_P Parameter: Tissue Value: Guard Cells vs. Leaves
  misc_feature: MA Experiment ID: 20000573 Result: Down-regulated in Transcription
  misc_feature: MA Experiment 20000573 PARAMETER Experiment Name: At_100uM_ABA_Mutants__P Parameter: Organism Value: A. thaliana
  misc_feature: MA Experiment 20000573 PARAMETER Experiment Name: At_100uM_ABA_Mutants__P Parameter: Plant Line Value: CS22 vs. Ler wt
  misc_feature: MA Experiment 20000573 PARAMETER Experiment Name: At_100uM_ABA_Mutants__P Parameter: Timepoint (hr) Value: N/A
  misc_feature: MA Experiment 20000573 PARAMETER Experiment Name: At_100uM_ABA_Mutants__P Parameter: Tissue Value: Whole Plant
  misc_feature: MA Experiment 20000573 PARAMETER Experiment Name: At_100uM_ABA_Mutants__P Parameter: Treatment Value: None
  misc_feature: MA Experiment ID: 20000574 Result: Down-regulated in Transcription
  misc_feature: MA Experiment 20000574 PARAMETER Experiment Name: At_100uM_ABA_Mutants__P Parameter: Organism Value: A. thaliana
  misc_feature: MA Experiment 20000574 PARAMETER Experiment Name: At_100uM_ABA_Mutants__P Parameter: Plant Line Value: CS23 vs. Ler wt
  misc_feature: MA Experiment 20000574 PARAMETER Experiment Name: At_100uM_ABA_Mutants__P Parameter: Timepoint (hr) Value: N/A
  misc_feature: MA Experiment 20000574 PARAMETER Experiment Name: At_100uM_ABA_Mutants__P Parameter: Tissue Value: Whole Plant
  misc_feature: MA Experiment 20000574 PARAMETER Experiment Name: At_100uM_ABA_Mutants__P Parameter: Treatment Value: None
  misc_feature: MA Experiment ID: 20000794 Result: Down-regulated in Transcription
  misc_feature: MA Experiment 20000794 PARAMETER Experiment Name: At_Petals_P Parameter: Age (day) Value: 23-25 days
  misc_feature: MA Experiment 20000794 PARAMETER Experiment Name: At_Petals_P Parameter: Plant Line Value: WS
  misc_feature: MA Experiment 20000794 PARAMETER Experiment Name: At_Petals_P Parameter: Tissue Value: Petals vs. Whole plant
  misc_feature: MA Experiment ID: 20001248 Result: Down-regulated in Transcription
  misc_feature: MA Experiment 20001248 PARAMETER Experiment Name: At_Far-red-induction_P Parameter: Age (day) Value: 7
  misc_feature: MA Experiment 20001248 PARAMETER Experiment Name: At_Far-red-induction_P Parameter: Light Value: Far-red vs. White
  misc_feature: MA Experiment 20001248 PARAMETER Experiment Name: At_Far-red-induction_P Parameter: Organism Value: A. thaliana
  misc_feature: MA Experiment 20001248 PARAMETER Experiment Name: At_Far-red-induction_P Parameter: Plant Line Value: Columbia
  misc_feature: MA Experiment 20001248 PARAMETER Experiment Name: At_Far-red-induction_P Parameter: Timepoint (hr) Value: 4
  misc_feature: MA Experiment 20001248 PARAMETER Experiment Name: At_Far-red-induction_P Parameter: Tissue Value: Whole Plant
  misc_feature: MA Experiment ID: 20001450 Result: Down-regulated in Transcription
  misc_feature: MA Experiment 20001450 PARAMETER Experiment Name: At_Far-red-induction_P Parameter: Age (day) Value: 7
  misc_feature: MA Experiment 20001450 PARAMETER Experiment Name: At_Far-red-induction_P Parameter: Light Value: Far-red vs. White
  misc_feature: MA Experiment 20001450 PARAMETER Experiment Name: At_Far-red-induction_P Parameter: Organism Value: A. thaliana
  misc_feature: MA Experiment 20001450 PARAMETER Experiment Name: At_Far-red-induction_P Parameter: Plant Line Value: Columbia
  misc_feature: MA Experiment 20001450 PARAMETER Experiment Name: At_Far-red-induction_P Parameter: Timepoint (hr) Value: 8
  misc_feature: MA Experiment 20001450 PARAMETER Experiment Name: At_Far-red-induction_P Parameter: Tissue Value: Whole Plant
  misc_feature: MA Experiment ID: 20001451 Result: Down-regulated in Transcription
  misc_feature: MA Experiment 20001451 PARAMETER Experiment Name: At_Far-red-induction_P Parameter: Age (day) Value: 7
  misc_feature: MA Experiment 20001451 PARAMETER Experiment Name: At_Far-red-induction_P Parameter: Light Value: Far-red vs. White
  misc_feature: MA Experiment 20001451 PARAMETER Experiment Name: At_Far-red-induction_P Parameter: Organism Value: A. thaliana
  misc_feature: MA Experiment 20001451 PARAMETER Experiment Name: At_Far-red-induction_P Parameter: Plant Line Value: Columbia
  misc_feature: MA Experiment 20001451 PARAMETER Experiment Name: At_Far-red-induction_P Parameter: Timepoint (hr) Value: 24
  misc_feature: MA Experiment 20001451 PARAMETER Experiment Name: At_Far-red-induction_P Parameter: Tissue Value: Whole Plant
  misc_feature: MA Experiment ID: 20001457 Result: Up-regulated in Transcription
  misc_feature: MA Experiment 20001457 PARAMETER Experiment Name: At_50mM_NH4NO3_L-to-H_P Parameter: Age (day) Value: Undefined
  misc_feature: MA Experiment 20001457 PARAMETER Experiment Name: At_50mM_NH4NO3_L-to-H_P Parameter: Organism Value: Undefined
  misc_feature: MA Experiment 20001457 PARAMETER Experiment Name: At_50mM_NH4NO3_L-to-H_P Parameter: Plant Line Value: Undefined
  misc_feature: MA Experiment 20001457 PARAMETER Experiment Name: At_50mM_NH4NO3_L-to-H_P Parameter: Timepoint (hr) Value: 0.5
  misc_feature: MA Experiment 20001457 PARAMETER Experiment Name: At_50mM_NH4NO3_L-to-H_P Parameter: Tissue Value: Siliques
  misc_feature: MA Experiment 20001457 PARAMETER Experiment Name: At_50mM_NH4NO3_L-to-H_P Parameter: Treatment Value: 50mM NH4NO3 vs. 100mM Manitol
  misc_feature: MA Experiment ID: 20001555 Result: Down-regulated in Transcription
  misc_feature: MA Experiment 20001555 PARAMETER Experiment Name: At_Drought_Soil_Dry_P Parameter: Age (day) Value: 24
  misc_feature: MA Experiment 20001555 PARAMETER Experiment Name: At_Drought_Soil_Dry_P Parameter: Organism Value: A. thaliana
  misc_feature: MA Experiment 20001555 PARAMETER Experiment Name: At_Drought_Soil_Dry_P Parameter: Plant Line Value: WS
  misc_feature: MA Experiment 20001555 PARAMETER Experiment Name: At_Drought_Soil_Dry_P Parameter: Post Timepoint (hr) Value: None
  misc_feature: MA Experiment 20001555 PARAMETER Experiment Name: At_Drought_Soil_Dry_P Parameter: Post-Treatment Value: None
  misc_feature: MA Experiment 20001555 PARAMETER Experiment Name: At_Drought_Soil_Dry_P Parameter: Timepoint (day) Value: 10
  misc_feature: MA Experiment 20001555 PARAMETER Experiment Name: At_Drought_Soil_Dry_P Parameter: Treatment Value: Drought vs. No Drought
  misc_feature: MA Experiment ID: 20001556 Result: Down-regulated in Transcription
  misc_feature: MA Experiment 20001556 PARAMETER Experiment Name: At_Drought_Soil_Dry_P Parameter: Age (day) Value: 26
  misc_feature: MA Experiment 20001556 PARAMETER Experiment Name: At_Drought_Soil_Dry_P Parameter: Organism Value: A. thaliana
  misc_feature: MA Experiment 20001556 PARAMETER Experiment Name: At_Drought_Soil_Dry_P Parameter: Plant Line Value: WS
  misc_feature: MA Experiment 20001556 PARAMETER Experiment Name: At_Drought_Soil_Dry_P Parameter: Post Timepoint (hr) Value: None
  misc_feature: MA Experiment 20001556 PARAMETER Experiment Name: At_Drought_Soil_Dry_P Parameter: Post-Treatment Value: None
  misc_feature: MA Experiment 20001556 PARAMETER Experiment Name: At_Drought_Soil_Dry_P Parameter: Timepoint (day) Value: 12
  misc_feature: MA Experiment 20001556 PARAMETER Experiment Name: At_Drought_Soil_Dry_P Parameter: Treatment Value: Drought vs. No Drought
  misc_feature: MA Experiment ID: 20001558 Result: Up-regulated in Transcription
  misc_feature: MA Experiment 20001558 PARAMETER Experiment Name: At_Drought_Soil_Dry_P Parameter: Age (day) Value: 27
  misc_feature: MA Experiment 20001558 PARAMETER Experiment Name: At_Drought_Soil_Dry_P Parameter: Organism Value: A. thaliana
  misc_feature: MA Experiment 20001558 PARAMETER Experiment Name: At_Drought_Soil_Dry_P Parameter: Plant Line Value: WS
  misc_feature: MA Experiment 20001558 PARAMETER Experiment Name: At_Drought_Soil_Dry_P Parameter: Post Timepoint (hr) Value: 6
  misc_feature: MA Experiment 20001558 PARAMETER Experiment Name: At_Drought_Soil_Dry_P Parameter: Post-Treatment Value: Re-Water vs. No Drought
  misc_feature: MA Experiment 20001558 PARAMETER Experiment Name: At_Drought_Soil_Dry_P Parameter: Timepoint (day) Value: 13
  misc_feature: MA Experiment 20001558 PARAMETER Experiment Name: At_Drought_Soil_Dry_P Parameter: Treatment Value: Drought vs. No Drought
  misc_feature: MA Experiment ID: 20001559 Result: Down-regulated in Transcription
  misc_feature: MA Experiment 20001559 PARAMETER Experiment Name: At_Drought_Soil_Dry_P Parameter: Age (day) Value: 28
  misc_feature: MA Experiment 20001559 PARAMETER Experiment Name: At_Drought_Soil_Dry_P Parameter: Organism Value: A. thaliana
  misc_feature: MA Experiment 20001559 PARAMETER Experiment Name: At_Drought_Soil_Dry_P Parameter: Plant Line Value: WS
  misc_feature: MA Experiment 20001559 PARAMETER Experiment Name: At_Drought_Soil_Dry_P Parameter: Post Timepoint (hr) Value: 29
  misc_feature: MA Experiment 20001559 PARAMETER Experiment Name: At_Drought_Soil_Dry_P Parameter: Post-Treatment Value: Re-Water vs. No Drought
  misc_feature: MA Experiment 20001559 PARAMETER Experiment Name: At_Drought_Soil_Dry_P Parameter: Timepoint (day) Value: 14
  misc_feature: MA Experiment 20001559 PARAMETER Experiment Name: At_Drought_Soil_Dry_P Parameter: Treatment Value: Drought vs. No Drought
  misc_feature: MA Experiment ID: 20001560 Result: Up-regulated in Transcription
  misc_feature: MA Experiment 20001560 PARAMETER Experiment Name: At_Drought_Soil_Dry_P Parameter: Age (day) Value: 28
  misc_feature: MA Experiment 20001560 PARAMETER Experiment Name: At_Drought_Soil_Dry_P Parameter: Organism Value: A. thaliana
  misc_feature: MA Experiment 20001560 PARAMETER Experiment Name: At_Drought_Soil_Dry_P Parameter: Plant Line Value: WS
  misc_feature: MA Experiment 20001560 PARAMETER Experiment Name: At_Drought_Soil_Dry_P Parameter: Post Timepoint (hr) Value: None
  misc_feature: MA Experiment 20001560 PARAMETER Experiment Name: At_Drought_Soil_Dry_P Parameter: Post-Treatment Value: None
  misc_feature: MA Experiment 20001560 PARAMETER Experiment Name: At_Drought_Soil_Dry_P Parameter: Timepoint (day) Value: 14
  misc_feature: MA Experiment 20001560 PARAMETER Experiment Name: At_Drought_Soil_Dry_P Parameter: Treatment Value: Drought vs. No Drought
aaccataacacaaatacaccaaaaaaaaaaaaacagaaagtaacatgagatctctcttattagccgtgtgcctggttcttgctttacactgcggtgaagcagccgtgtcttgcaacacggtgattgcggatctttacccttgcttatcctacgtgactcagggcggaccggtcccaaccctctgctgcaacggtctcacaacactcaagagtcaggctcaaacttctgtggaccgtcagggggtctgtcgttgcatcaaatctgctattggaggactcactctctctcctagaaccatccaaaatgctttggaattgccttctaaatgtggtgtcgatctcccttacaagttcagcccttccactgactgcgacagtatccagtgagacaagcagaaaatcttaaaggaagctactacaagaactataataacctaataattaataaatgagggcattggtttgctagttgctaattgatcagtgatgtattgtcattttgaatgttctaatatcagcaggcacttatctctg

SEQ ID NO: 36177 - protein, 113 aa, Arabidopsis thaliana
  peptide (1)..(113): Ceres Seq. ID no. 12673735
  misc_feature (23)..(109): Pfam Name: Protease inhibitor/seed storage/LTP family Pfam Description: Protease inhibitor/seed storage/LTP family
  misc_feature (5)..(113): Homolog of NCBI NO: 11095210 NR Description: lipid transfer protein 3 precursor [Gossypium
  misc_feature (3)..(113): Homolog of NCBI NO: 18477856 NR Description: lipid transfer protein [Fragaria x ananassa]
  misc_feature (9)..(113): Homolog of NCBI NO: 7438274 NR Description: lipid transfer protein SDi-9, drought-induced -
  misc_feature (5)..(113): Homolog of NCBI NO: 16930759 NR Description: lipid transfer protein-like protein [Retama
  misc_feature (9)..(113): Homolog of NCBI NO: 6093512 NR Description: NONSPECIFIC LIPID-TRANSFER PROTEIN PRECURSOR
  misc_feature (4)..(113): Homolog of NCBI NO: 2497753 NR Description: NONSPECIFIC LIPID-TRANSFER PROTEIN 3 PRECURSOR
  misc_feature (3)..(113): Homolog of NCBI NO: 6782436 NR Description: lipid-transfer protein [Nicotiana glauca]
  misc_feature (8)..(113): Homolog of NCBI NO: 16903206 NR Description: lipid transfer protein precursor [Davidia
  misc_feature (1)..(113): Homolog of NCBI NO: 15241086 NR Description: lipid-transfer protein-like; protein id:
  misc_feature (1)..(113): Homolog of NCBI NO: 15231964 NR Description: putative nonspecific lipid-transfer protein
MRSLLLAVCLVLALHCGEAAVSCNTVIADLYPCLSYVTQGGPVPTLCCNGLTTLKSQAQTSVDRQGVCRCIKSAIGGLTLSPRTIQNALELPSKCGVDLPYKFSPSTDCDSIQ

SEQ ID NO: 36178 - DNA, 758 bp, Arabidopsis thaliana
  misc_feature (1)..(758): Ceres Seq. ID no. 13487077
  misc_feature: MA Experiment ID: 108434 Result: Down-regulated in Transcription
  misc_feature: MA Experiment 108434 PARAMETER Experiment Name: At_Root_Tips_cDNA_P Parameter: Tissue Value: Root Tips
  misc_feature: MA Experiment ID: 108462 Result: Up-regulated in Transcription
  misc_feature: MA Experiment 108462 PARAMETER Experiment Name: At_Germinating_Seeds_cDNA_P Parameter: Age (day) Value: 2 vs. 0
  misc_feature: MA Experiment 108462 PARAMETER Experiment Name: At_Germinating_Seeds_cDNA_P Parameter: Tissue Value: Germinating Seeds
  misc_feature: MA Experiment ID: 108463 Result: Up-regulated in Transcription
  misc_feature: MA Experiment 108463 PARAMETER Experiment Name: At_Germinating_Seeds_cDNA_P Parameter: Age (day) Value: 3 vs. 0
  misc_feature: MA Experiment 108463 PARAMETER Experiment Name: At_Germinating_Seeds_cDNA_P Parameter: Tissue Value: Germinating Seeds
  misc_feature: MA Experiment ID: 108464 Result: Up-regulated in Transcription
  misc_feature: MA Experiment 108464 PARAMETER Experiment Name: At_Germinating_Seeds_cDNA_P Parameter: Age (day) Value: 4 vs. 0
  misc_feature: MA Experiment 108464 PARAMETER Experiment Name: At_Germinating_Seeds_cDNA_P Parameter: Tissue Value: Germinating Seeds
  misc_feature: MA Experiment ID: 108489 Result: Down-regulated in Transcription
  misc_feature: MA Experiment ID: 108573 Result: Up-regulated in Transcription
  misc_feature: MA Experiment 108573 PARAMETER Experiment Name: At_Drought_cDNA_P Parameter: Timepoint (hr) Value: 6
  misc_feature: MA Experiment 108573 PARAMETER Experiment Name: At_Drought_cDNA_P Parameter: Tissue Value: Aerial
  misc_feature: MA Experiment 108573 PARAMETER Experiment Name: At_Drought_cDNA_P Parameter: Treatment Value: Drought vs. No Drought
  misc_feature: MA Experiment ID: 108576 Result: Up-regulated in Transcription
  misc_feature: MA Experiment 108576 PARAMETER Experiment Name: At_42deg_Heat_cDNA_P Parameter: Temperature (deg C) Value: 42 vs. 22
  misc_feature: MA Experiment 108576 PARAMETER Experiment Name: At_42deg_Heat_cDNA_P Parameter: Timepoint (hr) Value: 1
  misc_feature: MA Experiment 108576 PARAMETER Experiment Name: At_42deg_Heat_cDNA_P Parameter: Tissue Value: Aerial
  misc_feature: MA Experiment ID: 108577 Result: Up-regulated in Transcription
  misc_feature: MA Experiment 108577 PARAMETER Experiment Name: At_42deg_Heat_cDNA_P Parameter: Temperature (deg C) Value: 42 vs. 22
  misc_feature: MA Experiment 108577 PARAMETER Experiment Name: At_42deg_Heat_cDNA_P Parameter: Timepoint (hr) Value: 6
  misc_feature: MA Experiment 108577 PARAMETER Experiment Name: At_42deg_Heat_cDNA_P Parameter: Tissue Value: Aerial
  misc_feature: MA Experiment ID: 108595 Result: Down-regulated in Transcription
  misc_feature: MA Experiment 108595 PARAMETER Experiment Name: At_Ler-pi_Ovule_cDNA_P Parameter: Plant Line Value: null
  misc_feature: MA Experiment ID: 108605 Result: Up-regulated in Transcription
  misc_feature: MA Experiment 108605 PARAMETER Experiment Name: At_100uM_ABA_cDNA_P Parameter: Timepoint (hr) Value: 6
  misc_feature: MA Experiment 108605 PARAMETER Experiment Name: At_100uM_ABA_cDNA_P Parameter: Tissue Value: Aerial
  misc_feature: MA Experiment 108605 PARAMETER Experiment Name: At_100uM_ABA_cDNA_P Parameter: Treatment Value: 100uM ABA vs. No Treatment
  misc_feature: MA Experiment ID: 108607 Result: Up-regulated in Transcription
  misc_feature: MA Experiment 108607 PARAMETER Experiment Name: At_100uM_ABA_cDNA_P Parameter: Timepoint (hr) Value: 4
  misc_feature: MA Experiment 108607 PARAMETER Experiment Name: At_100uM_ABA_cDNA_P Parameter: Tissue Value: Aerial
  misc_feature: MA Experiment 108607 PARAMETER Experiment Name: At_100uM_ABA_cDNA_P Parameter: Treatment Value: 100uM ABA vs. No Treatment
  misc_feature: MA Experiment ID: 20000089 Result: Down-regulated in Transcription
  misc_feature: MA Experiment ID: 20000166 Result: Up-regulated in Transcription
  misc_feature: MA Experiment 20000166 PARAMETER Experiment Name: At_100uM_ABA_P Parameter: Age (day) Value: 14
  misc_feature: MA Experiment 20000166 PARAMETER Experiment Name: At_100uM_ABA_P Parameter: Organism Value: A. thaliana
  misc_feature: MA Experiment 20000166 PARAMETER Experiment Name: At_100uM_ABA_P Parameter: Plant Line Value: WS
  misc_feature: MA Experiment 20000166 PARAMETER Experiment Name: At_100uM_ABA_P Parameter: Timepoint (hr) Value: 1
  misc_feature: MA Experiment 20000166 PARAMETER Experiment Name: At_100uM_ABA_P Parameter: Tissue Value: Aerial
  misc_feature: MA Experiment 20000166 PARAMETER Experiment Name: At_100uM_ABA_P Parameter: Treatment Value: 100uM ABA vs. No Treatment
  misc_feature: MA Experiment ID: 20000169 Result: Up-regulated in Transcription
  misc_feature: MA Experiment 20000169 PARAMETER Experiment Name: At_100uM_ABA_P Parameter: Age (day) Value: 14
  misc_feature: MA Experiment 20000169 PARAMETER Experiment Name: At_100uM_ABA_P Parameter: Organism Value: A. thaliana
  misc_feature: MA Experiment 20000169 PARAMETER Experiment Name: At_100uM_ABA_P Parameter: Plant Line Value: WS
  misc_feature: MA Experiment 20000169 PARAMETER Experiment Name: At_100uM_ABA_P Parameter: Timepoint (hr) Value: 6
  misc_feature: MA Experiment 20000169 PARAMETER Experiment Name: At_100uM_ABA_P Parameter: Tissue Value: Aerial
  misc_feature: MA Experiment 20000169 PARAMETER Experiment Name: At_100uM_ABA_P Parameter: Treatment Value: 100uM ABA vs. No Treatment
  misc_feature: MA Experiment ID: 20000171 Result: Up-regulated in Transcription
  misc_feature: MA Experiment 20000171 PARAMETER Experiment Name: At_42deg_Heat_P Parameter: Age (day) Value: 14
  misc_feature: MA Experiment 20000171 PARAMETER Experiment Name: At_42deg_Heat_P Parameter: Organism Value: A. thaliana
  misc_feature: MA Experiment 20000171 PARAMETER Experiment Name: At_42deg_Heat_P Parameter: Plant Line Value: WS
  misc_feature: MA Experiment 20000171 PARAMETER Experiment Name: At_42deg_Heat_P Parameter: Temperature (deg C) Value: 42 vs. 22
  misc_feature: MA Experiment 20000171 PARAMETER Experiment Name: At_42deg_Heat_P Parameter: Timepoint (hr) Value: 1
  misc_feature: MA Experiment 20000171 PARAMETER Experiment Name: At_42deg_Heat_P Parameter: Tissue Value: Aerial
  misc_feature: MA Experiment ID: 20000173 Result: Up-regulated in Transcription
  misc_feature: MA Experiment 20000173 PARAMETER Experiment Name: At_42deg_Heat_P Parameter: Age (day) Value: 14
  misc_feature: MA Experiment 20000173 PARAMETER Experiment Name: At_42deg_Heat_P Parameter: Organism Value: A. thaliana
  misc_feature: MA Experiment 20000173 PARAMETER Experiment Name: At_42deg_Heat_P Parameter: Plant Line Value: WS
  misc_feature: MA Experiment 20000173 PARAMETER Experiment Name: At_42deg_Heat_P Parameter: Temperature (deg C) Value: 42 vs. 22
  misc_feature: MA Experiment 20000173 PARAMETER Experiment Name: At_42deg_Heat_P Parameter: Timepoint (hr) Value: 6
  misc_feature: MA Experiment 20000173 PARAMETER Experiment Name: At_42deg_Heat_P Parameter: Tissue Value: Aerial
  misc_feature: MA Experiment ID: 20000267 Result: Up-regulated in Transcription
  misc_feature: MA Experiment 20000267 PARAMETER Experiment Name: At_Drought_P Parameter: Age (day) Value: 7
  misc_feature: MA Experiment 20000267 PARAMETER Experiment Name: At_Drought_P Parameter: Organism Value: A. thaliana
  misc_feature: MA Experiment 20000267 PARAMETER Experiment Name: At_Drought_P Parameter: Plant Line Value: WS
  misc_feature: MA Experiment 20000267 PARAMETER Experiment Name: At_Drought_P Parameter: Timepoint (hr) Value: 6
  misc_feature: MA Experiment 20000267 PARAMETER Experiment Name: At_Drought_P Parameter: Tissue Value: Whole Plant
  misc_feature: MA Experiment 20000267 PARAMETER Experiment Name: At_Drought_P Parameter: Treatment Value: Drought vs. No Drought
  misc_feature: MA Experiment ID: 20000437 Result: Up-regulated in Transcription
  misc_feature: MA Experiment 20000437 PARAMETER Experiment Name: At_Drought_P Parameter: Age (day) Value: 8
  misc_feature: MA Experiment 20000437 PARAMETER Experiment Name: At_Drought_P Parameter: Organism Value: A. thaliana
  misc_feature: MA Experiment 20000437 PARAMETER Experiment Name: At_Drought_P Parameter: Plant Line Value: WS
  misc_feature: MA Experiment 20000437 PARAMETER Experiment Name: At_Drought_P Parameter: Timepoint (hr) Value: 24
  misc_feature: MA Experiment 20000437 PARAMETER Experiment Name: At_Drought_P Parameter: Tissue Value: Whole Plant
  misc_feature: MA Experiment 20000437 PARAMETER Experiment Name: At_Drought_P Parameter: Treatment Value: Drought vs. No Drought
  misc_feature: MA Experiment ID: 20000438 Result: Up-regulated in Transcription
  misc_feature: MA Experiment 20000438 PARAMETER Experiment Name: At_Shoots__P Parameter: Age (day) Value: 14
  misc_feature: MA Experiment 20000438 PARAMETER Experiment Name: At_Shoots__P Parameter: Tissue Value: Shoots vs. Whole Plant
  misc_feature: MA Experiment ID: 20000453 Result: Up-regulated in Transcription
  misc_feature: MA Experiment 20000453 PARAMETER Experiment Name: At_100uM_ABA_P Parameter: Age (day) Value: 15
  misc_feature: MA Experiment 20000453 PARAMETER Experiment Name: At_100uM_ABA_P Parameter: Organism Value: A. thaliana
  misc_feature: MA Experiment 20000453 PARAMETER Experiment Name: At_100uM_ABA_P Parameter: Plant Line Value: WS
  misc_feature: MA Experiment 20000453 PARAMETER Experiment Name: At_100uM_ABA_P Parameter: Timepoint (hr) Value: 24
  misc_feature: MA Experiment 20000453 PARAMETER Experiment Name: At_100uM_ABA_P Parameter: Tissue Value: Aerial
  misc_feature: MA Experiment 20000453 PARAMETER Experiment Name: At_100uM_ABA_P Parameter: Treatment Value: 100uM ABA vs. No Treatment
  misc_feature: MA Experiment ID: 20000573 Result: Down-regulated in Transcription
  misc_feature: MA Experiment 20000573 PARAMETER Experiment Name: At_100uM_ABA_Mutants__P Parameter: Organism Value: A. thaliana
  misc_feature: MA Experiment 20000573 PARAMETER Experiment Name: At_100uM_ABA_Mutants__P Parameter: Plant Line Value: CS22 vs. Ler wt
  misc_feature: MA Experiment 20000573 PARAMETER Experiment Name: At_100uM_ABA_Mutants__P Parameter: Timepoint (hr) Value: N/A
  misc_feature: MA Experiment 20000573 PARAMETER Experiment Name: At_100uM_ABA_Mutants__P Parameter: Tissue Value: Whole Plant
  misc_feature: MA Experiment 20000573 PARAMETER Experiment Name: At_100uM_ABA_Mutants__P Parameter: Treatment Value: None
  misc_feature: MA Experiment ID: 20000574 Result: Down-regulated in Transcription
  misc_feature: MA Experiment 20000574 PARAMETER Experiment Name: At_100uM_ABA_Mutants__P Parameter: Organism Value: A. thaliana
  misc_feature: MA Experiment 20000574 PARAMETER Experiment Name: At_100uM_ABA_Mutants__P Parameter: Plant Line Value: CS23 vs. Ler wt
  misc_feature: MA Experiment 20000574 PARAMETER Experiment Name: At_100uM_ABA_Mutants__P Parameter: Timepoint (hr) Value: N/A
  misc_feature: MA Experiment 20000574 PARAMETER Experiment Name: At_100uM_ABA_Mutants__P Parameter: Tissue Value: Whole Plant
  misc_feature: MA Experiment 20000574 PARAMETER Experiment Name: At_100uM_ABA_Mutants__P Parameter: Treatment Value: None
  misc_feature: MA Experiment ID: 20001248 Result: Down-regulated in Transcription
  misc_feature: MA Experiment 20001248 PARAMETER Experiment Name: At_Far-red-induction_P Parameter: Age (day) Value: 7
  misc_feature: MA Experiment 20001248 PARAMETER Experiment Name: At_Far-red-induction_P Parameter: Light Value: Far-red vs. White
  misc_feature: MA Experiment 20001248 PARAMETER Experiment Name: At_Far-red-induction_P Parameter: Organism Value: A. thaliana
  misc_feature: MA Experiment 20001248 PARAMETER Experiment Name: At_Far-red-induction_P Parameter: Plant Line Value: Columbia
  misc_feature: MA Experiment 20001248 PARAMETER Experiment Name: At_Far-red-induction_P Parameter: Timepoint (hr) Value: 4
  misc_feature: MA Experiment 20001248 PARAMETER Experiment Name: At_Far-red-induction_P Parameter: Tissue Value: Whole Plant
  misc_feature: MA Experiment ID: 20001458 Result: Down-regulated in Transcription
  misc_feature: MA Experiment 20001458 PARAMETER Experiment Name: At_50mM_NH4NO3_L-to-H_P Parameter: Age (day) Value: Undefined
  misc_feature: MA Experiment 20001458 PARAMETER Experiment Name: At_50mM_NH4NO3_L-to-H_P Parameter: Organism Value: Undefined
  misc_feature: MA Experiment 20001458 PARAMETER Experiment Name: At_50mM_NH4NO3_L-to-H_P Parameter: Plant Line Value: Undefined
  misc_feature: MA Experiment 20001458 PARAMETER Experiment Name: At_50mM_NH4NO3_L-to-H_P Parameter: Timepoint (hr) Value: 2
  misc_feature: MA Experiment 20001458 PARAMETER Experiment Name: At_50mM_NH4NO3_L-to-H_P Parameter: Tissue Value: Siliques
  misc_feature: MA Experiment 20001458 PARAMETER Experiment Name: At_50mM_NH4NO3_L-to-H_P Parameter: Treatment Value: 50mM NH4NO3 vs. 100mM Manitol
  misc_feature: MA Experiment ID: 20001554 Result: Up-regulated in Transcription
  misc_feature: MA Experiment 20001554 PARAMETER Experiment Name: At_Drought_Soil_Dry_P Parameter: Age (day) Value: 21
  misc_feature: MA Experiment 20001554 PARAMETER Experiment Name: At_Drought_Soil_Dry_P Parameter: Organism Value: A. thaliana
  misc_feature: MA Experiment 20001554 PARAMETER Experiment Name: At_Drought_Soil_Dry_P Parameter: Plant Line Value: WS
  misc_feature: MA Experiment 20001554 PARAMETER Experiment Name: At_Drought_Soil_Dry_P Parameter: Post Timepoint (hr) Value: None
  misc_feature: MA Experiment 20001554 PARAMETER Experiment Name: At_Drought_Soil_Dry_P Parameter: Post-Treatment Value: None
  misc_feature: MA Experiment 20001554 PARAMETER Experiment Name: At_Drought_Soil_Dry_P Parameter: Timepoint (day) Value: 7
  misc_feature: MA Experiment 20001554 PARAMETER Experiment Name: At_Drought_Soil_Dry_P Parameter: Treatment Value: Drought vs. No Drought
  misc_feature: MA Experiment ID: 20001555 Result: Up-regulated in Transcription
  misc_feature: MA Experiment 20001555 PARAMETER Experiment Name: At_Drought_Soil_Dry_P Parameter: Age (day) Value: 24
  misc_feature: MA Experiment 20001555 PARAMETER Experiment Name: At_Drought_Soil_Dry_P Parameter: Organism Value: A. thaliana
  misc_feature: MA Experiment 20001555 PARAMETER Experiment Name: At_Drought_Soil_Dry_P Parameter: Plant Line Value: WS
  misc_feature: MA Experiment 20001555 PARAMETER Experiment Name: At_Drought_Soil_Dry_P Parameter: Post Timepoint (hr) Value: None
  misc_feature: MA Experiment 20001555 PARAMETER Experiment Name: At_Drought_Soil_Dry_P Parameter: Post-Treatment Value: None
  misc_feature: MA Experiment 20001555 PARAMETER Experiment Name: At_Drought_Soil_Dry_P Parameter: Timepoint (day) Value: 10
  misc_feature: MA Experiment 20001555 PARAMETER Experiment Name: At_Drought_Soil_Dry_P Parameter: Treatment Value: Drought vs. No Drought
  misc_feature: MA Experiment ID: 20001557 Result: Down-regulated in Transcription
  misc_feature: MA Experiment 20001557 PARAMETER Experiment Name: At_Drought_Soil_Dry_P Parameter: Age (day) Value: 27
  misc_feature: MA Experiment 20001557 PARAMETER Experiment Name: At_Drought_Soil_Dry_P Parameter: Organism Value: A. thaliana
  misc_feature: MA Experiment 20001557 PARAMETER Experiment Name: At_Drought_Soil_Dry_P Parameter: Plant Line Value: WS
  misc_feature: MA Experiment 20001557 PARAMETER Experiment Name: At_Drought_Soil_Dry_P Parameter: Post Timepoint (hr) Value: 3
  misc_feature: MA Experiment 20001557 PARAMETER Experiment Name: At_Drought_Soil_Dry_P Parameter: Post-Treatment Value: Re-Water vs. No Drought
  misc_feature: MA Experiment 20001557 PARAMETER Experiment Name: At_Drought_Soil_Dry_P Parameter: Timepoint (day) Value: 13
  misc_feature: MA Experiment 20001557 PARAMETER Experiment Name: At_Drought_Soil_Dry_P Parameter: Treatment Value: Drought vs. No Drought
  misc_feature: MA Experiment ID: 20001558 Result: Down-regulated in Transcription
  misc_feature: MA Experiment 20001558 PARAMETER Experiment Name: At_Drought_Soil_Dry_P Parameter: Age (day) Value: 27
  misc_feature: MA Experiment 20001558 PARAMETER Experiment Name: At_Drought_Soil_Dry_P Parameter: Organism Value: A. thaliana
  misc_feature: MA Experiment 20001558 PARAMETER Experiment Name: At_Drought_Soil_Dry_P Parameter: Plant Line Value: WS
  misc_feature: MA Experiment 20001558 PARAMETER Experiment Name: At_Drought_Soil_Dry_P Parameter: Post Timepoint (hr) Value: 6
  misc_feature: MA Experiment 20001558 PARAMETER Experiment Name: At_Drought_Soil_Dry_P Parameter: Post-Treatment Value: Re-Water vs. No Drought
  misc_feature: MA Experiment 20001558 PARAMETER Experiment Name: At_Drought_Soil_Dry_P Parameter: Timepoint (day) Value: 13
  misc_feature: MA Experiment 20001558 PARAMETER Experiment Name: At_Drought_Soil_Dry_P Parameter: Treatment Value: Drought vs. No Drought
  misc_feature: MA Experiment ID: 20001560 Result: Down-regulated in Transcription
  misc_feature: MA Experiment 20001560 PARAMETER Experiment Name: At_Drought_Soil_Dry_P Parameter: Age (day) Value: 28
  misc_feature: MA Experiment 20001560 PARAMETER Experiment Name: At_Drought_Soil_Dry_P Parameter: Organism Value: A. thaliana
  misc_feature: MA Experiment 20001560 PARAMETER Experiment Name: At_Drought_Soil_Dry_P Parameter: Plant Line Value: WS
  misc_feature: MA Experiment 20001560 PARAMETER Experiment Name: At_Drought_Soil_Dry_P Parameter: Post Timepoint (hr) Value: None
  misc_feature: MA Experiment 20001560 PARAMETER Experiment Name: At_Drought_Soil_Dry_P Parameter: Post-Treatment Value: None
  misc_feature: MA Experiment 20001560 PARAMETER Experiment Name: At_Drought_Soil_Dry_P Parameter: Timepoint (day) Value: 14
  misc_feature: MA Experiment 20001560 PARAMETER Experiment Name: At_Drought_Soil_Dry_P Parameter: Treatment Value: Drought vs. No Drought
  misc_feature: MA Experiment ID: 20001906 Result: Up-regulated in Transcription
  misc_feature: MA Experiment 20001906 PARAMETER Experiment Name: At_Drought_Reproduction_P Parameter: Age (day) Value: 35
  misc_feature: MA Experiment 20001906 PARAMETER Experiment Name: At_Drought_Reproduction_P Parameter: Organism Value: A. thaliana
  misc_feature: MA Experiment 20001906 PARAMETER Experiment Name: At_Drought_Reproduction_P Parameter: Plant Line Value: WS
  misc_feature: MA Experiment 20001906 PARAMETER Experiment Name: At_Drought_Reproduction_P Parameter: Timepoint (day) Value: 5
  misc_feature: MA Experiment 20001906 PARAMETER Experiment Name: At_Drought_Reproduction_P Parameter: Tissue Value: Siliques
  misc_feature: MA Experiment 20001906 PARAMETER Experiment Name: At_Drought_Reproduction_P Parameter: Treatment Value: Drought vs. No Drought
  misc_feature: MA Experiment ID: 20001911 Result: Up-regulated in Transcription
  misc_feature: MA Experiment 20001911 PARAMETER Experiment Name: At_Drought_Reproduction_P Parameter: Age (day) Value: 40
  misc_feature: MA Experiment 20001911 PARAMETER Experiment Name: At_Drought_Reproduction_P Parameter: Organism Value: A. thaliana
  misc_feature: MA Experiment 20001911 PARAMETER Experiment Name: At_Drought_Reproduction_P Parameter: Plant Line Value: WS
  misc_feature: MA Experiment 20001911 PARAMETER Experiment Name: At_Drought_Reproduction_P Parameter: Timepoint (day) Value: 10
  misc_feature: MA Experiment 20001911 PARAMETER Experiment Name: At_Drought_Reproduction_P Parameter: Tissue Value: Flowers
  misc_feature: MA Experiment 20001911 PARAMETER Experiment Name: At_Drought_Reproduction_P Parameter: Treatment Value: Drought vs. No Drought
aaaaaaaaaaaagcatttacacaacgaagatcattaatggctctcgaggcatggtttatggatgatagcaatgaggaccagagacttcctcatcatcgtaacccgaaagaactcgtctcgttggattacttggcagagttgggagtgttgtactggaagttgaaccctgagaactacgagaatgattctgaacttagcaagattagagaagacaggggttacgattacatggatttgctggatctgtgtcccgagaaagtcagcaactacgaagaaaagctgaagaactttttcacagaacacattcacaaggacgaagagattcggtactgcctagcaggaagtggctactttgatgttagggacaaggatgatcgttggatccgtatctggatgcaacctggcgatctcattgtccttcctgccggaatctaccaccggttcacactcgacgccagcaactacatcaagctaatgaggctgttcgtgggggaaccggtttggacaccatataaccggccacaggaagaacatcctgttaggaaaaagtatatccacggcttaacctacaagtttggagaaaccgttaaagcacattaacaatattaatatatgcttgttgtgtaatttgtatgtattgtttactctttagtcttaagcagtaaaataaaaacagcggctccttctggatagttgttcttgtaacatacttttgcgatgtatgcttttatacataaaaaaaatagtgtgtatttatc

SEQ ID NO: 36179 - protein, 199 aa, Arabidopsis thaliana
  peptide (1)..(199): Ceres Seq. ID no. 13487078
  misc_feature (16)..(170): Pfam Name: ARD/ARD' family Pfam Description: ARD/ARD' family
  misc_feature (15)..(198): Homolog of NCBI NO: 34902616 NR Description: Putative probable submergence induced,
  misc_feature (15)..(194): Homolog of NCBI NO: 37534408 NR Description: putative zinc finger protein ID1
  misc_feature (15)..(194): Homolog of NCBI NO: 7489558 NR Description: probable submergence induced protein 2 - rice
  misc_feature (15)..(198): Homolog of NCBI NO: 14522834 NR Description: iron-deficiency induced gene [Hordeum vulgare]
  misc_feature (15)..(185): Homolog of NCBI NO: 18414293 NR Description: expressed protein [Arabidopsis thaliana]
  misc_feature (15)..(198): Homolog of NCBI NO: 7489559 NR Description: probable submergence induced, nickel-binding
  misc_feature (15)..(185): Homolog of NCBI NO: 18414289 NR Description: expressed protein [Arabidopsis thaliana]
  misc_feature (13)..(199): Homolog of NCBI NO: 21554849 NR Description: submergence induced protein 2A [Arabidopsis
  misc_feature (15)..(199): Homolog of NCBI NO: 10177955 NR Description: gene_id:MQD19.21~pir||T02918~similar to unknown
  misc_feature (13)..(199): Homolog of NCBI NO: 18422379 NR Description: expressed protein [Arabidopsis thaliana]
KKKKAFTQRRSLMALEAWFMDDSNEDQRLPHHRNPKELVSLDYLAELGVLYWKLNPENYENDSELSKIREDRGYDYMDLLDLCPEKVSNYEEKLKNFFTEHIHKDEEIRYCLAGSGYFDVRDKDDRWIRIWMQPGDLIVLPAGIYHRFTLDASNYIKLMRLFVGEPVWTPYNRPQEEHPVRKKYIHGLTYKFGETVKAH

SEQ ID NO: 36180 - protein, 187 aa, Arabidopsis thaliana
  peptide (1)..(187): Ceres Seq. ID no. 13487079
  misc_feature (4)..(158): Pfam Name: ARD/ARD' family Pfam Description: ARD/ARD' family
  misc_feature (3)..(186): Homolog of NCBI NO: 34902616 NR Description: Putative probable submergence induced,
  misc_feature (3)..(182): Homolog of NCBI NO: 37534408 NR Description: putative zinc finger protein ID1
  misc_feature (3)..(182): Homolog of NCBI NO: 7489558 NR Description: probable submergence induced protein 2 - rice
  misc_feature (3)..(186): Homolog of NCBI NO: 14522834 NR Description: iron-deficiency induced gene [Hordeum vulgare]
  misc_feature (3)..(173): Homolog of NCBI NO: 18414293 NR Description: expressed protein [Arabidopsis thaliana]
  misc_feature (3)..(186): Homolog of NCBI NO: 7489559 NR Description: probable submergence induced, nickel-binding
  misc_feature (3)..(173): Homolog of NCBI NO: 18414289 NR Description: expressed protein [Arabidopsis thaliana]
  misc_feature (1)..(187): Homolog of NCBI NO: 21554849 NR Description: submergence induced protein 2A [Arabidopsis
  misc_feature (3)..(187): Homolog of NCBI NO: 10177955 NR Description: gene_id:MQD19.21~pir||T02918~similar to unknown
  misc_feature (1)..(187): Homolog of NCBI NO: 18422379 NR Description: expressed protein [Arabidopsis thaliana]
MALEAWFMDDSNEDQRLPHHRNPKELVSLDYLAELGVLYWKLNPENYENDSELSKIREDRGYDYMDLLDLCPEKVSNYEEKLKNFFTEHIHKDEEIRYCLAGSGYFDVRDKDDRWIRIWMQPGDLIVLPAGIYHRFTLDASNYIKLMRLFVGEPVWTPYNRPQEEHPVRKKYIHGLTYKFGETVKAH

SEQ ID NO: 36181 - protein, 180 aa, Arabidopsis thaliana
  peptide (1)..(180): Ceres Seq. ID no. 13487080
  misc_feature (1)..(151): Pfam Name: ARD/ARD' family Pfam Description: ARD/ARD' family
  misc_feature (1)..(179): Homolog of NCBI NO: 34902616 NR Description: Putative probable submergence induced,
  misc_feature (1)..(175): Homolog of NCBI NO: 37534408 NR Description: putative zinc finger protein ID1
  misc_feature (1)..(175): Homolog of NCBI NO: 7489558 NR Description: probable submergence induced protein 2 - rice
  misc_feature (1)..(179): Homolog of NCBI NO: 14522834 NR Description: iron-deficiency induced gene [Hordeum vulgare]
  misc_feature (1)..(166): Homolog of NCBI NO: 18414293 NR Description: expressed protein [Arabidopsis thaliana]
  misc_feature (1)..(179): Homolog of NCBI NO: 7489559 NR Description: probable submergence induced, nickel-binding
  misc_feature (1)..(166): Homolog of NCBI NO: 18414289 NR Description: expressed protein [Arabidopsis thaliana]
  misc_feature (1)..(180): Homolog of NCBI NO: 21554849 NR Description: submergence induced protein 2A [Arabidopsis
  misc_feature (1)..(180): Homolog of NCBI NO: 10177955 NR Description: gene_id:MQD19.21~pir||T02918~similar to unknown
  misc_feature (1)..(180): Homolog of NCBI NO: 18422379 NR Description: expressed protein [Arabidopsis thaliana]
MDDSNEDQRLPHHRNPKELVSLDYLAELGVLYWKLNPENYENDSELSKIREDRGYDYMDLLDLCPEKVSNYEEKLKNFFTEHIHKDEEIRYCLAGSGYFDVRDKDDRWIRIWMQPGDLIVLPAGIYHRFTLDASNYIKLMRLFVGEPVWTPYNRPQEEHPVRKKYIHGLTYKFGETVKAH

SEQ ID NO: 36182 - DNA, 1486 bp, Arabidopsis thaliana
  misc_feature (1)..(1486): Ceres Seq. ID no. 12370913
  misc_feature: MA Experiment ID: 108434 Result: Up-regulated in Transcription
  misc_feature: MA Experiment 108434 PARAMETER Experiment Name: At_Root_Tips_cDNA_P Parameter: Tissue Value: Root Tips
  misc_feature: MA Experiment ID: 20000234 Result: Up-regulated in Transcription
  misc_feature: MA Experiment 20000234 PARAMETER Experiment Name: At_Siliques_P Parameter: Age (day) Value: 21
  misc_feature: MA Experiment 20000234 PARAMETER Experiment Name: At_Siliques_P Parameter: Organism Value: A. thaliana
  misc_feature: MA Experiment 20000234 PARAMETER Experiment Name: At_Siliques_P Parameter: Plant Line Value: WS
  misc_feature: MA Experiment 20000234 PARAMETER Experiment Name: At_Siliques_P Parameter: Tissue Value: Less Than 5mm Siliques vs. Whole Plant
  misc_feature: MA Experiment ID: 20000264 Result: Up-regulated in Transcription
  misc_feature: MA Experiment 20000264 PARAMETER Experiment Name: At_Open_Flower_P Parameter: Age (day) Value: 21
  misc_feature: MA Experiment 20000264 PARAMETER Experiment Name: At_Open_Flower_P Parameter: Plant Line Value: WS
  misc_feature: MA Experiment 20000264 PARAMETER Experiment Name: At_Open_Flower_P Parameter: Tissue Value: Open Flower vs. Whole Plant
aacattctcattattcacccaaggagagagatcggagctaaaaagccatctctcgccggaaaatttctcagttttcttattaccttagccacagacaacaagacgacagaggaatctaatcttagccccctttcctctctgtctctctctatatctctgtctttaggctttgagatatcttcaacacgaagctttttgcttcttttttttatctctttaaaaaattccagccaatggttcgaatccaatagtagcttcaaaggtcatggatttagtcaggggtttgtggaggaaacatagaaggaagattttggtgacgacgacttgtttgggaagtgggtatttgctctataaactatacaatgcccatactcgtaagctcgctgatttggaacgagagcttgctaatgagcgtgaaaacgacgagatcatcaaaacccaaatgaaggcacatttcgataacattcagatgattgctgatactactacattgcctcacgcaattcatcacttgagtagtcgtgtagttgaagagattgatgtctcgagtattatggataagctaagcaaaggcaaaggaatattgattccttctgagaagcttcaactctggaatgagctcaaaattttgagtttcacgagaatggtcttgtccctttggtcggtcactatgcttagtttgtacattagggttcaagtcaatattttgggcagacatttatatatcgacactgctagaggtcttgggagctcccatttacttgacgaactagatctcatagagagagatgatgaacaaaagtttttgacaagcgctgattttcttgcgaccagtggcatgccgagtttgatttctaacatgcagaacgcagtgaaagaagttctcaagggaaagcagttaaaggatgtgttaaccacaagtgctcttcgagaaactgtgatgcggattctcgatgtgtttatgagcacaggaagtccacaccactgggtagattatctaatgatgtcccaagacgcaaccactgatgtttcctcttctgatgcaactgttaccaagtttcatctactcataaccgagacacgggaagtactcacaaacaatttttcaaatgtagcagagatctcactcaagtgttgtgccgttgcgttagtagaggagatggaaacgcagaccggtctggccacagggatgcaattggcaaagctattaccacagattgagaaaaccatgccggagatttcagctgagccggagaagaaccggttcttgcaactcatccgagatttgcctgaagttaaactcttttttactcttttatacgcaaatatgcctcagtagcattattaaaccccattgccaaaaattgtttcctgatcactttttatcatatgtttcgatttacttcaaaatagtaaaaccaaacatctctagaataattgttcaatatctatatcaaatcatttactaatatagtaatattgcagc

SEQ ID NO: 36183 - protein, 357 aa, Arabidopsis thaliana
  peptide (1)..(357): Ceres Seq. ID no. 12370914
  misc_feature (1)..(355): Pfam Name: Peroxin-3 Pfam Description: Peroxin-3
  misc_feature (3)..(299): Homolog of NCBI NO: 12230450 NR Description: Peroxisomal assembly protein PEX3 (Peroxin-3)
  misc_feature (9)..(352): Homolog of NCBI NO: 28278477 NR Description: Similar to peroxisomal biogenesis factor 3 [Danio
  misc_feature (167)..(357): Homolog of NCBI NO: 9294071 NR Description: gene_id:MRC8.15~unknown protein [Arabidopsis
  misc_feature (10)..(62): Homolog of NCBI NO: 12321594 NR Description: hypothetical protein, 3' partial [Arabidopsis
  misc_feature (55)..(333): Homolog of NCBI NO: 12321594 NR Description: hypothetical protein, 3' partial [Arabidopsis
  misc_feature (10)..(62): Homolog of NCBI NO: 12597815 NR Description: lysine and histidine specific transporter,
  misc_feature (55)..(344): Homolog of NCBI NO: 12597815 NR Description: lysine and histidine specific transporter,
  misc_feature (1)..(357): Homolog of NCBI NO: 22330115 NR Description: expressed protein
  misc_feature (1)..(357): Homolog of NCBI NO: 21554142 NR Description: unknown [Arabidopsis thaliana]
  misc_feature (1)..(357): Homolog of NCBI NO: 18401790 NR Description: expressed protein
MDLVRGLWRKHRRKILVTTTCLGSGYLLYKLYNAHTRKLADLERELANERENDEIIKTQMKAHFDNIQMIADTTTLPHAIHHLSSRVVEEIDVSSIMDKLSKGKGILIPSEKLQLWNELKILSFTRMVLSLWSVTMLSLYIRVQVNILGRHLYIDTARGLGSSHLLDELDLIERDDEQKFLTSADFLATSGMPSLISNMQNAVKEVLKGKQLKDVLTTSALRETVMRILDVFMSTGSPHHWVDYLMMSQDATTDVSSSDATVTKFHLLITETREVLTNNFSNVAEISLKCCAVALVEEMETQTGLATGMQLAKLLPQIEKTMPEISAEPEKNRFLQLIRDLPEVKLFFTLLYANMPQ

SEQ ID NO: 36184 - protein, 298 aa, Arabidopsis thaliana
  peptide (1)..(298): Ceres Seq. ID no. 12370915
  misc_feature (1)..(296): Pfam Name: Peroxin-3 Pfam Description: Peroxin-3
  misc_feature (1)..(240): Homolog of NCBI NO: 9910484 NR Description: peroxisomal biogenesis factor 3; peroxisomal
  misc_feature (1)..(240): Homolog of NCBI NO: 4505727 NR Description: peroxisomal biogenesis factor 3 [Homo sapiens]
  misc_feature (1)..(240): Homolog of NCBI NO: 12230450 NR Description: Peroxisomal assembly protein PEX3 (Peroxin-3)
  misc_feature (1)..(293): Homolog of NCBI NO: 28278477 NR Description: Similar to peroxisomal biogenesis factor 3 [Danio
  misc_feature (108)..(298): Homolog of NCBI NO: 9294071 NR Description: gene_id:MRC8.15~unknown protein [Arabidopsis
  misc_feature (1)..(274): Homolog of NCBI NO: 12321594 NR Description: hypothetical protein, 3' partial [Arabidopsis
  misc_feature (1)..(285): Homolog of NCBI NO: 12597815 NR Description: lysine and histidine specific transporter,
  misc_feature (1)..(298): Homolog of NCBI NO: 22330115 NR Description: expressed protein
  misc_feature (1)..(298): Homolog of NCBI NO: 21554142 NR Description: unknown [Arabidopsis thaliana]
  misc_feature (1)..(298): Homolog of NCBI NO: 18401790 NR Description: expressed protein
MKAHFDNIQMIADTTTLPHAIHHLSSRVVEEIDVSSIMDKLSKGKGILIPSEKLQLWNELKILSFTRMVLSLWSVTMLSLYIRVQVNILGRHLYIDTARGLGSSHLLDELDLIERDDEQKFLTSADFLATSGMPSLISNMQNAVKEVLKGKQLKDVLTTSALRETVMRILDVFMSTGSPHHWVDYLMMSQDATTDVSSSDATVTKFHLLITETREVLTNNFSNVAEISLKCCAVALVEEMETQTGLATGMQLAKLLPQIEKTMPEISAEPEKNRFLQLIRDLPEVKLFFTLLYANMPQ

SEQ ID NO: 36185 - protein, 289 aa, Arabidopsis thaliana
  peptide (1)..(289): Ceres Seq. ID no. 12370916
  misc_feature (1)..(287): Pfam Name: Peroxin-3 Pfam Description: Peroxin-3
  misc_feature (1)..(231): Homolog of NCBI NO: 9910484 NR Description: peroxisomal biogenesis factor 3; peroxisomal
  misc_feature (1)..(231): Homolog of NCBI NO: 4505727 NR Description: peroxisomal biogenesis factor 3 [Homo sapiens]
  misc_feature (1)..(231): Homolog of NCBI NO: 12230450 NR Description: Peroxisomal assembly protein PEX3 (Peroxin-3)
  misc_feature (1)..(284): Homolog of NCBI NO: 28278477 NR Description: Similar to peroxisomal biogenesis factor 3 [Danio
  misc_feature (99)..(289): Homolog of NCBI NO: 9294071 NR Description: gene_id:MRC8.15~unknown protein [Arabidopsis
  misc_feature (1)..(265): Homolog of NCBI NO: 12321594 NR Description: hypothetical protein, 3' partial [Arabidopsis
  misc_feature (1)..(276): Homolog of NCBI NO: 12597815 NR Description: lysine and histidine specific transporter,
  misc_feature (1)..(289): Homolog of NCBI NO: 22330115 NR Description: expressed protein
  misc_feature (1)..(289): Homolog of NCBI NO: 21554142 NR Description: unknown [Arabidopsis thaliana]
  misc_feature (1)..(289): Homolog of NCBI NO: 18401790 NR Description: expressed protein
MIADTTTLPHAIHHLSSRVVEEIDVSSIMDKLSKGKGILIPSEKLQLWNELKILSFTRMVLSLWSVTMLSLYIRVQVNILGRHLYIDTARGLGSSHLLDELDLIERDDEQKFLTSADFLATSGMPSLISNMQNAVKEVLKGKQLKDVLTTSALRETVMRILDVFMSTGSPHHWVDYLMMSQDATTDVSSSDATVTKFHLLITETREVLTNNFSNVAEISLKCCAVALVEEMETQTGLATGMQLAKLLPQIEKTMPEISAEPEKNRFLQLIRDLPEVKLFFTLLYANMPQ

SEQ ID NO: 36186 - DNA, 1220 bp, Arabidopsis thaliana
  misc_feature (1)..(1220): Ceres Seq. ID no. 12335068
  misc_feature: MA Experiment ID: 108434 Result: Down-regulated in Transcription
  misc_feature: MA Experiment 108434 PARAMETER Experiment Name: At_Root_Tips_cDNA_P Parameter: Tissue Value: Root Tips
  misc_feature: MA Experiment ID: 108462 Result: Up-regulated in Transcription
  misc_feature: MA Experiment 108462 PARAMETER Experiment Name: At_Germinating_Seeds_cDNA_P Parameter: Age (day) Value: 2 vs. 0
  misc_feature: MA Experiment 108462 PARAMETER Experiment Name: At_Germinating_Seeds_cDNA_P Parameter: Tissue Value: Germinating Seeds
  misc_feature: MA Experiment ID: 108463 Result: Up-regulated in Transcription
  misc_feature: MA Experiment 108463 PARAMETER Experiment Name: At_Germinating_Seeds_cDNA_P Parameter: Age (day) Value: 3 vs. 0
  misc_feature: MA Experiment 108463 PARAMETER Experiment Name: At_Germinating_Seeds_cDNA_P Parameter: Tissue Value: Germinating Seeds
  misc_feature: MA Experiment ID: 108473 Result: Up-regulated in Transcription
  misc_feature: MA Experiment 108473 PARAMETER Experiment Name: At_Drought_Flowers_cDNA_P Parameter: Timepoint (hr) Value: 7 d
  misc_feature: MA Experiment 108473 PARAMETER Experiment Name: At_Drought_Flowers_cDNA_P Parameter: Tissue Value: Flower
  misc_feature: MA Experiment 108473 PARAMETER Experiment Name: At_Drought_Flowers_cDNA_P Parameter: Treatment Value: Drought vs. No Drought
  misc_feature: MA Experiment ID: 108561 Result: Down-regulated in Transcription
  misc_feature: MA Experiment 108561 PARAMETER Experiment Name: At_100uM_ABA_cDNA_P Parameter: Timepoint (hr) Value: 6
  misc_feature: MA Experiment 108561 PARAMETER Experiment Name: At_100uM_ABA_cDNA_P Parameter: Tissue Value: Aerial
  misc_feature: MA Experiment 108561 PARAMETER Experiment Name: At_100uM_ABA_cDNA_P Parameter: Treatment Value: 100uM ABA vs. No Treatment
  misc_feature: MA Experiment ID: 108585 Result: Down-regulated in Transcription
  misc_feature: MA Experiment 108585 PARAMETER Experiment Name: At_5mM_NaNP_cDNA_P Parameter: Timepoint (hr) Value: 6
  misc_feature: MA Experiment 108585 PARAMETER Experiment Name: At_5mM_NaNP_cDNA_P Parameter: Tissue Value: Aerial
  misc_feature: MA Experiment 108585 PARAMETER Experiment Name: At_5mM_NaNP_cDNA_P Parameter: Treatment Value: null
  misc_feature: MA Experiment ID: 108595 Result: Down-regulated in Transcription
  misc_feature: MA Experiment 108595 PARAMETER Experiment Name: At_Ler-pi_Ovule_cDNA_P Parameter: Plant Line Value: null
  misc_feature: MA Experiment ID: 20000070 Result: Down-regulated in Transcription
  misc_feature: MA Experiment 20000070 PARAMETER Experiment Name: At_100uM_ABA_Mutants_cDNA_P Parameter: Plant Line Value: CS24
  misc_feature: MA Experiment 20000070 PARAMETER Experiment Name: At_100uM_ABA_Mutants_cDNA_P Parameter: Timepoint (hr) Value: 6
  misc_feature: MA Experiment 20000070 PARAMETER Experiment Name: At_100uM_ABA_Mutants_cDNA_P Parameter: Tissue Value: Aerial
  misc_feature: MA Experiment 20000070 PARAMETER Experiment Name: At_100uM_ABA_Mutants_cDNA_P Parameter: Treatment Value: 100uM ABA vs. No Treatment
  misc_feature: MA Experiment ID: 20000071 Result: Down-regulated in Transcription
  misc_feature: MA Experiment 20000071 PARAMETER Experiment Name: At_100uM_ABA_Mutants_cDNA_P Parameter: Plant Line Value: CS8104
  misc_feature: MA Experiment 20000071 PARAMETER Experiment Name: At_100uM_ABA_Mutants_cDNA_P Parameter: Timepoint (hr) Value: 6
  misc_feature: MA Experiment 20000071 PARAMETER Experiment Name: At_100uM_ABA_Mutants_cDNA_P Parameter: Tissue Value: Aerial
  misc_feature: MA Experiment 20000071 PARAMETER Experiment Name: At_100uM_ABA_Mutants_cDNA_P Parameter: Treatment Value: 100uM ABA vs. No Treatment
  misc_feature: MA Experiment ID: 20000111 Result: Down-regulated in Transcription
  misc_feature: MA Experiment 20000111 PARAMETER Experiment Name: At_42deg_Heat_cDNA_P Parameter: Temperature (deg C) Value: 42 vs. 22
  misc_feature: MA Experiment 20000111 PARAMETER Experiment Name: At_42deg_Heat_cDNA_P Parameter: Timepoint (hr) Value: 6
  misc_feature: MA Experiment 20000111 PARAMETER Experiment Name: At_42deg_Heat_cDNA_P Parameter: Tissue Value: Aerial
  misc_feature: MA Experiment ID: 20000144 Result: Down-regulated in Transcription
  misc_feature: MA Experiment 20000144 PARAMETER Experiment Name: At_42deg_Heat_cDNA_P Parameter: Temperature (deg C) Value: 42 vs. 22
  misc_feature: MA Experiment 20000144 PARAMETER Experiment Name: At_42deg_Heat_cDNA_P Parameter: Timepoint (hr) Value: 1
  misc_feature: MA Experiment 20000144 PARAMETER Experiment Name: At_42deg_Heat_cDNA_P Parameter: Tissue Value: Aerial
  misc_feature: MA Experiment ID: 20000180 Result: Up-regulated in Transcription
  misc_feature: MA Experiment 20000180 PARAMETER Experiment Name: At_Germinating_Seeds_P Parameter: Age (hr) Value: 24 vs. 0
  misc_feature: MA Experiment 20000180 PARAMETER Experiment Name: At_Germinating_Seeds_P Parameter: Tissue Value: Germinating Seeds
  misc_feature: MA Experiment ID: 20000185 Result: Down-regulated in Transcription
  misc_feature: MA Experiment 20000185 PARAMETER Experiment Name: At_Roots__P Parameter: Age (day) Value: 7 vs. 21
  misc_feature: MA Experiment 20000185 PARAMETER Experiment Name: At_Roots__P Parameter: Organism Value: A. thaliana
  misc_feature: MA Experiment 20000185 PARAMETER Experiment Name: At_Roots__P Parameter: Tissue Value: Roots vs. Whole Plant
  misc_feature: MA Experiment ID: 20000265 Result: Down-regulated in Transcription
  misc_feature: MA Experiment 20000265 PARAMETER Experiment Name: At_Open_Flower_P Parameter: Age (day) Value: 21
  misc_feature: MA Experiment 20000265 PARAMETER Experiment Name: At_Open_Flower_P Parameter: Plant Line Value: WS
  misc_feature: MA Experiment 20000265 PARAMETER Experiment Name: At_Open_Flower_P Parameter: Tissue Value: Closed Flower vs. Whole Plant
  misc_feature: MA Experiment ID: 20000439 Result: Down-regulated in Transcription
  misc_feature: MA Experiment 20000439 PARAMETER Experiment Name: At_Roots__P Parameter: Age (day) Value: 14 vs. 21
  misc_feature: MA Experiment 20000439 PARAMETER Experiment Name: At_Roots__P Parameter: Organism Value: A. thaliana
  misc_feature: MA Experiment 20000439 PARAMETER Experiment Name: At_Roots__P Parameter: Tissue Value: Roots vs. Whole Plant
  misc_feature: MA Experiment ID: 20000527 Result: Down-regulated in Transcription
  misc_feature: MA Experiment 20000527 PARAMETER Experiment Name: At_10percent_PEG_P Parameter: Age (day) Value: 20
  misc_feature: MA Experiment 20000527 PARAMETER Experiment Name: At_10percent_PEG_P Parameter: Organism Value: A. thaliana
  misc_feature: MA Experiment 20000527 PARAMETER Experiment Name: At_10percent_PEG_P Parameter: Plant Line Value: WS
  misc_feature: MA Experiment 20000527 PARAMETER Experiment Name: At_10percent_PEG_P Parameter: Timepoint (day) Value: 20
  misc_feature: MA Experiment 20000527 PARAMETER Experiment Name: At_10percent_PEG_P Parameter: Tissue Value: Whole Plant
  misc_feature: MA Experiment 20000527 PARAMETER Experiment Name: At_10percent_PEG_P Parameter: Treatment Value: 10percent PEG vs. No Treatment
  misc_feature: MA Experiment ID: 20000794 Result: Down-regulated in Transcription
  misc_feature: MA Experiment 20000794 PARAMETER Experiment Name: At_Petals_P Parameter: Age (day) Value: 23-25 days
  misc_feature: MA Experiment 20000794 PARAMETER Experiment Name: At_Petals_P Parameter: Plant Line Value: WS
  misc_feature: MA Experiment 20000794 PARAMETER Experiment Name: At_Petals_P Parameter: Tissue Value: Petals vs. Whole plant
  misc_feature: MA Experiment ID: 20001756 Result: Up-regulated in Transcription
  misc_feature: MA Experiment 20001756 PARAMETER Experiment Name: At_50mM_NH4NO3_L-to-H_P Parameter: Timepoint (hr) Value: 4
  misc_feature: MA Experiment 20001756 PARAMETER Experiment Name: At_50mM_NH4NO3_L-to-H_P Parameter: Tissue Value: Leaf
  misc_feature: MA Experiment 20001756 PARAMETER Experiment Name: At_50mM_NH4NO3_L-to-H_P Parameter: Treatment Value: 50mM NH4NO3 vs 100mM Mannitol
  misc_feature: MA Experiment ID: 20001757 Result: Up-regulated in Transcription
  misc_feature: MA Experiment 20001757 PARAMETER Experiment Name: At_50mM_NH4NO3_L-to-H_P Parameter: Timepoint (hr) Value: 6
  misc_feature: MA Experiment 20001757 PARAMETER Experiment Name: At_50mM_NH4NO3_L-to-H_P Parameter: Tissue Value: Leaf
  misc_feature: MA Experiment 20001757 PARAMETER Experiment Name: At_50mM_NH4NO3_L-to-H_P Parameter: Treatment Value: 50mM NH4NO3 vs 100mM Mannitol
  misc_feature: MA Experiment ID: 20001904 Result: Down-regulated in Transcription
  misc_feature: MA Experiment 20001904 PARAMETER Experiment Name: At_Drought_Reproduction_P Parameter: Age (day) Value: 37
  misc_feature: MA Experiment 20001904 PARAMETER Experiment Name: At_Drought_Reproduction_P Parameter: Organism Value: A. thaliana
  misc_feature: MA Experiment 20001904 PARAMETER Experiment Name: At_Drought_Reproduction_P Parameter: Plant Line Value: WS
  misc_feature: MA Experiment 20001904 PARAMETER Experiment Name: At_Drought_Reproduction_P Parameter: Timepoint (day) Value: 7
  misc_feature: MA Experiment 20001904 PARAMETER Experiment Name: At_Drought_Reproduction_P Parameter: Tissue Value: Rosettes
  misc_feature: MA Experiment 20001904 PARAMETER Experiment Name: At_Drought_Reproduction_P Parameter: Treatment Value: Drought vs. No Drought
  misc_feature: MA Experiment ID: 20001905 Result: Down-regulated in Transcription
  misc_feature: MA Experiment 20001905 PARAMETER Experiment Name: At_Drought_Reproduction_P Parameter: Age (day) Value: 40
  misc_feature: MA Experiment 20001905 PARAMETER Experiment Name: At_Drought_Reproduction_P Parameter: Organism Value: A. thaliana
  misc_feature: MA Experiment 20001905 PARAMETER Experiment Name: At_Drought_Reproduction_P Parameter: Plant Line Value: WS
  misc_feature: MA Experiment 20001905 PARAMETER Experiment Name: At_Drought_Reproduction_P Parameter: Timepoint (day) Value: 10
  misc_feature: MA Experiment 20001905 PARAMETER Experiment Name: At_Drought_Reproduction_P Parameter: Tissue Value: Rosettes
  misc_feature: MA Experiment 20001905 PARAMETER Experiment Name: At_Drought_Reproduction_P Parameter: Treatment Value: Drought vs. No Drought
aaacacacacatatacacccaaacgttatgtaactgcaaaaaaaatatcgaaacgagattctacaattagtctctagtcaaagagcttcatggcaatggtgtgaccccaaagttagtcttcacatgtttcttaagtttcaaacattgaatttttttccttttataaatagttaagacttatcttcattttctaaaatagtcaagatttatattcctcttaaaaaataatttatttccttcctaagaagaattattagatttattttctttgctagtatagattgatgaaagtgaggaaatgggagaagaaatgaagaacacaggatgtgtcttcttcttctaagtcactaacaaaatcaacaaagaggagaagccattattatataatagagagattgagagaagagatttatccaaaaaaatattgcaattcttcttggagtgaataatgccagtccctcttgcaccatatccaacacctccggcaccggcactggctccgtcgtacaacactcctccggcaaatggaagtacaagtgggcagagccagttagtgtgttcaggttgcagaaaccttctgatgtatcccgtcggagcaacctccgtctgttgcgccgtctgtaacgccgtcacggccgttcctccgcccggaacggagatggcacagttggtatgtggaggatgtcatacactcttaatgtacattcgtggagctacaagtgttcaatgttcttgttgtcacactgttaatctcgccctcgaagcaaaccaagtagcgcatgtgaattgcggaaactgcatgatgctactaatgtatcaatatggagcaagatcagtgaaatgtgccgtttgtaactttgtcacatctgttgggggttcaacgagcacgactgattcgaagtttaacaattaaaacttggatctatctacctatcaatacatattgagttatgagcaatatagaggaagcatcaaatctttttcactctctcttcgatcaagaatccggcagtgatgagtttgaaaccattttcggaagtaaatgaaatatgtaattcgtcgaaatttctgactttggtctctttgtccgtttgtatagagctatctctcttctttggtttttgttttgttctcttaagaaaaatttgattcaccagtttgtaagagtgattcagaaatcaaagctagactttttatgcatgaaaaaaatagattgtttt

SEQ ID NO: 36187 - protein, 154 aa, Arabidopsis thaliana
  peptide (1)..(154): Ceres Seq. ID no. 12335069
  misc_feature (71)..(145): Homolog of NCBI NO: 32400832 NR Description: 18S subunit ribosomal protein [Triticum aestivum]
  misc_feature (65)..(154): Homolog of NCBI NO: 17981378 NR Description: zinc finger protein LSD1 [Brassica oleracea]
  misc_feature (32)..(141): Homolog of NCBI NO: 29467531 NR Description: P0582D05.23 [Oryza sativa (japonica
  misc_feature (32)..(141): Homolog of NCBI NO: 17981380 NR Description: zinc finger protein LSD2 [Brassica oleracea]
  misc_feature (32)..(154): Homolog of NCBI NO: 30685085 NR Description: zinc-finger protein Lsd1 [Arabidopsis thaliana]
  misc_feature (32)..(154): Homolog of NCBI NO: 30685083 NR Description: zinc-finger protein Lsd1 [Arabidopsis thaliana]
  misc_feature (1)..(105): Homolog of NCBI NO: 25403154 NR Description: probable zinc-finger protein, 7043-7771
  misc_feature (1)..(151): Homolog of NCBI NO: 34905200 NR Description: P0672D01.2 [Oryza sativa (japonica
  misc_feature (1)..(151): Homolog of NCBI NO: 30692719 NR Description: zinc-finger protein -related [Arabidopsis
  misc_feature (1)..(154): Homolog of NCBI NO: 18398482 NR Description: zinc-finger protein, putative
MPVPLAPYPTPPAPALAPSYNTPPANGSTSGQSQLVCSGCRNLLMYPVGATSVCCAVCNAVTAVPPPGTEMAQLVCGGCHTLLMYIRGATSVQCSCCHTVNLALEANQVAHVNCGNCMMLLMYQYGARSVKCAVCNFVTSVGGSTSTTDSKFNN

SEQ ID NO: 36188 - protein, 110 aa, Arabidopsis thaliana
  peptide (1)..(110): Ceres Seq. ID no. 12335070
  misc_feature (27)..(101): Homolog of NCBI NO: 32400832 NR Description: 18S subunit ribosomal protein [Triticum aestivum]
  misc_feature (21)..(110): Homolog of NCBI NO: 17981378 NR Description: zinc finger protein LSD1 [Brassica oleracea]
  misc_feature (1)..(97): Homolog of NCBI NO: 29467531 NR Description: P0582D05.23 [Oryza sativa (japonica
  misc_feature (1)..(97): Homolog of NCBI NO: 17981380 NR Description: zinc finger protein LSD2 [Brassica oleracea]
  misc_feature (1)..(110): Homolog of NCBI NO: 30685085 NR Description: zinc-finger protein Lsd1 [Arabidopsis thaliana]
  misc_feature (1)..(110): Homolog of NCBI NO: 30685083 NR Description: zinc-finger protein Lsd1 [Arabidopsis thaliana]
  misc_feature (1)..(61): Homolog of NCBI NO: 25403154 NR Description: probable zinc-finger protein, 7043-7771
  misc_feature (1)..(107): Homolog of NCBI NO: 34905200 NR Description: P0672D01.2 [Oryza sativa (japonica
  misc_feature (1)..(107): Homolog of NCBI NO: 30692719 NR Description: zinc-finger protein -related [Arabidopsis
  misc_feature (1)..(110): Homolog of NCBI NO: 18398482 NR Description: zinc-finger protein, putative
MYPVGATSVCCAVCNAVTAVPPPGTEMAQLVCGGCHTLLMYIRGATSVQCSCCHTVNLALEANQVAHVNCGNCMMLLMYQYGARSVKCAVCNFVTSVGGSTSTTDSKFNN

SEQ ID NO: 36189 - protein, 84 aa, Arabidopsis thaliana
  peptide (1)..(84): Ceres Seq. ID no. 12335071
  misc_feature (1)..(75): Homolog of NCBI NO: 32400832 NR Description: 18S subunit ribosomal protein [Triticum aestivum]
  misc_feature (1)..(84): Homolog of NCBI NO: 17981378 NR Description: zinc finger protein LSD1 [Brassica oleracea]
  misc_feature (1)..(71): Homolog of NCBI NO: 29467531 NR Description: P0582D05.23 [Oryza sativa (japonica
  misc_feature (1)..(71): Homolog of NCBI NO: 17981380 NR Description: zinc finger protein LSD2 [Brassica oleracea]
  misc_feature (1)..(84): Homolog of NCBI NO: 30685085 NR Description: zinc-finger protein Lsd1 [Arabidopsis thaliana]
  misc_feature (1)..(84): Homolog of NCBI NO: 30685083 NR Description: zinc-finger protein Lsd1 [Arabidopsis thaliana]
  misc_feature (1)..(35): Homolog of NCBI NO: 25403154 NR Description: probable zinc-finger protein, 7043-7771
  misc_feature (1)..(81): Homolog of NCBI NO: 34905200 NR Description: P0672D01.2 [Oryza sativa (japonica
  misc_feature (1)..(81): Homolog of NCBI NO: 30692719 NR Description: zinc-finger protein -related [Arabidopsis
  misc_feature (1)..(84): Homolog of NCBI NO: 18398482 NR Description: zinc-finger protein, putative
MAQLVCGGCHTLLMYIRGATSVQCSCCHTVNLALEANQVAHVNCGNCMMLLMYQYGARSVKCAVCNFVTSVGGSTSTTDSKFNN

SEQ ID NO: 36190 - DNA, 1408 bp, Arabidopsis thaliana
  misc_feature (1)..(1408): Ceres Seq. ID no. 13490509
  misc_feature: MA Experiment ID: 108461 Result: Up-regulated in Transcription
  misc_feature: MA Experiment 108461 PARAMETER Experiment Name: At_Germinating_Seeds_cDNA_P Parameter: Age (day) Value: 1 vs. 0
  misc_feature: MA Experiment 108461 PARAMETER Experiment Name: At_Germinating_Seeds_cDNA_P Parameter: Tissue Value: Germinating Seeds
  misc_feature: MA Experiment ID: 20000227 Result: Up-regulated in Transcription
  misc_feature: MA Experiment 20000227 PARAMETER Experiment Name: At_Root-Tips-vs-Tops_P Parameter: Tissue Value: Root Tips vs. Root Tops
atccgttggtgaatctggacagtcccctcaaataaaagttgtgagagctgtttcgtcgctttgatcgaaatggcgtcgtcttctccaactcagctagctcacgtcccgattcctccagaaccaggaggaaggtcgccgacacaagaagctaatgagccaccagttccgatttacattgtgacggatccgtttcaacttcctgctgatttcctaaacccttctcctgaaaagaaattggttatcggttttgactgtgagggtgttgacctctgccgacatgggaaactttgtatcatgcagattgcattctctaatgcaatatacttggttgatgtcatcgaaggtggagaggtgattatgaaagcgtgtaagcctgcactcgagtctaattacatcacgaaagttattcacgattgcaagcgtgacagtgaggctctatacttccagtttgggataagattgcacaatgttgtggacactcagattgcttattctctgattgaagaacaagaagggcggaggagacctctagatgattacatatcgtttgtttcactccttgctgatccacgttactgcggtatatcctatgaagagaaagaagaagttcgagttctcatgcgccaggacccaaagttttggacatacaggcctatgactgagctcatgatccgcgcagctgctgatgatgtccgcttccttctgtatctctatcacaaaatgatgggaaagctaaatcagcggtcactatggcatcttgcagttcgtggtgctttgtactgtcggtgtctctgctgcatgaatgatgctgattttgctgattggccaaccgttcctccaattccagataacctgaagtcagaagatcaatgtcttgaagaagagatcctgtcagtgcttgatgttccaccaggaaagatgggacgtgtgattggaaggaaaggagcatcgatcctcgccattaaggaagcttgcaacgcggaaattctaattggaggggcaaagggtccacctgataagatatttgtgattggaccggtgagagaagtgcgtaaggcggaggctatactgagaggaagaatgatagactattgaaggaaatgagggtcctttgtaatctgtctcattgcccctataaaaaaaaatactaaaaccctcttaaaacttggaaactccatggttcagtacggacccgagagagtcgtcccctcttcaataaaagttacatcattaacttccgtttatactgtggaacttaccattccatttcccgcaagggacttcatagtttgatgaaacaaaaagaccatatcaagtatggtttattggcaaatgcaagagtagtttatctgattgaccgttaagattgattttatttactttgcgactcaaattgagtctgaaaccc

SEQ ID NO: 36191 - protein, 341 aa, Arabidopsis thaliana
  peptide (1)..(341): Ceres Seq. ID no. 13490510
  misc_feature (276)..(323): Pfam Name: KH domain Pfam Description: KH domain
  misc_feature (48)..(218): Homolog of NCBI NO: 31210151 NR Description: ENSANGP00000003614 [Anopheles gambiae]
  misc_feature (35)..(214): Homolog of NCBI NO: 27370298 NR Description: hypothetical protein 4932702D22 [Mus musculus]
  misc_feature (57)..(227): Homolog of NCBI NO: 23612774 NR Description: exonuclease, putative [Plasmodium falciparum 3D7]
  misc_feature (54)..(222): Homolog of NCBI NO: 38681451 NR Description: egalitarian [Drosophila melanogaster]
  misc_feature (54)..(222): Homolog of NCBI NO: 33589402 NR Description: RE33408p [Drosophila melanogaster]
  misc_feature (54)..(222): Homolog of NCBI NO: 24762379 NR Description: egalitarian CG4051-PA [Drosophila melanogaster]
  misc_feature (258)..(321): Homolog of NCBI NO: 25407824 NR Description: hypothetical protein At2g25910 [imported] -
  misc_feature (76)..(334): Homolog of NCBI NO: 25407824 NR Description: hypothetical protein At2g25910 [imported] -
  misc_feature (55)..(341): Homolog of NCBI NO: 34914238 NR Description: P0002B05.11 [Oryza sativa (japonica
  misc_feature (1)..(341): Homolog of NCBI NO: 18400976 NR Description: expressed protein [Arabidopsis thaliana]
MASSSPTQLAHVPIPPEPGGRSPTQEANEPPVPIYIVTDPFQLPADFLNPSPEKKLVIGFDCEGVDLCRHGKLCIMQIAFSNAIYLVDVIEGGEVIMKACKPALESNYITKVIHDCKRDSEALYFQFGIRLHNVVDTQIAYSLIEEQEGRRRPLDDYISFVSLLADPRYCGISYEEKEEVRVLMRQDPKFWTYRPMTELMIRAAADDVRFLLYLYHKMMGKLNQRSLWHLAVRGALYCRCLCCMNDADFADWPTVPPIPDNLKSEDQCLEEEILSVLDVPPGKMGRVIGRKGASILAIKEACNAEILIGGAKGPPDKIFVIGPVREVRKAEAILRGRMIDY

SEQ ID NO: 36192 - protein, 266 aa, Arabidopsis thaliana
  peptide (1)..(266): Ceres Seq. ID no. 13490511
  misc_feature (201)..(248): Pfam Name: KH domain Pfam Description: KH domain
  misc_feature (1)..(143): Homolog of NCBI NO: 31210151 NR Description: ENSANGP00000003614 [Anopheles gambiae]
  misc_feature (1)..(139): Homolog of NCBI NO: 27370298 NR Description: hypothetical protein 4932702D22 [Mus musculus]
  misc_feature (1)..(152): Homolog of NCBI NO: 23612774 NR Description: exonuclease, putative [Plasmodium falciparum 3D7]
  misc_feature (1)..(147): Homolog of NCBI NO: 38681451 NR Description: egalitarian [Drosophila melanogaster]
  misc_feature (1)..(147): Homolog of NCBI NO: 33589402 NR Description: RE33408p [Drosophila melanogaster]
  misc_feature (1)..(147): Homolog of NCBI NO: 24762379 NR Description: egalitarian CG4051-PA [Drosophila melanogaster]
  misc_feature (183)..(246): Homolog of NCBI NO: 25407824 NR Description: hypothetical protein At2g25910 [imported] -
  misc_feature (1)..(259): Homolog of NCBI NO: 25407824 NR Description: hypothetical protein At2g25910 [imported] -
  misc_feature (1)..(266): Homolog of NCBI NO: 34914238 NR Description: P0002B05.11 [Oryza sativa (japonica
  misc_feature (1)..(266): Homolog of NCBI NO: 18400976 NR Description: expressed protein [Arabidopsis thaliana]
MQIAFSNAIYLVDVIEGGEVIMKACKPALESNYITKVIHDCKRDSEALYFQFGIRLHNVVDTQIAYSLIEEQEGRRRPLDDYISFVSLLADPRYCGISYEEKEEVRVLMRQDPKFWTYRPMTELMIRAAADDVRFLLYLYHKMMGKLNQRSLWHLAVRGALYCRCLCCMNDADFADWPTVPPIPDNLKSEDQCLEEEILSVLDVPPGKMGRVIGRKGASILAIKEACNAEILIGGAKGPPDKIFVIGPVREVRKAEAILRGRMIDY

SEQ ID NO: 36193 - protein, 245 aa, Arabidopsis thaliana
  peptide (1)..(245): Ceres Seq. ID no. 13490512
  misc_feature (180)..(227): Pfam Name: KH domain Pfam Description: KH domain
  misc_feature (1)..(122): Homolog of NCBI NO: 31210151 NR Description: ENSANGP00000003614 [Anopheles gambiae]
  misc_feature (1)..(118): Homolog of NCBI NO: 27370298 NR Description: hypothetical protein 4932702D22 [Mus musculus]
  misc_feature (1)..(131): Homolog of NCBI NO: 23612774 NR Description: exonuclease, putative [Plasmodium falciparum 3D7]
  misc_feature (1)..(126): Homolog of NCBI NO: 38681451 NR Description: egalitarian [Drosophila melanogaster]
  misc_feature (1)..(126): Homolog of NCBI NO: 33589402 NR Description: RE33408p [Drosophila melanogaster]
  misc_feature (1)..(126): Homolog of NCBI NO: 24762379 NR Description: egalitarian CG4051-PA [Drosophila melanogaster]
  misc_feature (162)..(225): Homolog of NCBI NO: 25407824 NR Description: hypothetical protein At2g25910 [imported] -
  misc_feature (1)..(238): Homolog of NCBI NO: 25407824 NR Description: hypothetical protein At2g25910 [imported] -
  misc_feature (1)..(245): Homolog of NCBI NO: 34914238 NR Description: P0002B05.11 [Oryza sativa (japonica
  misc_feature (1)..(245): Homolog of NCBI NO: 18400976 NR Description: expressed protein [Arabidopsis thaliana]
MKACKPALESNYITKVIHDCKRDSEALYFQFGIRLHNVVDTQIAYSLIEEQEGRRRPLDDYISFVSLLADPRYCGISYEEKEEVRVLMRQDPKFWTYRPMTELMIRAAADDVRFLLYLYHKMMGKLNQRSLWHLAVRGALYCRCLCCMNDADFADWPTVPPIPDNLKSEDQCLEEEILSVLDVPPGKMGRVIGRKGASILAIKEACNAEILIGGAKGPPDKIFVIGPVREVRKAEAILRGRMIDY

SEQ ID NO: 36194 - DNA, 1678 bp, Arabidopsis thaliana
  misc_feature (1)..(1678): Ceres Seq. ID no. 12385488
  misc_feature: MA Experiment ID: 108434 Result: Down-regulated in Transcription
  misc_feature: MA Experiment 108434 PARAMETER Experiment Name: At_Root_Tips_cDNA_P Parameter: Tissue Value: Root Tips
  misc_feature: MA Experiment ID: 108576 Result: Down-regulated in Transcription
  misc_feature: MA Experiment 108576 PARAMETER Experiment Name: At_42deg_Heat_cDNA_P Parameter: Temperature (deg C) Value: 42 vs. 22
  misc_feature: MA Experiment 108576 PARAMETER Experiment Name: At_42deg_Heat_cDNA_P Parameter: Timepoint (hr) Value: 1
  misc_feature: MA Experiment 108576 PARAMETER Experiment Name: At_42deg_Heat_cDNA_P Parameter: Tissue Value: Aerial
  misc_feature: MA Experiment ID: 108577 Result: Down-regulated in Transcription
  misc_feature: MA Experiment 108577 PARAMETER Experiment Name: At_42deg_Heat_cDNA_P Parameter: Temperature (deg C) Value: 42 vs. 22
  misc_feature: MA Experiment 108577 PARAMETER Experiment Name: At_42deg_Heat_cDNA_P Parameter: Timepoint (hr) Value: 6
  misc_feature: MA Experiment 108577 PARAMETER Experiment Name: At_42deg_Heat_cDNA_P Parameter: Tissue Value: Aerial
  misc_feature: MA Experiment ID: 108579 Result: Up-regulated in Transcription
  misc_feature: MA Experiment 108579 PARAMETER Experiment Name: At_4deg_Cold_cDNA_P Parameter: Temperature (deg C) Value: 4 vs. 22
  misc_feature: MA Experiment 108579 PARAMETER Experiment Name: At_4deg_Cold_cDNA_P Parameter: Timepoint (hr) Value: 6
  misc_feature: MA Experiment 108579 PARAMETER Experiment Name: At_4deg_Cold_cDNA_P Parameter: Tissue Value: Aerial
  misc_feature: MA Experiment ID: 108595 Result: Down-regulated in Transcription
  misc_feature: MA Experiment 108595 PARAMETER Experiment Name: At_Ler-pi_Ovule_cDNA_P Parameter: Plant Line Value: null
  misc_feature: MA Experiment ID: 20000069 Result: Down-regulated in Transcription
  misc_feature: MA Experiment 20000069 PARAMETER Experiment Name: At_100uM_ABA_Mutants_cDNA_P Parameter: Plant Line Value: CS23
  misc_feature: MA Experiment 20000069 PARAMETER Experiment Name: At_100uM_ABA_Mutants_cDNA_P Parameter: Timepoint (hr) Value: 6
  misc_feature: MA Experiment 20000069 PARAMETER Experiment Name: At_100uM_ABA_Mutants_cDNA_P Parameter: Tissue Value: Aerial
  misc_feature: MA Experiment 20000069 PARAMETER Experiment Name: At_100uM_ABA_Mutants_cDNA_P Parameter: Treatment Value: 100uM ABA vs. No Treatment
  misc_feature: MA Experiment ID: 20000087 Result: Down-regulated in Transcription
  misc_feature: MA Experiment 20000087 PARAMETER Experiment Name: At_100uM_ABA_Mutants_cDNA_P Parameter: Plant Line Value: WS
  misc_feature: MA Experiment 20000087 PARAMETER Experiment Name: At_100uM_ABA_Mutants_cDNA_P Parameter: Timepoint (hr) Value: 6
  misc_feature: MA Experiment 20000087 PARAMETER Experiment Name: At_100uM_ABA_Mutants_cDNA_P Parameter: Tissue Value: Aerial
  misc_feature: MA Experiment 20000087 PARAMETER Experiment Name: At_100uM_ABA_Mutants_cDNA_P Parameter: Treatment Value: 100uM ABA vs. No Treatment
  misc_feature: MA Experiment ID: 20000089 Result: Down-regulated in Transcription
  misc_feature: MA Experiment ID: 20000113 Result: Down-regulated in Transcription
  misc_feature: MA Experiment 20000113 PARAMETER Experiment Name: At_42deg_Heat_cDNA_P Parameter: Temperature (deg C) Value: 42 vs. 22
  misc_feature: MA Experiment 20000113 PARAMETER Experiment Name: At_42deg_Heat_cDNA_P Parameter: Timepoint (hr) Value: 8
  misc_feature: MA Experiment 20000113 PARAMETER Experiment Name: At_42deg_Heat_cDNA_P Parameter: Tissue Value: Aerial
  misc_feature: MA Experiment ID: 20000171 Result: Down-regulated in Transcription
  misc_feature: MA Experiment 20000171 PARAMETER Experiment Name: At_42deg_Heat_P Parameter: Age (day) Value: 14
  misc_feature: MA Experiment 20000171 PARAMETER Experiment Name: At_42deg_Heat_P Parameter: Organism Value: A. thaliana
  misc_feature: MA Experiment 20000171 PARAMETER Experiment Name: At_42deg_Heat_P Parameter: Plant Line Value: WS
  misc_feature: MA Experiment 20000171 PARAMETER Experiment Name: At_42deg_Heat_P Parameter: Temperature (deg C) Value: 42 vs. 22
  misc_feature: MA Experiment 20000171 PARAMETER Experiment Name: At_42deg_Heat_P Parameter: Timepoint (hr) Value: 1
  misc_feature: MA Experiment 20000171 PARAMETER Experiment Name: At_42deg_Heat_P Parameter: Tissue Value: Aerial
  misc_feature: MA Experiment ID: 20000173 Result: Down-regulated in Transcription
  misc_feature: MA Experiment 20000173 PARAMETER Experiment Name: At_42deg_Heat_P Parameter: Age (day) Value: 14
  misc_feature: MA Experiment 20000173 PARAMETER Experiment Name: At_42deg_Heat_P Parameter: Organism Value: A. thaliana
  misc_feature: MA Experiment 20000173 PARAMETER Experiment Name: At_42deg_Heat_P Parameter: Plant Line Value: WS
  misc_feature: MA Experiment 20000173 PARAMETER Experiment Name: At_42deg_Heat_P Parameter: Temperature (deg C) Value: 42 vs. 22
  misc_feature: MA Experiment 20000173 PARAMETER Experiment Name: At_42deg_Heat_P Parameter: Timepoint (hr) Value: 6
  misc_feature: MA Experiment 20000173 PARAMETER Experiment Name: At_42deg_Heat_P Parameter: Tissue Value: Aerial
  misc_feature: MA Experiment ID: 20000182 Result: Down-regulated in Transcription
  misc_feature: MA Experiment 20000182 PARAMETER Experiment Name: At_2mM_SA_P Parameter: Age (day) Value: 14
  misc_feature: MA Experiment 20000182 PARAMETER Experiment Name: At_2mM_SA_P Parameter: Organism Value: A. thaliana
  misc_feature: MA Experiment 20000182 PARAMETER Experiment Name: At_2mM_SA_P Parameter: Plant Line Value: WS
  misc_feature: MA Experiment 20000182 PARAMETER Experiment Name: At_2mM_SA_P Parameter: Timepoint (hr) Value: 6
  misc_feature: MA Experiment 20000182 PARAMETER Experiment Name: At_2mM_SA_P Parameter: Tissue Value: Aerial
  misc_feature: MA Experiment 20000182 PARAMETER Experiment Name: At_2mM_SA_P Parameter: Treatment Value: 2mM SA vs. No Treatment
  misc_feature: MA Experiment ID: 20000184 Result: Up-regulated in Transcription
  misc_feature: MA Experiment 20000184 PARAMETER Experiment Name: At_Shoots__P Parameter: Age (day) Value: 7
  misc_feature: MA Experiment 20000184 PARAMETER Experiment Name: At_Shoots__P Parameter: Tissue Value: Shoots vs. Whole Plant
  misc_feature: MA Experiment ID: 20000438 Result: Up-regulated in Transcription
  misc_feature: MA Experiment 20000438 PARAMETER Experiment Name: At_Shoots__P Parameter: Age (day) Value: 14
  misc_feature: MA Experiment 20000438 PARAMETER Experiment Name: At_Shoots__P Parameter: Tissue Value: Shoots vs. Whole Plant
  misc_feature: MA Experiment ID: 20001248 Result: Down-regulated in Transcription
  misc_feature: MA Experiment 20001248 PARAMETER Experiment Name: At_Far-red-induction_P Parameter: Age (day) Value: 7
  misc_feature: MA Experiment 20001248 PARAMETER Experiment Name: At_Far-red-induction_P Parameter: Light Value: Far-red vs. White
  misc_feature: MA Experiment 20001248 PARAMETER Experiment Name: At_Far-red-induction_P Parameter: Organism Value: A. thaliana
  misc_feature: MA Experiment 20001248 PARAMETER Experiment Name: At_Far-red-induction_P Parameter: Plant Line Value: Columbia
  misc_feature: MA Experiment 20001248 PARAMETER Experiment Name: At_Far-red-induction_P Parameter: Timepoint (hr) Value: 4
  misc_feature: MA Experiment 20001248 PARAMETER Experiment Name: At_Far-red-induction_P Parameter: Tissue Value: Whole Plant
atcgcttcttcctcctcctgcttcttcaactccaaacctcaccctctcaatttccctccttcgccggtccacggcgtcatttcacggtggcgcttcacctctctccgtcacctactctcctaaaaatccaatctttacaaaatccagaccaatatagaaatgactttaatcgcttctctgtctctcccaccaccagctatacaaagacaatcactttctgaatttcataatcttcccgctaaatctcaatccttcaattgtcaattccggtcttctagttcacctttatcttctctccattcttcatcgcttagtaactttctagattttagactaaggcggagaaacagcggattggttccagtggtggcgtgttcaacgacgccgtttatgggtagagttggattgcattggagagatgggaatatgtctctgttatcgttttgtggtggaactgatgttacagagagagctgattcgtctcagttttggtctgctttgcttccatttgttgttgctctcactgccgttgctgctctctcttacccacctagtttcacttgggtatctaaagacctctatgctcctgctcttggagggattatgttatctattggaattcagctttcagttgacgattttgctcttgcattcaaaagaccagtgccgttatctgttgggtttgttgctcagtacgttttgaaaccgcttctcggggttttagttgctaatgcatttgggatgccgaggaccttctacgctggttttatactcacgtgttgtgtggctggggctcagttgtctagttacgcgagttctctgagtaaagctgatgtggccatgagcattcttctcactagttctacaactattgcttctgtaatctttacacctttgcttagtggtcttctaattggatcagtagttcctgttgatgcagttgccatgtcgaagtctatacttcaggtggtacttgttccaatcactcttggccttgtgttaaatacttatgcgaagcctgtggtcactcttcttcaacctgtgatgccgtttgttgctatggtatgcacttcattgtgcattggaagcccactttcgattaatcgcagtcagattctgtcagctgaaggtcttggattgattgttccaattgttacattccatgccgtagcatttgccttaggatattggttctctaagatcccaggcttacgacaagaggaagaagtaagccggactatctccctttgcacgggaatgcaaagctccacattagccgggcttcttgcaagccagttccttggtagcagccaagccgtgccagcagcttgctctgtagttgtaatggccataatgggtctatgccttgcctcattctggggcaatgggttccgaatcagagatgttctatcgctatcaacaccgcaaagcagaggctacaccactgaatcatgagcaatatcagcagaagctacaaacctgtaaagcaagggaaccacaccttgggacattgatcgcgcatattctttccggtttttaatttgatgtacaagcagcgtttgggaagtaaagataaggtttagaggggatggtataggtagtgtagacaaaatggtattcatcaatcatcttgtatgtaatctgctaattcaaggtataaaagatatcttttgttgcc

SEQ ID NO: 36195 - protein, 431 aa, Arabidopsis thaliana
  peptide (1)..(431): Ceres Seq. ID no. 12385489
  misc_feature (142)..(322): Pfam Name: Sodium Bile acid symporter family Pfam Description: Sodium Bile acid symporter family
  misc_feature (149)..(409): Homolog of NCBI NO: 28393076 NR Description: putative Na+ dependent ileal bile acid
  misc_feature (129)..(398): Homolog of NCBI NO: 7485401 NR Description: hypothetical protein At2g26900 [imported] -
  misc_feature (112)..(407): Homolog of NCBI NO: 7486890 NR Description: hypothetical protein T12H17.230 - Arabidopsis
  misc_feature (50)..(409): Homolog of NCBI NO: 30683305 NR Description: bile acid:sodium symporter family [Arabidopsis
  misc_feature (112)..(409): Homolog of NCBI NO: 34911708 NR Description: P0707D10.18 [Oryza sativa (japonica
  misc_feature (50)..(409): Homolog of NCBI NO: 20269901 NR Description: putative sodium-dependent bile acid symporter
  misc_feature (85)..(407): Homolog of NCBI NO: 18416020 NR Description: similar to putative transport protein
  misc_feature (1)..(395): Homolog of NCBI NO: 9279722 NR Description: contains similarity to transporter
  misc_feature (1)..(431): Homolog of NCBI NO: 18404505 NR Description: expressed protein
  misc_feature (1)..(431): Homolog of NCBI NO: 21554890 NR Description: unknown [Arabidopsis thaliana]
MTLIASLSLPPPAIQRQSLSEFHNLPAKSQSFNCQFRSSSSPLSSLHSSSLSNFLDFRLRRRNSGLVPVVACSTTPFMGRVGLHWRDGNMSLLSFCGGTDVTERADSSQFWSALLPFVVALTAVAALSYPPSFTWVSKDLYAPALGGIMLSIGIQLSVDDFALAFKRPVPLSVGFVAQYVLKPLLGVLVANAFGMPRTFYAGFILTCCVAGAQLSSYASSLSKADVAMSILLTSSTTIASVIFTPLLSGLLIGSVVPVDAVAMSKSILQVVLVPITLGLVLNTYAKPVVTLLQPVMPFVAMVCTSLCIGSPLSINRSQILSAEGLGLIVPIVTFHAVAFALGYWFSKIPGLRQEEEVSRTISLCTGMQSSTLAGLLASQFLGSSQAVPAACSVVVMAIMGLCLASFWGNGFRIRDVLSLSTPQSRGYTTES

SEQ ID NO: 36196 - protein, 354 aa, Arabidopsis thaliana
  peptide (1)..(354): Ceres Seq. ID no. 12385490
  misc_feature (65)..(245): Pfam Name: Sodium Bile acid symporter family Pfam Description: Sodium Bile acid symporter family
  misc_feature (72)..(332): Homolog of NCBI NO: 28393076 NR Description: putative Na+ dependent ileal bile acid
  misc_feature (52)..(321): Homolog of NCBI NO: 7485401 NR Description: hypothetical protein At2g26900 [imported] -
  misc_feature (35)..(330): Homolog of NCBI NO: 7486890 NR Description: hypothetical protein T12H17.230 - Arabidopsis
  misc_feature (1)..(332): Homolog of NCBI NO: 30683305 NR Description: bile acid:sodium symporter family [Arabidopsis
  misc_feature (35)..(332): Homolog of NCBI NO: 34911708 NR Description: P0707D10.18 [Oryza sativa (japonica
  misc_feature (1)..(332): Homolog of NCBI NO: 20269901 NR Description: putative sodium-dependent bile acid symporter
  misc_feature (8)..(330): Homolog of NCBI NO: 18416020 NR Description: similar to putative transport protein
  misc_feature (1)..(318): Homolog of NCBI NO: 9279722 NR Description: contains similarity to transporter
  misc_feature (1)..(354): Homolog of NCBI NO: 18404505 NR Description: expressed protein
  misc_feature (1)..(354): Homolog of NCBI NO: 21554890 NR Description: unknown [Arabidopsis thaliana]
MGRVGLHWRDGNMSLLSFCGGTDVTERADSSQFWSALLPFVVALTAVAALSYPPSFTWVSKDLYAPALGGIMLSIGIQLSVDDFALAFKRPVPLSVGFVAQYVLKPLLGVLVANAFGMPRTFYAGFILTCCVAGAQLSSYASSLSKADVAMSILLTSSTTIASVIFTPLLSGLLIGSVVPVDAVAMSKSILQVVLVPITLGLVLNTYAKPVVTLLQPVMPFVAMVCTSLCIGSPLSINRSQILSAEGLGLIVPIVTFHAVAFALGYWFSKIPGLRQEEEVSRTISLCTGMQSSTLAGLLASQFLGSSQAVPAACSVVVMAIMGLCLASFWGNGFRIRDVLSLSTPQSRGYTTES

SEQ ID NO: 36197 - protein, 342 aa, Arabidopsis thaliana
  peptide (1)..(342): Ceres Seq. ID no. 12385491
  misc_feature (53)..(233): Pfam Name: Sodium Bile acid symporter family Pfam Description: Sodium Bile acid symporter family
  misc_feature (60)..(320): Homolog of NCBI NO: 28393076 NR Description: putative Na+ dependent ileal bile acid
  misc_feature (40)..(309): Homolog of NCBI NO: 7485401 NR Description: hypothetical protein At2g26900 [imported] -
  misc_feature (23)..(318): Homolog of NCBI NO: 7486890 NR Description: hypothetical protein T12H17.230 - Arabidopsis
  misc_feature (1)..(320): Homolog of NCBI NO: 30683305 NR Description: bile acid:sodium symporter family [Arabidopsis
  misc_feature (23)..(320): Homolog of NCBI NO: 34911708 NR Description: P0707D10.18 [Oryza sativa (japonica
  misc_feature (1)..(320): Homolog of NCBI NO: 20269901 NR Description: putative sodium-dependent bile acid symporter
  misc_feature (1)..(318): Homolog of NCBI NO: 18416020 NR Description: similar to putative transport protein
  misc_feature (1)..(306): Homolog of NCBI NO: 9279722 NR Description: contains similarity to transporter
  misc_feature (1)..(342): Homolog of NCBI NO: 18404505 NR Description: expressed protein
  misc_feature (1)..(342): Homolog of NCBI NO: 21554890 NR Description: unknown [Arabidopsis thaliana]
MSLLSFCGGTDVTERADSSQFWSALLPFVVALTAVAALSYPPSFTWVSKDLYAPALGGIMLSIGIQLSVDDFALAFKRPVPLSVGFVAQYVLKPLLGVLVANAFGMPRTFYAGFILTCCVAGAQLSSYASSLSKADVAMSILLTSSTTIASVIFTPLLSGLLIGSVVPVDAVAMSKSILQVVLVPITLGLVLNTYAKPVVTLLQPVMPFVAMVCTSLCIGSPLSINRSQILSAEGLGLIVPIVTFHAVAFALGYWFSKIPGLRQEEEVSRTISLCTGMQSSTLAGLLASQFLGSSQAVPAACSVVVMAIMGLCLASFWGNGFRIRDVLSLSTPQSRGYTTES

SEQ ID NO: 36198 - DNA, 1295 bp, Arabidopsis thaliana
  misc_feature (1)..(1295): Ceres Seq. ID no. 12323001
  misc_feature: MA Experiment ID: 108474 Result: Down-regulated in Transcription
  misc_feature: MA Experiment 108474 PARAMETER Experiment Name: At_Drought_Flowers_cDNA_P Parameter: Timepoint (hr) Value: null
  misc_feature: MA Experiment 108474 PARAMETER Experiment Name: At_Drought_Flowers_cDNA_P Parameter: Treatment Value: Drought vs. No Drought
  misc_feature: MA Experiment ID: 108501 Result: Down-regulated in Transcription
  misc_feature: MA Experiment 108501 PARAMETER Experiment Name: At_ap2_floral_buds_cDNA_P Parameter: Plant Line Value: ap2 (Ler.)
  misc_feature: MA Experiment 108501 PARAMETER Experiment Name: At_ap2_floral_buds_cDNA_P Parameter: Tissue Value: Closed Flower
  misc_feature: MA Experiment ID: 108576 Result: Up-regulated in Transcription
  misc_feature: MA Experiment 108576 PARAMETER Experiment Name: At_42deg_Heat_cDNA_P Parameter: Temperature (deg C) Value: 42 vs. 22
  misc_feature: MA Experiment 108576 PARAMETER Experiment Name: At_42deg_Heat_cDNA_P Parameter: Timepoint (hr) Value: 1
  misc_feature: MA Experiment 108576 PARAMETER Experiment Name: At_42deg_Heat_cDNA_P Parameter: Tissue Value: Aerial
  misc_feature: MA Experiment ID: 108595 Result: Up-regulated in Transcription
  misc_feature: MA Experiment 108595 PARAMETER Experiment Name: At_Ler-pi_Ovule_cDNA_P Parameter: Plant Line Value: null
  misc_feature: MA Experiment ID: 20000087 Result: Up-regulated in Transcription
  misc_feature: MA Experiment 20000087 PARAMETER Experiment Name: At_100uM_ABA_Mutants_cDNA_P Parameter: Plant Line Value: WS
  misc_feature: MA Experiment 20000087 PARAMETER Experiment Name: At_100uM_ABA_Mutants_cDNA_P Parameter: Timepoint (hr) Value: 6
  misc_feature: MA Experiment 20000087 PARAMETER Experiment Name: At_100uM_ABA_Mutants_cDNA_P Parameter: Tissue Value: Aerial
  misc_feature: MA Experiment 20000087 PARAMETER Experiment Name: At_100uM_ABA_Mutants_cDNA_P Parameter: Treatment Value: 100uM ABA vs. No Treatment
  misc_feature: MA Experiment ID: 20000265 Result: Up-regulated in Transcription
  misc_feature: MA Experiment 20000265 PARAMETER Experiment Name: At_Open_Flower_P Parameter: Age (day) Value: 21
  misc_feature: MA Experiment 20000265 PARAMETER Experiment Name: At_Open_Flower_P Parameter: Plant Line Value: WS
  misc_feature: MA Experiment 20000265 PARAMETER Experiment Name: At_Open_Flower_P Parameter: Tissue Value: Closed Flower vs. Whole Plant
  misc_feature: MA Experiment ID: 20000286 Result: Up-regulated in Transcription
  misc_feature: MA Experiment 20000286 PARAMETER Experiment Name: At_Open_Flower_P Parameter: Age (day) Value: 21
  misc_feature: MA Experiment 20000286 PARAMETER Experiment Name: At_Open_Flower_P Parameter: Plant Line Value: WS
  misc_feature: MA Experiment 20000286 PARAMETER Experiment Name: At_Open_Flower_P Parameter: Tissue Value: Half Open vs. Whole Plant
  misc_feature: MA Experiment ID: 20001910 Result: Down-regulated in Transcription
  misc_feature: MA Experiment 20001910 PARAMETER Experiment Name: At_Drought_Reproduction_P Parameter: Age (day) Value: 37
  misc_feature: MA Experiment 20001910 PARAMETER Experiment Name: At_Drought_Reproduction_P Parameter: Organism Value: A. thaliana
  misc_feature: MA Experiment 20001910 PARAMETER Experiment Name: At_Drought_Reproduction_P Parameter: Plant Line Value: WS
  misc_feature: MA Experiment 20001910 PARAMETER Experiment Name: At_Drought_Reproduction_P Parameter: Timepoint (day) Value: 7
  misc_feature: MA Experiment 20001910 PARAMETER Experiment Name: At_Drought_Reproduction_P Parameter: Tissue Value: Flowers
  misc_feature: MA Experiment 20001910 PARAMETER Experiment Name: At_Drought_Reproduction_P Parameter: Treatment Value: Drought vs. No Drought
aatatttctccttcaggtttctatgatggaactagaatcagaaactcaagaactccatcttcacgtaaatggcgaacctgaagggaaattttcaacagaagagagaagtcacaagtactcttggaggttaagagtgtctctctatgtcactctcctcttagctggagagacaatagccactctcttaggtagactttactacgaaaaaggcggtaaaagcacatggctcgaaaccttggttcagcttgtagggtttcctttaacccttccttgctattattacttaaagcctgagccgtccaagactaaaaccattaccaaaaaaactacttcttccttcttgacactatctttagtgtatattggacttggcttgcttgttgctggacattgtattttgtactcatttgggctactttaccttcctgtctcaactttctctttgatctctgcgtcgcaattggcttttaacgccgtcttctcttacttcctaaactcacaaaaaatcacaccatttatactcaattcacttgttctcttaaccatatcttctacacttcttgttatccaacatgaaccagaatctccctcttctacttcaaagtccgcagccaagtccaagtatgtgattggatacatctgcgcggtcggtagctcagctggttattctctggtgctttctttaacagattacgcgttcgaaaagattctaaagaaatacacattcaaggctattttagacatggccacatatccgtctatggtagctacttgtgtagttgtggtaggactttttggaagtggtgggtggaaaaagctgagtacagaaatggaagagtttcaactagggaaaagctcatacattttgataaacatcggttcaacgatatcatggcaagcttgtttgattggaagtgttggtttgattatcgaagtttcatcgcttttttccaatgtcataagcactctttgtttaccagttgtgcctgttcttgctgttgtcttcttccgtgatgagatgagtggaatcaagttgattgcaatgtttttggccatctggggatttgtttcttatggttatcagcattatgtcaatgatagaaagccagaagaagaccaagagcttcctcagtctaaagaagaagaagaacaaaaacaagtagataccattcatgtccaagcttaggcaaagatccaagaaaaccaaaagcttttgtaatttgaaccagtttaatttaaaataaaaatgagttatatatattgtaggcactacaaataaaattggtaagtgtctc

SEQ ID NO: 36199 - protein, 394 aa, Arabidopsis thaliana
  peptide (1)..(394): Ceres Seq. ID no. 12323002
  misc_feature (194)..(376): Pfam Name: Domain of unknown function, DUF250 Pfam Description: Domain of unknown function, DUF250
  misc_feature (39)..(371): Homolog of NCBI NO: 38344290 NR Description: OSJNBa0013K16.22 [Oryza sativa (japonica
  misc_feature (39)..(371): Homolog of NCBI NO: 38605752 NR Description: OSJNBb0016D16.5 [Oryza sativa (japonica
  misc_feature (65)..(376): Homolog of NCBI NO: 15236796 NR Description: putative protein; protein id: At4g18200.1
  misc_feature (39)..(382): Homolog of NCBI NO: 15219436 NR Description: hypothetical protein
  misc_feature (65)..(383): Homolog of NCBI NO: 7487849 NR Description: hypothetical protein T9A21.60 - Arabidopsis
  misc_feature (17)..(384): Homolog of NCBI NO: 18491221 NR Description: unknown protein [Arabidopsis thaliana]
  misc_feature (17)..(384): Homolog of NCBI NO: 15236796 NR Description: putative protein; protein id: At4g18200.1
  misc_feature (55)..(382): Homolog of NCBI NO: 15236799 NR Description: putative protein; protein id: At4g18220.1
  misc_feature (31)..(383): Homolog of NCBI NO: 30684325 NR Description: purine permease family [Arabidopsis thaliana]
  misc_feature (25)..(394): Homolog of NCBI NO: 15236794 NR Description: putative protein; protein id: At4g18190.1
IFLLQVSMMELESETQELHLHVNGEPEGKFSTEERSHKYSWRLRVSLYVTLLLAGETIATLLGRLYYEKGGKSTWLETLVQLVGFPLTLPCYYYLKPEPSKTKTITKKTTSSFLTLSLVYIGLGLLVAGHCILYSFGLLYLPVSTFSLISASQLAFNAVFSYFLNSQKITPFILNSLVLLTISSTLLVIQHEPESPSSTSKSAAKSKYVIGYICAVGSSAGYSLVLSLTDYAFEKILKKYTFKAILDMATYPSMVATCVVVVGLFGSGGWKKLSTEMEEFQLGKSSYILINIGSTISWQACLIGSVGLIIEVSSLFSNVISTLCLPVVPVLAVVFFRDEMSGIKLIAMFLAIWGFVSYGYQHYVNDRKPEEDQELPQSKEEEEQKQVDTIHVQA

SEQ ID NO: 36200 - protein, 387 aa, Arabidopsis thaliana
  peptide (1)..(387): Ceres Seq. ID no. 12323003
  misc_feature (187)..(369): Pfam Name: Domain of unknown function, DUF250 Pfam Description: Domain of unknown function, DUF250
  misc_feature (32)..(364): Homolog of NCBI NO: 38344290 NR Description: OSJNBa0013K16.22 [Oryza sativa (japonica
  misc_feature (32)..(364): Homolog of NCBI NO: 38605752 NR Description: OSJNBb0016D16.5 [Oryza sativa (japonica
  misc_feature (58)..(369): Homolog of NCBI NO: 15236796 NR Description: putative protein; protein id: At4g18200.1
  misc_feature (32)..(375): Homolog of NCBI NO: 15219436 NR Description: hypothetical protein
  misc_feature (58)..(376): Homolog of NCBI NO: 7487849 NR Description: hypothetical protein T9A21.60 - Arabidopsis
  misc_feature (10)..(377): Homolog of NCBI NO: 18491221 NR Description: unknown protein [Arabidopsis thaliana]
  misc_feature (10)..(377): Homolog of NCBI NO: 15236796 NR Description: putative protein; protein id: At4g18200.1
  misc_feature (48)..(375): Homolog of NCBI NO: 15236799 NR Description: putative protein; protein id: At4g18220.1
  misc_feature (24)..(376): Homolog of NCBI NO: 30684325 NR Description: purine permease family [Arabidopsis thaliana]
  misc_feature (18)..(387): Homolog of NCBI NO: 15236794 NR Description: putative protein; protein id: At4g18190.1
MMELESETQELHLHVNGEPEGKFSTEERSHKYSWRLRVSLYVTLLLAGETIATLLGRLYYEKGGKSTWLETLVQLVGFPLTLPCYYYLKPEPSKTKTITKKTTSSFLTLSLVYIGLGLLVAGHCILYSFGLLYLPVSTFSLISASQLAFNAVFSYFLNSQKITPFILNSLVLLTISSTLLVIQHEPESPSSTSKSAAKSKYVIGYICAVGSSAGYSLVLSLTDYAFEKILKKYTFKAILDMATYPSMVATCVVVVGLFGSGGWKKLSTEMEEFQLGKSSYILINIGSTISWQACLIGSVGLIIEVSSLFSNVISTLCLPVVPVLAVVFFRDEMSGIKLIAMFLAIWGFVSYGYQHYVNDRKPEEDQELPQSKEEEEQKQVDTIHVQA

SEQ ID NO: 36201 - protein, 386 aa, Arabidopsis thaliana
  peptide (1)..(386): Ceres Seq. ID no. 12323004
  misc_feature (186)..(368): Pfam Name: Domain of unknown function, DUF250 Pfam Description: Domain of unknown function, DUF250
  misc_feature (31)..(363): Homolog of NCBI NO: 38344290 NR Description: OSJNBa0013K16.22 [Oryza sativa (japonica
  misc_feature (31)..(363): Homolog of NCBI NO: 38605752 NR Description: OSJNBb0016D16.5 [Oryza sativa (japonica
  misc_feature (57)..(368): Homolog of NCBI NO: 15236796 NR Description: putative protein; protein id: At4g18200.1
  misc_feature (31)..(374): Homolog of NCBI NO: 15219436 NR Description: hypothetical protein
  misc_feature (57)..(375): Homolog of NCBI NO: 7487849 NR Description: hypothetical protein T9A21.60 - Arabidopsis
  misc_feature (9)..(376): Homolog of NCBI NO: 18491221 NR Description: unknown protein [Arabidopsis thaliana]
  misc_feature (9)..(376): Homolog of NCBI NO: 15236796 NR Description: putative protein; protein id: At4g18200.1
  misc_feature (47)..(374): Homolog of NCBI NO: 15236799 NR Description: putative protein; protein id: At4g18220.1
  misc_feature (23)..(375): Homolog of NCBI NO: 30684325 NR Description: purine permease family [Arabidopsis thaliana]
  misc_feature (17)..(386): Homolog of NCBI NO: 15236794 NR Description: putative protein; protein id: At4g18190.1
MELESETQELHLHVNGEPEGKFSTEERSHKYSWRLRVSLYVTLLLAGETIATLLGRLYYEKGGKSTWLETLVQLVGFPLTLPCYYYLKPEPSKTKTITKKTTSSFLTLSLVYIGLGLLVAGHCILYSFGLLYLPVSTFSLISASQLAFNAVFSYFLNSQKITPFILNSLVLLTISSTLLVIQHEPESPSSTSKSAAKSKYVIGYICAVGSSAGYSLVLSLTDYAFEKILKKYTFKAILDMATYPSMVATCVVVVGLFGSGGWKKLSTEMEEFQLGKSSYILINIGSTISWQACLIGSVGLIIEVSSLFSNVISTLCLPVVPVLAVVFFRDEMSGIKLIAMFLAIWGFVSYGYQHYVNDRKPEEDQELPQSKEEEEQKQVDTIHVQA

SEQ ID NO: 36202 - DNA, 753 bp, Arabidopsis thaliana
  misc_feature (1)..(753): Ceres Seq. ID no. 12385641
  misc_feature: MA Experiment ID: 108573 Result: Up-regulated in Transcription
  misc_feature: MA Experiment 108573 PARAMETER Experiment Name: At_Drought_cDNA_P Parameter: Timepoint (hr) Value: 6
  misc_feature: MA Experiment 108573 PARAMETER Experiment Name: At_Drought_cDNA_P Parameter: Tissue Value: Aerial
  misc_feature: MA Experiment 108573 PARAMETER Experiment Name: At_Drought_cDNA_P Parameter: Treatment Value: Drought vs. No Drought
  misc_feature: MA Experiment ID: 108595 Result: Down-regulated in Transcription
  misc_feature: MA Experiment 108595 PARAMETER Experiment Name: At_Ler-pi_Ovule_cDNA_P Parameter: Plant Line Value: null
  misc_feature: MA Experiment ID: 20000224 Result: Down-regulated in Transcription
  misc_feature: MA Experiment ID: 20000794 Result: Down-regulated in Transcription
  misc_feature: MA Experiment 20000794 PARAMETER Experiment Name: At_Petals_P Parameter: Age (day) Value: 23-25 days
  misc_feature: MA Experiment 20000794 PARAMETER Experiment Name: At_Petals_P Parameter: Plant Line Value: WS
  misc_feature: MA Experiment 20000794 PARAMETER Experiment Name: At_Petals_P Parameter: Tissue Value: Petals vs. Whole plant
ttctccaatctcttttcgatttcgaatttttccatctttcaattttcagtagtttcgtctcaatttcacaatttcagtgtagtctacgatgaattcggctttagattttgcttttccggctacatttccggttaaatcgagttctgttggcggatatcggattccttctgctggattcagttcccgcttaagattgtgctctcttcctccttcttcatctatcaaggctgagtcatgtttaaaaagagacgtgcacaggcaaagaagcagtcttgagtcaatgttctgttatgataaaccaataccagaggaaataatcgaggagccagttggattatccatgtcagagagagagattggtgataatcagcgttgcacttgttgtgaagctaaaggtgcattgctttgttccacttgttctggaactggtctatatgtagattccattatggagagtcaaggcatcattgttaaagtccgttgcttaggttgtggtggaagtggtaatattatgtgcaaactttgtggtgggcgtggtcacgtaggacactgatgactccgtgtttcacttgtttccactcatggttctgttttacctattcgccacttttcttgctctgatcttattgtaaaatcctactctttgagttccatacatagatttgtgttcttgtactgatgtaatctctagctaaactatgcacaatcttgtcccagactattcattttctgttgttatataaaatggtttcc

SEQ ID NO: 36203 - protein, 154 aa, Arabidopsis thaliana
  peptide (1)..(154): Ceres Seq. ID no. 12385642
  misc_feature (1)..(154): Homolog of NCBI NO: 15238662 NR Description: putative protein
  misc_feature (1)..(154): Homolog of NCBI NO: 21554941 NR Description: unknown [Arabidopsis thaliana]
MNSALDFAFPATFPVKSSSVGGYRIPSAGFSSRLRLCSLPPSSSIKAESCLKRDVHRQRSSLESMFCYDKPIPEEIIEEPVGLSMSEREIGDNQRCTCCEAKGALLCSTCSGTGLYVDSIMESQGIIVKVRCLGCGGSGNIMCKLCGGRGHVGH

SEQ ID NO: 36204 - protein, 90 aa, Arabidopsis thaliana; identical to SEQ ID NO: 30305
  peptide (1)..(90): Ceres Seq. ID no. 12385643
  misc_feature (1)..(90): Homolog of NCBI NO: 15238662 NR Description: putative protein
  misc_feature (1)..(90): Homolog of NCBI NO: 21554941 NR Description: unknown [Arabidopsis thaliana]

SEQ ID NO: 36205 - DNA, 935 bp, Arabidopsis thaliana
  misc_feature (1)..(935): Ceres Seq. ID no. 12357795
  misc_feature: MA Experiment ID: 108434 Result: Up-regulated in Transcription
  misc_feature: MA Experiment 108434 PARAMETER Experiment Name: At_Root_Tips_cDNA_P Parameter: Tissue Value: Root Tips
  misc_feature: MA Experiment ID: 108573 Result: Down-regulated in Transcription
  misc_feature: MA Experiment 108573 PARAMETER Experiment Name: At_Drought_cDNA_P Parameter: Timepoint (hr) Value: 6
  misc_feature: MA Experiment 108573 PARAMETER Experiment Name: At_Drought_cDNA_P Parameter: Tissue Value: Aerial
  misc_feature: MA Experiment 108573 PARAMETER Experiment Name: At_Drought_cDNA_P Parameter: Treatment Value: Drought vs. No Drought
  misc_feature: MA Experiment ID: 20000090 Result: Up-regulated in Transcription
  misc_feature: MA Experiment ID: 20000227 Result: Up-regulated in Transcription
  misc_feature: MA Experiment 20000227 PARAMETER Experiment Name: At_Root-Tips-vs-Tops_P Parameter: Tissue Value: Root Tips vs. Root Tops
  misc_feature: MA Experiment ID: 20000496 Result: Up-regulated in Transcription
  misc_feature: MA Experiment 20000496 PARAMETER Experiment Name: At_Guard_Cells_P Parameter: Harvest Date Value: 7/19/2002
  misc_feature: MA Experiment 20000496 PARAMETER Experiment Name: At_Guard_Cells_P Parameter: Organism Value: Canola
  misc_feature: MA Experiment 20000496 PARAMETER Experiment Name: At_Guard_Cells_P Parameter: Tissue Value: Guard Cells vs. Leaves
  misc_feature: MA Experiment ID: 20000794 Result: Down-regulated in Transcription
  misc_feature: MA Experiment 20000794 PARAMETER Experiment Name: At_Petals_P Parameter: Age (day) Value: 23-25 days
  misc_feature: MA Experiment 20000794 PARAMETER Experiment Name: At_Petals_P Parameter: Plant Line Value: WS
  misc_feature: MA Experiment 20000794 PARAMETER Experiment Name: At_Petals_P Parameter: Tissue Value: Petals vs. Whole plant
  misc_feature: MA Experiment ID: 20001558 Result: Up-regulated in Transcription
  misc_feature: MA Experiment 20001558 PARAMETER Experiment Name: At_Drought_Soil_Dry_P Parameter: Age (day) Value: 27
  misc_feature: MA Experiment 20001558 PARAMETER Experiment Name: At_Drought_Soil_Dry_P Parameter: Organism Value: A. thaliana
  misc_feature: MA Experiment 20001558 PARAMETER Experiment Name: At_Drought_Soil_Dry_P Parameter: Plant Line Value: WS
  misc_feature: MA Experiment 20001558 PARAMETER Experiment Name: At_Drought_Soil_Dry_P Parameter: Post Timepoint (hr) Value: 6
  misc_feature: MA Experiment 20001558 PARAMETER Experiment Name: At_Drought_Soil_Dry_P Parameter: Post-Treatment Value: Re-Water vs. No Drought
  misc_feature: MA Experiment 20001558 PARAMETER Experiment Name: At_Drought_Soil_Dry_P Parameter: Timepoint (day) Value: 13
  misc_feature: MA Experiment 20001558 PARAMETER Experiment Name: At_Drought_Soil_Dry_P Parameter: Treatment Value: Drought vs. No Drought
  misc_feature: MA Experiment ID: 20001560 Result: Up-regulated in Transcription
  misc_feature: MA Experiment 20001560 PARAMETER Experiment Name: At_Drought_Soil_Dry_P Parameter: Age (day) Value: 28
  misc_feature: MA Experiment 20001560 PARAMETER Experiment Name: At_Drought_Soil_Dry_P Parameter: Organism Value: A. thaliana
  misc_feature: MA Experiment 20001560 PARAMETER Experiment Name: At_Drought_Soil_Dry_P Parameter: Plant Line Value: WS
  misc_feature: MA Experiment 20001560 PARAMETER Experiment Name: At_Drought_Soil_Dry_P Parameter: Post Timepoint (hr) Value: None
  misc_feature: MA Experiment 20001560 PARAMETER Experiment Name: At_Drought_Soil_Dry_P Parameter: Post-Treatment Value: None
  misc_feature: MA Experiment 20001560 PARAMETER Experiment Name: At_Drought_Soil_Dry_P Parameter: Timepoint (day) Value: 14
  misc_feature: MA Experiment 20001560 PARAMETER Experiment Name: At_Drought_Soil_Dry_P Parameter: Treatment Value: Drought vs. No Drought
  misc_feature: MA Experiment ID: 20001757 Result: Up-regulated in Transcription
  misc_feature: MA Experiment 20001757 PARAMETER Experiment Name: At_50mM_NH4NO3_L-to-H_P Parameter: Timepoint (hr) Value: 6
  misc_feature: MA Experiment 20001757 PARAMETER Experiment Name: At_50mM_NH4NO3_L-to-H_P Parameter: Tissue Value: Leaf
  misc_feature: MA Experiment 20001757 PARAMETER Experiment Name: At_50mM_NH4NO3_L-to-H_P Parameter: Treatment Value: 50mM NH4NO3 vs 100mM Mannitol
aaaacgccgtcgagaaatctccctctagggtttctttgatcaaaccagagagccgtcagggagagcaaaacaaagatcggagaagatgaagacgattctttcttccgaaacgatggacatccccgacagtgttaccatcaaggttcacgctaaagtgatcgaagtcgaaggacctcgcgggaagcttgttcgcgatttcaagcatctcaacctcgatttccagctgatcaaggatccagagactggaaagaagaagcttaagatcgattcgtggtttggaacacgcaaaaccagcgcctccatcagaaccgctcttagccacgtcgataacttgatctccggtgttaccagaggtttccgttacaagatgaggttcgtgtacgcccattttcccatcaacgcctccatcggcggtgacggaaagtctatcgagatccgtaacttccttggcgagaagaaggtgaggaaggtagagatgttggatggtgtaaccattgttcgatctgagaaggtgaaggatgagattgttcttgacggtaacgacatcgagcttgtttcaaggtcatgcgctttgatcaaccagaaatgtcacgtgaagaagaaggatatcaggaagtttcttgatggtatctatgttagcgagaaaagcaagatcgtagaggaagaatgaatgcccatatcatcgtcttagctcctatttcttgtcttttgaatgttagtttcgttttatggaccaaatccaccggtgttgcaaaactctggctatcccttgttccctttttgtgttcgagattttatttacttatgcacaagttttggagacgagctatcattttcacctttgcttaattaaatcatatcgtgtgaatttgggattgttctggatttggcattgtgggttgtgcattcaaaattgatacttcagtcactaaact

SEQ ID NO: 36206 - protein, 194 aa, Arabidopsis thaliana
  peptide (1)..(194): Ceres Seq. ID no. 12357796
  misc_feature (102)..(181): Pfam Name: Ribosomal protein L6 Pfam Description: Ribosomal protein L6
  misc_feature (1)..(194): Homolog of NCBI NO: 37779100 NR Description: ribosomal protein L9 [Pagrus major]
  misc_feature (33)..(166): Homolog of NCBI NO: 12322579 NR Description: ribosomal protein L9, 5' partial [Arabidopsis
  misc_feature (1)..(193): Homolog of NCBI NO: 6174959 NR Description: 60S RIBOSOMAL PROTEIN L9
  misc_feature (1)..(193): Homolog of NCBI NO: 33087067 NR Description: ribosomal L9-like protein [Oryza sativa (japonica
  misc_feature (1)..(194): Homolog of NCBI NO: 6015604 NR Description: ribosomal protein L9 [Pisum sativum]
  misc_feature (1)..(194): Homolog of NCBI NO: 266945 NR Description: 60S ribosomal protein L9 (Gibberellin-regulated
  misc_feature (1)..(194): Homolog of NCBI NO: 15235114 NR Description: putative ribosomal protein L9, cytosolic
  misc_feature (1)..(194): Homolog of NCBI NO: 2129720 NR Description: ribosomal protein L9, cytosolic - Arabidopsis
  misc_feature (1)..(194): Homolog of NCBI NO: 21554945 NR Description: ribosomal protein L9, putative [Arabidopsis
  misc_feature (1)..(194): Homolog of NCBI NO: 18398753 NR Description: ribosomal protein L9, putative
MKTILSSETMDIPDSVTIKVHAKVIEVEGPRGKLVRDFKHLNLDFQLIKDPETGKKKLKIDSWFGTRKTSASIRTALSHVDNLISGVTRGFRYKMRFVYAHFPINASIGGDGKSIEIRNFLGEKKVRKVEMLDGVTIVRSEKVKDEIVLDGNDIELVSRSCALINQKCHVKKKDIRKFLDGIYVSEKSKIVEEE

SEQ ID NO: 36207 - protein, 185 aa, Arabidopsis thaliana
  peptide (1)..(185): Ceres Seq. ID no. 12357797
  misc_feature (93)..(172): Pfam Name: Ribosomal protein L6 Pfam Description: Ribosomal protein L6
  misc_feature (1)..(185): Homolog of NCBI NO: 37779100 NR Description: ribosomal protein L9 [Pagrus major]
  misc_feature (24)..(157): Homolog of NCBI NO: 12322579 NR Description: ribosomal protein L9, 5' partial [Arabidopsis
  misc_feature (1)..(184): Homolog of NCBI NO: 6174959 NR Description: 60S RIBOSOMAL PROTEIN L9
  misc_feature (1)..(184): Homolog of NCBI NO: 33087067 NR Description: ribosomal L9-like protein [Oryza sativa (japonica
  misc_feature (1)..(185): Homolog of NCBI NO: 6015604 NR Description: ribosomal protein L9 [Pisum sativum]
  misc_feature (1)..(185): Homolog of NCBI NO: 266945 NR Description: 60S ribosomal protein L9 (Gibberellin-regulated
  misc_feature (1)..(185): Homolog of NCBI NO: 15235114 NR Description: putative ribosomal protein L9, cytosolic
  misc_feature (1)..(185): Homolog of NCBI NO: 2129720 NR Description: ribosomal protein L9, cytosolic - Arabidopsis
  misc_feature (1)..(185): Homolog of NCBI NO: 21554945 NR Description: ribosomal protein L9, putative [Arabidopsis
  misc_feature (1)..(185): Homolog of NCBI NO: 18398753 NR Description: ribosomal protein L9, putative
MDIPDSVTIKVHAKVIEVEGPRGKLVRDFKHLNLDFQLIKDPETGKKKLKIDSWFGTRKTSASIRTALSHVDNLISGVTRGFRYKMRFVYAHFPINASIGGDGKSIEIRNFLGEKKVRKVEMLDGVTIVRSEKVKDEIVLDGNDIELVSRSCALINQKCHVKKKDIRKFLDGIYVSEKSKIVEEE

SEQ ID NO: 36208 - protein, 100 aa, Arabidopsis thaliana
  peptide (1)..(100): Ceres Seq. ID no. 12357798
  misc_feature (8)..(87): Pfam Name: Ribosomal protein L6 Pfam Description: Ribosomal protein L6
  misc_feature (1)..(100): Homolog of NCBI NO: 37779100 NR Description: ribosomal protein L9 [Pagrus major]
  misc_feature (1)..(72): Homolog of NCBI NO: 12322579 NR Description: ribosomal protein L9, 5' partial [Arabidopsis
  misc_feature (1)..(99): Homolog of NCBI NO: 6174959 NR Description: 60S RIBOSOMAL PROTEIN L9
  misc_feature (1)..(99): Homolog of NCBI NO: 33087067 NR Description: ribosomal L9-like protein [Oryza sativa (japonica
  misc_feature (1)..(100): Homolog of NCBI NO: 6015604 NR Description: ribosomal protein L9 [Pisum sativum]
  misc_feature (1)..(100): Homolog of NCBI NO: 266945 NR Description: 60S ribosomal protein L9 (Gibberellin-regulated
  misc_feature (1)..(100): Homolog of NCBI NO: 15235114 NR Description: putative ribosomal protein L9, cytosolic
  misc_feature (1)..(100): Homolog of NCBI NO: 2129720 NR Description: ribosomal protein L9, cytosolic - Arabidopsis
  misc_feature (1)..(100): Homolog of NCBI NO: 21554945 NR Description: ribosomal protein L9, putative [Arabidopsis
  misc_feature (1)..(100): Homolog of NCBI NO: 18398753 NR Description: ribosomal protein L9, putative
MRFVYAHFPINASIGGDGKSIEIRNFLGEKKVRKVEMLDGVTIVRSEKVKDEIVLDGNDIELVSRSCALINQKCHVKKKDIRKFLDGIYVSEKSKIVEEE

SEQ ID NO: 36209 - DNA, 1575 bp, Arabidopsis thaliana
  misc_feature (1)..(1575): Ceres Seq. ID no. 13495954
  misc_feature: MA Experiment ID: 108433 Result: Up-regulated in Transcription
  misc_feature: MA Experiment 108433 PARAMETER Experiment Name: At_rhl_Mutant2_cDNA_P Parameter: Age (day) Value: 7
  misc_feature: MA Experiment 108433 PARAMETER Experiment Name: At_rhl_Mutant2_cDNA_P Parameter: Organism Value: A. thaliana
  misc_feature: MA Experiment 108433 PARAMETER Experiment Name: At_rhl_Mutant2_cDNA_P Parameter: Plant Line Value: rhl Mutant vs. wt landsburg
  misc_feature: MA Experiment 108433 PARAMETER Experiment Name: At_rhl_Mutant2_cDNA_P Parameter: Tissue Value: Roots
  misc_feature: MA Experiment ID: 108461 Result: Up-regulated in Transcription
  misc_feature: MA Experiment 108461 PARAMETER Experiment Name: At_Germinating_Seeds_cDNA_P Parameter: Age (day) Value: 1 vs. 0
  misc_feature: MA Experiment 108461 PARAMETER Experiment Name: At_Germinating_Seeds_cDNA_P Parameter: Tissue Value: Germinating Seeds
  misc_feature: MA Experiment ID: 108462 Result: Up-regulated in Transcription
  misc_feature: MA Experiment 108462 PARAMETER Experiment Name: At_Germinating_Seeds_cDNA_P Parameter: Age (day) Value: 2 vs. 0
  misc_feature: MA Experiment 108462 PARAMETER Experiment Name: At_Germinating_Seeds_cDNA_P Parameter: Tissue Value: Germinating Seeds
  misc_feature: MA Experiment ID: 108463 Result: Up-regulated in Transcription
  misc_feature: MA Experiment 108463 PARAMETER Experiment Name: At_Germinating_Seeds_cDNA_P Parameter: Age (day) Value: 3 vs. 0
  misc_feature: MA Experiment 108463 PARAMETER Experiment Name: At_Germinating_Seeds_cDNA_P Parameter: Tissue Value: Germinating Seeds
  misc_feature: MA Experiment ID: 108464 Result: Up-regulated in Transcription
  misc_feature: MA Experiment 108464 PARAMETER Experiment Name: At_Germinating_Seeds_cDNA_P Parameter: Age (day) Value: 4 vs. 0
  misc_feature: MA Experiment 108464 PARAMETER Experiment Name: At_Germinating_Seeds_cDNA_P Parameter: Tissue Value: Germinating Seeds
  misc_feature: MA Experiment ID: 108474 Result: Down-regulated in Transcription
  misc_feature: MA Experiment 108474 PARAMETER Experiment Name: At_Drought_Flowers_cDNA_P Parameter: Timepoint (hr) Value: null
  misc_feature: MA Experiment 108474 PARAMETER Experiment Name: At_Drought_Flowers_cDNA_P Parameter: Treatment Value: Drought vs. No Drought
  misc_feature: MA Experiment ID: 108579 Result: Down-regulated in Transcription
  misc_feature: MA Experiment 108579 PARAMETER Experiment Name: At_4deg_Cold_cDNA_P Parameter: Temperature (deg C) Value: 4 vs. 22
  misc_feature: MA Experiment 108579 PARAMETER Experiment Name: At_4deg_Cold_cDNA_P Parameter: Timepoint (hr) Value: 6
  misc_feature: MA Experiment 108579 PARAMETER Experiment Name: At_4deg_Cold_cDNA_P Parameter: Tissue Value: Aerial
  misc_feature: MA Experiment ID: 108594 Result: Up-regulated in Transcription
  misc_feature: MA Experiment 108594 PARAMETER Experiment Name: At_Ler-rhl_Root_cDNA_P Parameter: Plant Line Value: null
  misc_feature: MA Experiment ID: 108595 Result: Up-regulated in Transcription
  misc_feature: MA Experiment 108595 PARAMETER Experiment Name: At_Ler-pi_Ovule_cDNA_P Parameter: Plant Line Value: null
  misc_feature: MA Experiment ID: 20000180 Result: Up-regulated in Transcription
  misc_feature: MA Experiment 20000180 PARAMETER Experiment Name: At_Germinating_Seeds_P Parameter: Age (hr) Value: 24 vs. 0
  misc_feature: MA Experiment 20000180 PARAMETER Experiment Name: At_Germinating_Seeds_P Parameter: Tissue Value: Germinating Seeds
  misc_feature: MA Experiment ID: 20000182 Result: Up-regulated in Transcription
  misc_feature: MA Experiment 20000182 PARAMETER Experiment Name: At_2mM_SA_P Parameter: Age (day) Value: 14
  misc_feature: MA Experiment 20000182 PARAMETER Experiment Name: At_2mM_SA_P Parameter: Organism Value: A. thaliana
  misc_feature: MA Experiment 20000182 PARAMETER Experiment Name: At_2mM_SA_P Parameter: Plant Line Value: WS
  misc_feature: MA Experiment 20000182 PARAMETER Experiment Name: At_2mM_SA_P Parameter: Timepoint (hr) Value: 6
  misc_feature: MA Experiment 20000182 PARAMETER Experiment Name: At_2mM_SA_P Parameter: Tissue Value: Aerial
  misc_feature: MA Experiment 20000182 PARAMETER Experiment Name: At_2mM_SA_P Parameter: Treatment Value: 2mM SA vs. No Treatment
  misc_feature: MA Experiment ID: 20000185 Result: Up-regulated in Transcription
  misc_feature: MA Experiment 20000185 PARAMETER Experiment Name: At_Roots__P Parameter: Age (day) Value: 7 vs. 21
  misc_feature: MA Experiment 20000185 PARAMETER Experiment Name: At_Roots__P Parameter: Organism Value: A. thaliana
  misc_feature: MA Experiment 20000185 PARAMETER Experiment Name: At_Roots__P Parameter: Tissue Value: Roots vs. Whole Plant
  misc_feature: MA Experiment ID: 20000224 Result: Down-regulated in Transcription
  misc_feature: MA Experiment ID: 20000227 Result: Up-regulated in Transcription
  misc_feature: MA Experiment 20000227 PARAMETER Experiment Name: At_Root-Tips-vs-Tops_P Parameter: Tissue Value: Root Tips vs. Root Tops
  misc_feature: MA Experiment ID: 20000234 Result: Down-regulated in Transcription
  misc_feature: MA Experiment 20000234 PARAMETER Experiment Name: At_Siliques_P Parameter: Age (day) Value: 21
  misc_feature: MA Experiment 20000234 PARAMETER Experiment Name: At_Siliques_P Parameter: Organism Value: A. thaliana
  misc_feature: MA Experiment 20000234 PARAMETER Experiment Name: At_Siliques_P Parameter: Plant Line Value: WS
  misc_feature: MA Experiment 20000234 PARAMETER Experiment Name: At_Siliques_P Parameter: Tissue Value: Less Than 5mm Siliques vs. Whole Plant
  misc_feature: MA Experiment ID: 20000235 Result: Down-regulated in Transcription
  misc_feature: MA Experiment 20000235 PARAMETER Experiment Name: At_Siliques_P Parameter: Age (day) Value: 21
  misc_feature: MA Experiment 20000235 PARAMETER Experiment Name: At_Siliques_P Parameter: Organism Value: A. thaliana
  misc_feature: MA Experiment 20000235 PARAMETER Experiment Name: At_Siliques_P Parameter: Plant Line Value: WS
  misc_feature: MA Experiment 20000235 PARAMETER Experiment Name: At_Siliques_P Parameter: Tissue Value: 5-10mm Siliques vs. Whole Plant
  misc_feature: MA Experiment ID: 20000265 Result: Up-regulated in Transcription
  misc_feature: MA Experiment 20000265 PARAMETER Experiment Name: At_Open_Flower_P Parameter: Age (day) Value: 21
  misc_feature: MA Experiment 20000265 PARAMETER Experiment Name: At_Open_Flower_P Parameter: Plant Line Value: WS
  misc_feature: MA Experiment 20000265 PARAMETER Experiment Name: At_Open_Flower_P Parameter: Tissue Value: Closed Flower vs. Whole Plant
  misc_feature: MA Experiment ID: 20000286 Result: Up-regulated in Transcription
  misc_feature: MA Experiment 20000286 PARAMETER Experiment Name: At_Open_Flower_P Parameter: Age (day) Value: 21
  misc_feature: MA Experiment 20000286 PARAMETER Experiment Name: At_Open_Flower_P Parameter: Plant Line Value: WS
  misc_feature: MA Experiment 20000286 PARAMETER Experiment Name: At_Open_Flower_P Parameter: Tissue Value: Half Open vs. Whole Plant
  misc_feature: MA Experiment ID: 20000438 Result: Down-regulated in Transcription
  misc_feature: MA Experiment 20000438 PARAMETER Experiment Name: At_Shoots__P Parameter: Age (day) Value: 14
  misc_feature: MA Experiment 20000438 PARAMETER Experiment Name: At_Shoots__P Parameter: Tissue Value: Shoots vs. Whole Plant
  misc_feature: MA Experiment ID: 20000439 Result: Up-regulated in Transcription
  misc_feature: MA Experiment 20000439 PARAMETER Experiment Name: At_Roots__P Parameter: Age (day) Value: 14 vs. 21
  misc_feature: MA Experiment 20000439 PARAMETER Experiment Name: At_Roots__P Parameter: Organism Value: A. thaliana
  misc_feature: MA Experiment 20000439 PARAMETER Experiment Name: At_Roots__P Parameter: Tissue Value: Roots vs. Whole Plant
  misc_feature: MA Experiment ID: 20001247 Result: Up-regulated in Transcription
  misc_feature: MA Experiment 20001247 PARAMETER Experiment Name: At_Far-red-induction_P Parameter: Age (day) Value: 7
  misc_feature: MA Experiment 20001247 PARAMETER Experiment Name: At_Far-red-induction_P Parameter: Light Value: Far-red vs. White
  misc_feature: MA Experiment 20001247 PARAMETER Experiment Name: At_Far-red-induction_P Parameter: Organism Value: A. thaliana
  misc_feature: MA Experiment 20001247 PARAMETER Experiment Name: At_Far-red-induction_P Parameter: Plant Line Value: Columbia
  misc_feature: MA Experiment 20001247 PARAMETER Experiment Name: At_Far-red-induction_P Parameter: Timepoint (hr) Value: 1
  misc_feature: MA Experiment 20001247 PARAMETER Experiment Name: At_Far-red-induction_P Parameter: Tissue Value: Whole Plant
  misc_feature: MA Experiment ID: 20001248 Result: Up-regulated in Transcription
  misc_feature: MA Experiment 20001248 PARAMETER Experiment Name: At_Far-red-induction_P Parameter: Age (day) Value: 7
  misc_feature: MA Experiment 20001248 PARAMETER Experiment Name: At_Far-red-induction_P Parameter: Light Value: Far-red vs. White
  misc_feature: MA Experiment 20001248 PARAMETER Experiment Name: At_Far-red-induction_P Parameter: Organism Value: A. thaliana
  misc_feature: MA Experiment 20001248 PARAMETER Experiment Name: At_Far-red-induction_P Parameter: Plant Line Value: Columbia
  misc_feature: MA Experiment 20001248 PARAMETER Experiment Name: At_Far-red-induction_P Parameter: Timepoint (hr) Value: 4
  misc_feature: MA Experiment 20001248 PARAMETER Experiment Name: At_Far-red-induction_P Parameter: Tissue Value: Whole Plant
  misc_feature: MA Experiment ID: 20001450 Result: Up-regulated in Transcription
  misc_feature: MA Experiment 20001450 PARAMETER Experiment Name: At_Far-red-induction_P Parameter: Age (day) Value: 7
  misc_feature: MA Experiment 20001450 PARAMETER Experiment Name: At_Far-red-induction_P Parameter: Light Value: Far-red vs. White
  misc_feature: MA Experiment 20001450 PARAMETER Experiment Name: At_Far-red-induction_P Parameter: Organism Value: A. thaliana
  misc_feature: MA Experiment 20001450 PARAMETER Experiment Name: At_Far-red-induction_P Parameter: Plant Line Value: Columbia
  misc_feature: MA Experiment 20001450 PARAMETER Experiment Name: At_Far-red-induction_P Parameter: Timepoint (hr) Value: 8
  misc_feature: MA Experiment 20001450 PARAMETER Experiment Name: At_Far-red-induction_P Parameter: Tissue Value: Whole Plant
  misc_feature: MA Experiment ID: 20001451 Result: Up-regulated in Transcription
  misc_feature: MA Experiment 20001451 PARAMETER Experiment Name: At_Far-red-induction_P Parameter: Age (day) Value: 7
  misc_feature: MA Experiment 20001451 PARAMETER Experiment Name: At_Far-red-induction_P Parameter: Light Value: Far-red vs. White
  misc_feature: MA Experiment 20001451 PARAMETER Experiment Name: At_Far-red-induction_P Parameter: Organism Value: A. thaliana
  misc_feature: MA Experiment 20001451 PARAMETER Experiment Name: At_Far-red-induction_P Parameter: Plant Line Value: Columbia
  misc_feature: MA Experiment 20001451 PARAMETER Experiment Name: At_Far-red-induction_P Parameter: Timepoint (hr) Value: 24
  misc_feature: MA Experiment 20001451 PARAMETER Experiment Name: At_Far-red-induction_P Parameter: Tissue Value: Whole Plant
  misc_feature: MA Experiment ID: 20001555 Result: Up-regulated in Transcription
  misc_feature: MA Experiment 20001555 PARAMETER Experiment Name: At_Drought_Soil_Dry_P Parameter: Age (day) Value: 24
  misc_feature: MA Experiment 20001555 PARAMETER Experiment Name: At_Drought_Soil_Dry_P Parameter: Organism Value: A. thaliana
  misc_feature: MA Experiment 20001555 PARAMETER Experiment Name: At_Drought_Soil_Dry_P Parameter: Plant Line Value: WS
  misc_feature: MA Experiment 20001555 PARAMETER Experiment Name: At_Drought_Soil_Dry_P Parameter: Post Timepoint (hr) Value: None
  misc_feature: MA Experiment 20001555 PARAMETER Experiment Name: At_Drought_Soil_Dry_P Parameter: Post-Treatment Value: None
  misc_feature: MA Experiment 20001555 PARAMETER Experiment Name: At_Drought_Soil_Dry_P Parameter: Timepoint (day) Value: 10
  misc_feature: MA Experiment 20001555 PARAMETER Experiment Name: At_Drought_Soil_Dry_P Parameter: Treatment Value: Drought vs. No Drought
  misc_feature: MA Experiment ID: 20001556 Result: Up-regulated in Transcription
  misc_feature: MA Experiment 20001556 PARAMETER Experiment Name: At_Drought_Soil_Dry_P Parameter: Age (day) Value: 26
  misc_feature: MA Experiment 20001556 PARAMETER Experiment Name: At_Drought_Soil_Dry_P Parameter: Organism Value: A. thaliana
  misc_feature: MA Experiment 20001556 PARAMETER Experiment Name: At_Drought_Soil_Dry_P Parameter: Plant Line Value: WS
  misc_feature: MA Experiment 20001556 PARAMETER Experiment Name: At_Drought_Soil_Dry_P Parameter: Post Timepoint (hr) Value: None
  misc_feature: MA Experiment 20001556 PARAMETER Experiment Name: At_Drought_Soil_Dry_P Parameter: Post-Treatment Value: None
  misc_feature: MA Experiment 20001556 PARAMETER Experiment Name: At_Drought_Soil_Dry_P Parameter: Timepoint (day) Value: 12
  misc_feature: MA Experiment 20001556 PARAMETER Experiment Name: At_Drought_Soil_Dry_P Parameter: Treatment Value: Drought vs. No Drought
  misc_feature: MA Experiment ID: 20001557 Result: Up-regulated in Transcription
  misc_feature: MA Experiment 20001557 PARAMETER Experiment Name: At_Drought_Soil_Dry_P Parameter: Age (day) Value: 27
  misc_feature: MA Experiment 20001557 PARAMETER Experiment Name: At_Drought_Soil_Dry_P Parameter: Organism Value: A. thaliana
  misc_feature: MA Experiment 20001557 PARAMETER Experiment Name: At_Drought_Soil_Dry_P Parameter: Plant Line Value: WS
  misc_feature: MA Experiment 20001557 PARAMETER Experiment Name: At_Drought_Soil_Dry_P Parameter: Post Timepoint (hr) Value: 3
  misc_feature: MA Experiment 20001557 PARAMETER Experiment Name: At_Drought_Soil_Dry_P Parameter: Post-Treatment Value: Re-Water vs. No Drought
  misc_feature: MA Experiment 20001557 PARAMETER Experiment Name: At_Drought_Soil_Dry_P Parameter: Timepoint (day) Value: 13
  misc_feature: MA Experiment 20001557 PARAMETER Experiment Name: At_Drought_Soil_Dry_P Parameter: Treatment Value: Drought vs. No Drought
  misc_feature: MA Experiment ID: 20001904 Result: Up-regulated in Transcription
  misc_feature: MA Experiment 20001904 PARAMETER Experiment Name: At_Drought_Reproduction_P Parameter: Age (day) Value: 37
  misc_feature: MA Experiment 20001904 PARAMETER Experiment Name: At_Drought_Reproduction_P Parameter: Organism Value: A. thaliana
  misc_feature: MA Experiment 20001904 PARAMETER Experiment Name: At_Drought_Reproduction_P Parameter: Plant Line Value: WS
  misc_feature: MA Experiment 20001904 PARAMETER Experiment Name: At_Drought_Reproduction_P Parameter: Timepoint (day) Value: 7
  misc_feature: MA Experiment 20001904 PARAMETER Experiment Name: At_Drought_Reproduction_P Parameter: Tissue Value: Rosettes
  misc_feature: MA Experiment 20001904 PARAMETER Experiment Name: At_Drought_Reproduction_P Parameter: Treatment Value: Drought vs. No Drought
  misc_feature: MA Experiment ID: 20001905 Result: Up-regulated in Transcription
  misc_feature: MA Experiment 20001905 PARAMETER Experiment Name: At_Drought_Reproduction_P Parameter: Age (day) Value: 40
  misc_feature: MA Experiment 20001905 PARAMETER Experiment Name: At_Drought_Reproduction_P Parameter: Organism Value: A. thaliana
  misc_feature: MA Experiment 20001905 PARAMETER Experiment Name: At_Drought_Reproduction_P Parameter: Plant Line Value: WS
  misc_feature: MA Experiment 20001905 PARAMETER Experiment Name: At_Drought_Reproduction_P Parameter: Timepoint (day) Value: 10
  misc_feature: MA Experiment 20001905 PARAMETER Experiment Name: At_Drought_Reproduction_P Parameter: Tissue Value: Rosettes
  misc_feature: MA Experiment 20001905 PARAMETER Experiment Name: At_Drought_Reproduction_P Parameter: Treatment Value: Drought vs. No Drought
gtcaaatcgaaaacaaacacaaaaagcaaacaaatatggctacttcaatcaaatctataaccctagctctcttgatattctcagtgttactaatctccttgtctctcggctccgtcacagcgacggagactacacgaaacgaggcggaggcacgacggatgtatgaaaggtggcttgttgagaatcggaagaactataatggtctcggagagaaagagagacgctttgagatcttcaaagacaacttgaagttcgtcgaagagcacagttccatcccgaatcggacttacgaagtcgggttgacccggttcgctgatttgactaacgatgagtttcgtgcgatttacttgaggagcaagatggagagaactagggttccggtgaagggagagaagtatttgtataaggttggagatagcttacctgatgctatcgattggagagctaaaggtgctgttaatccagtcaaagatcaaggatcctgtggaagttgttgggcgttttccgcgattggagcggttgaaggtataaatcagattaagacaggagagttgatatctttgtctgagcaagaacttgttgattgtgacacaagttacaatgatggatgtggtggaggtcttatggattatgcttttaagttcattattgaaaacggtggtattgatacagaggaagattatccttatattgcaactgatgttaacgtgtgcaattctgataagaagaacactcgtgttgttaccatcgatggttatgaggatgttcctcaaaacgatgagaagtctttgaagaaggctcttgctaatcaacctattagtgttgccattgaagctggtggcagagctttccagctttacacatctggtgtgtttacaggaacatgtggaacatctttggaccatggtgttgtagctgtgggatacggatcagaaggtggtcaagactactggattgttcgtaactcatggggatcaaactggggagaaagcggatactttaagctcgaacgtaacatcaaagagtcatcagggaaatgcggtgtggcgatgatggcttcttaccctaccaaatcatcaggctcaaacccaccaaaaccgccagcgccttcaccggttgtttgtgacaagtctaacacttgtccagctaagtccacttgttgttgcctatatgagtacaatggtaaatgctatagctggggatgttgtccgtatgagtcagccacttgttgcgatgatggttctagctgctgcccccagtcataccctgtctgcgatttaaaggccaatacttgtagaatgaagggaaacagtccgttaagcataaaagctttgacacgaggaccagcgattgcgaccacaaagtctacaaacatgctagtgggcagcgcttgaggagagataatacaaacgaagaaccgatttgttttcagcccacgttatcaagattcagtcttttgtctttagacacttccaagttggatcatagtttgattactcttgtcaaatttaatgttatcttggatttgattttacttgatgtaaatgtttaagaagtaatctgatatttgcttcc

SEQ ID NO: 36210 - protein, 463 aa, Arabidopsis thaliana
  peptide (1)..(463): Ceres Seq. ID no. 13495955
  misc_feature (140)..(356): Pfam Name: Papain family cysteine protease Pfam Description: Papain family cysteine protease
  misc_feature (8)..(431): Homolog of NCBI NO: 18141285 NR Description: senescence-associated cysteine protease [Brassica
  misc_feature (55)..(452): Homolog of NCBI NO: 1361974 NR Description: cysteine proteinase (EC 3.4.22.-) - clove pink
  misc_feature (12)..(446): Homolog of NCBI NO: 5777889 NR Description: cysteine protease [Solanum tuberosum]
  misc_feature (35)..(457): Homolog of NCBI NO: 30141019 NR Description: cysteine protease-1 [Helianthus annuus]
  misc_feature (20)..(449): Homolog of NCBI NO: 18401614 NR Description: cysteine proteinase RD21A [Arabidopsis thaliana]
  misc_feature (20)..(449): Homolog of NCBI NO: 14517542 NR Description: F2G19.31/F2G19.31 [Arabidopsis thaliana]
  misc_feature (38)..(449): Homolog of NCBI NO: 18141283 NR Description: senescence-associated cysteine protease [Brassica
  misc_feature (30)..(450): Homolog of NCBI NO: 18422289 NR Description: cysteine proteinase RD21A [Arabidopsis thaliana]
  misc_feature (17)..(463): Homolog of NCBI NO: 18141281 NR Description: senescence-associated cysteine protease [Brassica
  misc_feature (12)..(463): Homolog of NCBI NO: 18402225 NR Description: cysteine proteinase [Arabidopsis thaliana]
QIENKHKKQTNMATSIKSITLALLIFSVLLISLSLGSVTATETTRNEAEARRMYERWLVENRKNYNGLGEKERRFEIFKDNLKFVEEHSSIPNRTYEVGLTRFADLTNDEFRAIYLRSKMERTRVPVKGEKYLYKVGDSLPDAIDWRAKGAVNPVKDQGSCGSCWAFSAIGAVEGINQIKTGELISLSEQELVDCDTSYNDGCGGGLMDYAFKFIIENGGIDTEEDYPYIATDVNVCNSDKKNTRVVTIDGYEDVPQNDEKSLKKALANQPISVAIEAGGRAFQLYTSGVFTGTCGTSLDHGVVAVGYGSEGGQDYWIVRNSWGSNWGESGYFKLERNIKESSGKCGVAMMASYPTKSSGSNPPKPPAPSPVVCDKSNTCPAKSTCCCLYEYNGKCYSWGCCPYESATCCDDGSSCCPQSYPVCDLKANTCRMKGNSPLSIKALTRGPAIATTKSTNMLVGSA

SEQ ID NO: 36211 - protein, 452 aa, Arabidopsis thaliana
  peptide (1)..(452): Ceres Seq. ID no. 13495956
  misc_feature (129)..(345): Pfam Name: Papain family cysteine protease Pfam Description: Papain family cysteine protease
  misc_feature (1)..(420): Homolog of NCBI NO: 18141285 NR Description: senescence-associated cysteine protease [Brassica
  misc_feature (44)..(441): Homolog of NCBI NO: 1361974 NR Description: cysteine proteinase (EC 3.4.22.-) - clove pink
  misc_feature (1)..(435): Homolog of NCBI NO: 5777889 NR Description: cysteine protease [Solanum tuberosum]
  misc_feature (24)..(446): Homolog of NCBI NO: 30141019 NR Description: cysteine protease-1 [Helianthus annuus]
  misc_feature (9)..(438): Homolog of NCBI NO: 18401614 NR Description: cysteine proteinase RD21A [Arabidopsis thaliana]
  misc_feature (9)..(438): Homolog of NCBI NO: 14517542 NR Description: F2G19.31/F2G19.31 [Arabidopsis thaliana]
  misc_feature (27)..(438): Homolog of NCBI NO: 18141283 NR Description: senescence-associated cysteine protease [Brassica
  misc_feature (19)..(439): Homolog of NCBI NO: 18422289 NR Description: cysteine proteinase RD21A [Arabidopsis thaliana]
  misc_feature (6)..(452): Homolog of NCBI NO: 18141281 NR Description: senescence-associated cysteine protease [Brassica
  misc_feature (1)..(452): Homolog of NCBI NO: 18402225 NR Description: cysteine proteinase [Arabidopsis thaliana]
MATSIKSITLALLIFSVLLISLSLGSVTATETTRNEAEARRMYERWLVENRKNYNGLGEKERRFEIFKDNLKFVEEHSSIPNRTYEVGLTRFADLTNDEFRAIYLRSKMERTRVPVKGEKYLYKVGDSLPDAIDWRAKGAVNPVKDQGSCGSCWAFSAIGAVEGINQIKTGELISLSEQELVDCDTSYNDGCGGGLMDYAFKFIIENGGIDTEEDYPYIATDVNVCNSDKKNTRVVTIDGYEDVPQNDEKSLKKALANQPISVAIEAGGRAFQLYTSGVFTGTCGTSLDHGVVAVGYGSEGGQDYWIVRNSWGSNWGESGYFKLERNIKESSGKCGVAMMASYPTKSSGSNPPKPPAPSPVVCDKSNTCPAKSTCCCLYEYNGKCYSWGCCPYESATCCDDGSSCCPQSYPVCDLKANTCRMKGNSPLSIKALTRGPAIATTKSTNMLVGSA

SEQ ID NO: 36212 - protein, 411 aa, Arabidopsis thaliana
  peptide (1)..(411): Ceres Seq. ID no. 13495957
  misc_feature (88)..(304): Pfam Name: Papain family cysteine protease Pfam Description: Papain family cysteine protease
  misc_feature (1)..(379): Homolog of NCBI NO: 18141285 NR Description: senescence-associated cysteine protease [Brassica
  misc_feature (3)..(400): Homolog of NCBI NO: 1361974 NR Description: cysteine proteinase (EC 3.4.22.-) - clove pink
  misc_feature (1)..(394): Homolog of NCBI NO: 5777889 NR Description: cysteine protease [Solanum tuberosum]
  misc_feature (1)..(405): Homolog of NCBI NO: 30141019 NR Description: cysteine protease-1 [Helianthus annuus]
  misc_feature (1)..(397): Homolog of NCBI NO: 18401614 NR Description: cysteine proteinase RD21A [Arabidopsis thaliana]
  misc_feature (1)..(397): Homolog of NCBI NO: 14517542 NR Description: F2G19.31/F2G19.31 [Arabidopsis thaliana]
  misc_feature (1)..(397): Homolog of NCBI NO: 18141283 NR Description: senescence-associated cysteine protease [Brassica
  misc_feature (1)..(398): Homolog of NCBI NO: 18422289 NR Description: cysteine proteinase RD21A [Arabidopsis thaliana]
  misc_feature (1)..(411): Homolog of NCBI NO: 18141281 NR Description: senescence-associated cysteine protease [Brassica
  misc_feature (1)..(411): Homolog of NCBI NO: 18402225 NR Description: cysteine proteinase [Arabidopsis thaliana]
MYERWLVENRKNYNGLGEKERRFEIFKDNLKFVEEHSSIPNRTYEVGLTRFADLTNDEFRAIYLRSKMERTRVPVKGEKYLYKVGDSLPDAIDWRAKGAVNPVKDQGSCGSCWAFSAIGAVEGINQIKTGELISLSEQELVDCDTSYNDGCGGGLMDYAFKFIIENGGIDTEEDYPYIATDVNVCNSDKKNTRVVTIDGYEDVPQNDEKSLKKALANQPISVAIEAGGRAFQLYTSGVFTGTCGTSLDHGVVAVGYGSEGGQDYWIVRNSWGSNWGESGYFKLERNIKESSGKCGVAMMASYPTKSSGSNPPKPPAPSPVVCDKSNTCPAKSTCCCLYEYNGKCYSWGCCPYESATCCDDGSSCCPQSYPVCDLKANTCRMKGNSPLSIKALTRGPAIATTKSTNMLVGSA

SEQ ID NO: 36213 - DNA, 719 bp, Arabidopsis thaliana
  misc_feature (1)..(719): Ceres Seq. ID no. 12322937
  misc_feature: MA Experiment ID: 108434 Result: Up-regulated in Transcription
  misc_feature: MA Experiment 108434 PARAMETER Experiment Name: At_Root_Tips_cDNA_P Parameter: Tissue Value: Root Tips
  misc_feature: MA Experiment ID: 108462 Result: Down-regulated in Transcription
  misc_feature: MA Experiment 108462 PARAMETER Experiment Name: At_Germinating_Seeds_cDNA_P Parameter: Age (day) Value: 2 vs. 0
  misc_feature: MA Experiment 108462 PARAMETER Experiment Name: At_Germinating_Seeds_cDNA_P Parameter: Tissue Value: Germinating Seeds
  misc_feature: MA Experiment ID: 108463 Result: Down-regulated in Transcription
  misc_feature: MA Experiment 108463 PARAMETER Experiment Name: At_Germinating_Seeds_cDNA_P Parameter: Age (day) Value: 3 vs. 0
  misc_feature: MA Experiment 108463 PARAMETER Experiment Name: At_Germinating_Seeds_cDNA_P Parameter: Tissue Value: Germinating Seeds
  misc_feature: MA Experiment ID: 108464 Result: Down-regulated in Transcription
  misc_feature: MA Experiment 108464 PARAMETER Experiment Name: At_Germinating_Seeds_cDNA_P Parameter: Age (day) Value: 4 vs. 0
  misc_feature: MA Experiment 108464 PARAMETER Experiment Name: At_Germinating_Seeds_cDNA_P Parameter: Tissue Value: Germinating Seeds
  misc_feature: MA Experiment ID: 108488 Result: Down-regulated in Transcription
  misc_feature: MA Experiment ID: 108572 Result: Down-regulated in Transcription
  misc_feature: MA Experiment 108572 PARAMETER Experiment Name: At_Drought_cDNA_P Parameter: Timepoint (hr) Value: 1
  misc_feature: MA Experiment 108572 PARAMETER Experiment Name: At_Drought_cDNA_P Parameter: Tissue Value: Aerial
  misc_feature: MA Experiment 108572 PARAMETER Experiment Name: At_Drought_cDNA_P Parameter: Treatment Value: Drought vs. No Drought
  misc_feature: MA Experiment ID: 108574 Result: Down-regulated in Transcription
  misc_feature: MA Experiment 108574 PARAMETER Experiment Name: At_Wounding__cDNA_P Parameter: Timepoint (hr) Value: 1
  misc_feature: MA Experiment 108574 PARAMETER Experiment Name: At_Wounding__cDNA_P Parameter: Tissue Value: Aerial
  misc_feature: MA Experiment 108574 PARAMETER Experiment Name: At_Wounding__cDNA_P Parameter: Treatment Value: Wounding vs. No Wounding
  misc_feature: MA Experiment ID: 108577 Result: Down-regulated in Transcription
  misc_feature: MA Experiment 108577 PARAMETER Experiment Name: At_42deg_Heat_cDNA_P Parameter: Temperature (deg C) Value: 42 vs. 22
  misc_feature: MA Experiment 108577 PARAMETER Experiment Name: At_42deg_Heat_cDNA_P Parameter: Timepoint (hr) Value: 6
  misc_feature: MA Experiment 108577 PARAMETER Experiment Name: At_42deg_Heat_cDNA_P Parameter: Tissue Value: Aerial
  misc_feature: MA Experiment ID: 108607 Result: Down-regulated in Transcription
  misc_feature: MA Experiment 108607 PARAMETER Experiment Name: At_100uM_ABA_cDNA_P Parameter: Timepoint (hr) Value: 4
  misc_feature: MA Experiment 108607 PARAMETER Experiment Name: At_100uM_ABA_cDNA_P Parameter: Tissue Value: Aerial
  misc_feature: MA Experiment 108607 PARAMETER Experiment Name: At_100uM_ABA_cDNA_P Parameter: Treatment Value: 100uM ABA vs. No Treatment
  misc_feature: MA Experiment ID: 20000069 Result: Up-regulated in Transcription
  misc_feature: MA Experiment 20000069 PARAMETER Experiment Name: At_100uM_ABA_Mutants_cDNA_P Parameter: Plant Line Value: CS23
  misc_feature: MA Experiment 20000069 PARAMETER Experiment Name: At_100uM_ABA_Mutants_cDNA_P Parameter: Timepoint (hr) Value: 6
  misc_feature: MA Experiment 20000069 PARAMETER Experiment Name: At_100uM_ABA_Mutants_cDNA_P Parameter: Tissue Value: Aerial
  misc_feature: MA Experiment 20000069 PARAMETER Experiment Name: At_100uM_ABA_Mutants_cDNA_P Parameter: Treatment Value: 100uM ABA vs. No Treatment
  misc_feature: MA Experiment ID: 20000070 Result: Up-regulated in Transcription
  misc_feature: MA Experiment 20000070 PARAMETER Experiment Name: At_100uM_ABA_Mutants_cDNA_P Parameter: Plant Line Value: CS24
  misc_feature: MA Experiment 20000070 PARAMETER Experiment Name: At_100uM_ABA_Mutants_cDNA_P Parameter: Timepoint (hr) Value: 6
  misc_feature: MA Experiment 20000070 PARAMETER Experiment Name: At_100uM_ABA_Mutants_cDNA_P Parameter: Tissue Value: Aerial
  misc_feature: MA Experiment 20000070 PARAMETER Experiment Name: At_100uM_ABA_Mutants_cDNA_P Parameter: Treatment Value: 100uM ABA vs. No Treatment
  misc_feature: MA Experiment ID: 20000071 Result: Up-regulated in Transcription
  misc_feature: MA Experiment 20000071 PARAMETER Experiment Name: At_100uM_ABA_Mutants_cDNA_P Parameter: Plant Line Value: CS8104
  misc_feature: MA Experiment 20000071 PARAMETER Experiment Name: At_100uM_ABA_Mutants_cDNA_P Parameter: Timepoint (hr) Value: 6
  misc_feature: MA Experiment 20000071 PARAMETER Experiment Name: At_100uM_ABA_Mutants_cDNA_P Parameter: Tissue Value: Aerial
  misc_feature: MA Experiment 20000071 PARAMETER Experiment Name: At_100uM_ABA_Mutants_cDNA_P Parameter: Treatment Value: 100uM ABA vs. No Treatment
  misc_feature: MA Experiment ID: 20000072 Result: Up-regulated in Transcription
  misc_feature: MA Experiment 20000072 PARAMETER Experiment Name: At_100uM_ABA_Mutants_cDNA_P Parameter: Plant Line Value: CS8105
  misc_feature: MA Experiment 20000072 PARAMETER Experiment Name: At_100uM_ABA_Mutants_cDNA_P Parameter: Timepoint (hr) Value: 6
  misc_feature: MA Experiment 20000072 PARAMETER Experiment Name: At_100uM_ABA_Mutants_cDNA_P Parameter: Tissue Value: Aerial
  misc_feature: MA Experiment 20000072 PARAMETER Experiment Name: At_100uM_ABA_Mutants_cDNA_P Parameter: Treatment Value: 100uM ABA vs. No Treatment
  misc_feature: MA Experiment ID: 20000086 Result: Up-regulated in Transcription
  misc_feature: MA Experiment 20000086 PARAMETER Experiment Name: At_100uM_ABA_Mutants_cDNA_P Parameter: Plant Line Value: CS22
  misc_feature: MA Experiment 20000086 PARAMETER Experiment Name: At_100uM_ABA_Mutants_cDNA_P Parameter: Timepoint (hr) Value: 6
  misc_feature: MA Experiment 20000086 PARAMETER Experiment Name: At_100uM_ABA_Mutants_cDNA_P Parameter: Tissue Value: Aerial
  misc_feature: MA Experiment 20000086 PARAMETER Experiment Name: At_100uM_ABA_Mutants_cDNA_P Parameter: Treatment Value: 100uM ABA vs. No Treatment
  misc_feature: MA Experiment ID: 20000087 Result: Up-regulated in Transcription
  misc_feature: MA Experiment 20000087 PARAMETER Experiment Name: At_100uM_ABA_Mutants_cDNA_P Parameter: Plant Line Value: WS
  misc_feature: MA Experiment 20000087 PARAMETER Experiment Name: At_100uM_ABA_Mutants_cDNA_P Parameter: Timepoint (hr) Value: 6
  misc_feature: MA Experiment 20000087 PARAMETER Experiment Name: At_100uM_ABA_Mutants_cDNA_P Parameter: Tissue Value: Aerial
  misc_feature: MA Experiment 20000087 PARAMETER Experiment Name: At_100uM_ABA_Mutants_cDNA_P Parameter: Treatment Value: 100uM ABA vs. No Treatment
  misc_feature: MA Experiment ID: 20000088 Result: Up-regulated in Transcription
  misc_feature: MA Experiment 20000088 PARAMETER Experiment Name: At_100uM_ABA_Mutants_cDNA_P Parameter: Plant Line Value: Landsberg
  misc_feature: MA Experiment 20000088 PARAMETER Experiment Name: At_100uM_ABA_Mutants_cDNA_P Parameter: Timepoint (hr) Value: 6
  misc_feature: MA Experiment 20000088 PARAMETER Experiment Name: At_100uM_ABA_Mutants_cDNA_P Parameter: Tissue Value: Aerial
  misc_feature: MA Experiment 20000088 PARAMETER Experiment Name: At_100uM_ABA_Mutants_cDNA_P Parameter: Treatment Value: 100uM ABA vs. No Treatment
  misc_feature: MA Experiment ID: 20000089 Result: Up-regulated in Transcription
  misc_feature: MA Experiment ID: 20000090 Result: Up-regulated in Transcription
  misc_feature: MA Experiment ID: 20000111 Result: Down-regulated in Transcription
  misc_feature: MA Experiment 20000111 PARAMETER Experiment Name: At_42deg_Heat_cDNA_P Parameter: Temperature (deg C) Value: 42 vs. 22
  misc_feature: MA Experiment 20000111 PARAMETER Experiment Name: At_42deg_Heat_cDNA_P Parameter: Timepoint (hr) Value: 6
  misc_feature: MA Experiment 20000111 PARAMETER Experiment Name: At_42deg_Heat_cDNA_P Parameter: Tissue Value: Aerial
  misc_feature: MA Experiment ID: 20000117 Result: Up-regulated in Transcription
  misc_feature: MA Experiment 20000117 PARAMETER Experiment Name: At_100uM_ABA_Mutants_cDNA_P Parameter: Plant Line Value: Columbia
  misc_feature: MA Experiment 20000117 PARAMETER Experiment Name: At_100uM_ABA_Mutants_cDNA_P Parameter: Timepoint (hr) Value: 6
  misc_feature: MA Experiment 20000117 PARAMETER Experiment Name: At_100uM_ABA_Mutants_cDNA_P Parameter: Tissue Value: Aerial
  misc_feature: MA Experiment 20000117 PARAMETER Experiment Name: At_100uM_ABA_Mutants_cDNA_P Parameter: Treatment Value: 100uM ABA vs. No Treatment
  misc_feature: MA Experiment ID: 20000213 Result: Up-regulated in Transcription
  misc_feature: MA Experiment 20000213 PARAMETER Experiment Name: At_4deg_Cold_P Parameter: Timepoint (hr) Value: 2
  misc_feature: MA Experiment ID: 20000224 Result: Down-regulated in Transcription
  misc_feature: MA Experiment ID: 20000437 Result: Up-regulated in Transcription
  misc_feature: MA Experiment 20000437 PARAMETER Experiment Name: At_Drought_P Parameter: Age (day) Value: 8
  misc_feature: MA Experiment 20000437 PARAMETER Experiment Name: At_Drought_P Parameter: Organism Value: A. thaliana
  misc_feature: MA Experiment 20000437 PARAMETER Experiment Name: At_Drought_P Parameter: Plant Line Value: WS
  misc_feature: MA Experiment 20000437 PARAMETER Experiment Name: At_Drought_P Parameter: Timepoint (hr) Value: 24
  misc_feature: MA Experiment 20000437 PARAMETER Experiment Name: At_Drought_P Parameter: Tissue Value: Whole Plant
  misc_feature: MA Experiment 20000437 PARAMETER Experiment Name: At_Drought_P Parameter: Treatment Value: Drought vs. No Drought
  misc_feature: MA Experiment ID: 20000438 Result: Down-regulated in Transcription
  misc_feature: MA Experiment 20000438 PARAMETER Experiment Name: At_Shoots__P Parameter: Age (day) Value: 14
  misc_feature: MA Experiment 20000438 PARAMETER Experiment Name: At_Shoots__P Parameter: Tissue Value: Shoots vs. Whole Plant
  misc_feature: MA Experiment ID: 20001451 Result: Up-regulated in Transcription
  misc_feature: MA Experiment 20001451 PARAMETER Experiment Name: At_Far-red-induction_P Parameter: Age (day) Value: 7
  misc_feature: MA Experiment 20001451 PARAMETER Experiment Name: At_Far-red-induction_P Parameter: Light Value: Far-red vs. White
  misc_feature: MA Experiment 20001451 PARAMETER Experiment Name: At_Far-red-induction_P Parameter: Organism Value: A. thaliana
  misc_feature: MA Experiment 20001451 PARAMETER Experiment Name: At_Far-red-induction_P Parameter: Plant Line Value: Columbia
  misc_feature: MA Experiment 20001451 PARAMETER Experiment Name: At_Far-red-induction_P Parameter: Timepoint (hr) Value: 24
  misc_feature: MA Experiment 20001451 PARAMETER Experiment Name: At_Far-red-induction_P Parameter: Tissue Value: Whole Plant
  misc_feature: MA Experiment ID: 20001557 Result: Up-regulated in Transcription
  misc_feature: MA Experiment 20001557 PARAMETER Experiment Name: At_Drought_Soil_Dry_P Parameter: Age (day) Value: 27
  misc_feature: MA Experiment 20001557 PARAMETER Experiment Name: At_Drought_Soil_Dry_P Parameter: Organism Value: A. thaliana
  misc_feature: MA Experiment 20001557 PARAMETER Experiment Name: At_Drought_Soil_Dry_P Parameter: Plant Line Value: WS
  misc_feature: MA Experiment 20001557 PARAMETER Experiment Name: At_Drought_Soil_Dry_P Parameter: Post Timepoint (hr) Value: 3
  misc_feature: MA Experiment 20001557 PARAMETER Experiment Name: At_Drought_Soil_Dry_P Parameter: Post-Treatment Value: Re-Water vs. No Drought
  misc_feature: MA Experiment 20001557 PARAMETER Experiment Name: At_Drought_Soil_Dry_P Parameter: Timepoint (day) Value: 13
  misc_feature: MA Experiment 20001557 PARAMETER Experiment Name: At_Drought_Soil_Dry_P Parameter: Treatment Value: Drought vs. No Drought
acatctcactgctcactactctcactgtaatcccttagatcttcttttcaaatttcaatggcgtccggtgatgttgagtatcggtgcttcgttggaggtctagcatgggccactgatgacagagctcttgagactgccttcgctcaatacggcgacgttattgattccaagatcattaacgatcgtgagactggaagatcaaggggattcggattcgtcaccttcaaggatgagaaagccatgaaggatgcgattgagggaatgaacggacaagatctcgatggccgtagcatcactgttaacgaggctcagtcacgaggaagcggtggcggcggtagacgcgagggtggaggaggatacagcggcggcggcggttactcctcaagaggtggtggtggcggaagctacggtggtggaagacgtgagggaggaggaggatacggtggtggtgaaggaggaggttacggaggaagcggtggtggtggaggatggtaattcctttaattaggtttgggattaccaatgaatgttctctctctcgcttgttatgcttctacttggttttgtgtgttctctattttgttctggttctgctttatatttgatgtaacagttcgtgattaggtattttggtatctggaaacgtaatgttaagtcacttgtcattctctaaataacaaatttcttcggagatattatctctgttgattgattctacc

SEQ ID NO: 36214 - protein, 145 aa, Arabidopsis thaliana
  peptide (1)..(145): Ceres Seq. ID no. 12322938
  misc_feature (10)..(81): Pfam Name: RNA recognition motif. (a.k.a. RRM, RBD, or RNP domain) Pfam Description: RNA recognition motif. (a.k.a. RRM, RBD, or RNP
  misc_feature (5)..(144): Homolog of NCBI NO: 2119042 NR Description: glycine-rich RNA-binding protein RGP-1a - wood
  misc_feature (5)..(144): Homolog of NCBI NO: 2119044 NR Description: glycine-rich RNA-binding protein RGP-1b - wood
  misc_feature (3)..(143): Homolog of NCBI NO: 7439998 NR Description: glycine-rich RNA-binding protein GRP1 -
  misc_feature (1)..(138): Homolog of NCBI NO: 2267567 NR Description: glycine-rich RNA binding protein 1 [Pelargonium x
  misc_feature (5)..(145): Homolog of NCBI NO: 544426 NR Description: Glycine-rich RNA-binding protein
  misc_feature (1)..(145): Homolog of NCBI NO: 1346180 NR Description: Glycine-rich RNA-binding protein GRP1A
  misc_feature (1)..(145): Homolog of NCBI NO: 1346181 NR Description: Glycine-rich RNA-binding protein GRP2A
  misc_feature (1)..(145): Homolog of NCBI NO: 15226605 NR Description: glycine-rich RNA binding protein AtGRP7
  misc_feature (1)..(145): Homolog of NCBI NO: 21553354 NR Description: glycine-rich RNA binding protein 7 [Arabidopsis
  misc_feature (1)..(145): Homolog of NCBI NO: 30681492 NR Description: glycine-rich RNA-binding protein (AtGRP7)
MASGDVEYRCFVGGLAWATDDRALETAFAQYGDVIDSKIINDRETGRSRGFGFVTFKDEKAMKDAIEGMNGQDLDGRSITVNEAQSRGSGGGGRREGGGGYSGGGGYSSRGGGGGSYGGGRREGGGGYGGGEGGGYGGSGGGGGW

SEQ ID NO: 36215 - protein, 84 aa, Arabidopsis thaliana
  peptide (1)..(84): Ceres Seq. ID no. 12322939
  misc_feature (15)..(83): Pfam Name: Herpesvirus large structural phosphoprotein UL32 Pfam Description: Herpesvirus large structural phosphoprotein UL32
  misc_feature (1)..(83): Homolog of NCBI NO: 2119042 NR Description: glycine-rich RNA-binding protein RGP-1a - wood
  misc_feature (1)..(83): Homolog of NCBI NO: 2119044 NR Description: glycine-rich RNA-binding protein RGP-1b - wood
  misc_feature (1)..(82): Homolog of NCBI NO: 7439998 NR Description: glycine-rich RNA-binding protein GRP1 -
  misc_feature (1)..(77): Homolog of NCBI NO: 2267567 NR Description: glycine-rich RNA binding protein 1 [Pelargonium x
  misc_feature (1)..(84): Homolog of NCBI NO: 544426 NR Description: Glycine-rich RNA-binding protein
  misc_feature (1)..(84): Homolog of NCBI NO: 1346180 NR Description: Glycine-rich RNA-binding protein GRP1A
  misc_feature (1)..(84): Homolog of NCBI NO: 1346181 NR Description: Glycine-rich RNA-binding protein GRP2A
  misc_feature (1)..(84): Homolog of NCBI NO: 15226605 NR Description: glycine-rich RNA binding protein AtGRP7
  misc_feature (1)..(84): Homolog of NCBI NO: 21553354 NR Description: glycine-rich RNA binding protein 7 [Arabidopsis
  misc_feature (1)..(84): Homolog of NCBI NO: 30681492 NR Description: glycine-rich RNA-binding protein (AtGRP7)
MKDAIEGMNGQDLDGRSITVNEAQSRGSGGGGRREGGGGYSGGGGYSSRGGGGGSYGGGRREGGGGYGGGEGGGYGGSGGGGGW

SEQ ID NO: 36216 - protein, 77 aa, Arabidopsis thaliana
  peptide (1)..(77): Ceres Seq. ID no. 12322940
  misc_feature (8)..(76): Pfam Name: Herpesvirus large structural phosphoprotein UL32 Pfam Description: Herpesvirus large structural phosphoprotein UL32
  misc_feature (1)..(76): Homolog of NCBI NO: 2119042 NR Description: glycine-rich RNA-binding protein RGP-1a - wood
  misc_feature (1)..(76): Homolog of NCBI NO: 2119044 NR Description: glycine-rich RNA-binding protein RGP-1b - wood
  misc_feature (1)..(75): Homolog of NCBI NO: 7439998 NR Description: glycine-rich RNA-binding protein GRP1 -
  misc_feature (1)..(70): Homolog of NCBI NO: 2267567 NR Description: glycine-rich RNA binding protein 1 [Pelargonium x
  misc_feature (1)..(77): Homolog of NCBI NO: 544426 NR Description: Glycine-rich RNA-binding protein
  misc_feature (1)..(77): Homolog of NCBI NO: 1346180 NR Description: Glycine-rich RNA-binding protein GRP1A
  misc_feature (1)..(77): Homolog of NCBI NO: 1346181 NR Description: Glycine-rich RNA-binding protein GRP2A
  misc_feature (1)..(77): Homolog of NCBI NO: 15226605 NR Description: glycine-rich RNA binding protein AtGRP7
  misc_feature (1)..(77): Homolog of NCBI NO: 21553354 NR Description: glycine-rich RNA binding protein 7 [Arabidopsis
  misc_feature (1)..(77): Homolog of NCBI NO: 30681492 NR Description: glycine-rich RNA-binding protein (AtGRP7)
MNGQDLDGRSITVNEAQSRGSGGGGRREGGGGYSGGGGYSSRGGGGGSYGGGRREGGGGYGGGEGGGYGGSGGGGGW

SEQ ID NO: 36217 - DNA, 917 bp, Arabidopsis thaliana
  misc_feature (1)..(917): Ceres Seq. ID no. 12396494
  misc_feature: MA Experiment ID: 108434 Result: Up-regulated in Transcription
  misc_feature: MA Experiment 108434 PARAMETER Experiment Name: At_Root_Tips_cDNA_P Parameter: Tissue Value: Root Tips
  misc_feature: MA Experiment ID: 108462 Result: Down-regulated in Transcription
  misc_feature: MA Experiment 108462 PARAMETER Experiment Name: At_Germinating_Seeds_cDNA_P Parameter: Age (day) Value: 2 vs. 0
  misc_feature: MA Experiment 108462 PARAMETER Experiment Name: At_Germinating_Seeds_cDNA_P Parameter: Tissue Value: Germinating Seeds
  misc_feature: MA Experiment ID: 108463 Result: Down-regulated in Transcription
  misc_feature: MA Experiment 108463 PARAMETER Experiment Name: At_Germinating_Seeds_cDNA_P Parameter: Age (day) Value: 3 vs. 0
  misc_feature: MA Experiment 108463 PARAMETER Experiment Name: At_Germinating_Seeds_cDNA_P Parameter: Tissue Value: Germinating Seeds
  misc_feature: MA Experiment ID: 108464 Result: Down-regulated in Transcription
  misc_feature: MA Experiment 108464 PARAMETER Experiment Name: At_Germinating_Seeds_cDNA_P Parameter: Age (day) Value: 4 vs. 0
  misc_feature: MA Experiment 108464 PARAMETER Experiment Name: At_Germinating_Seeds_cDNA_P Parameter: Tissue Value: Germinating Seeds
  misc_feature: MA Experiment ID: 20000224 Result: Down-regulated in Transcription
  misc_feature: MA Experiment ID: 20000794 Result: Down-regulated in Transcription
  misc_feature: MA Experiment 20000794 PARAMETER Experiment Name: At_Petals_P Parameter: Age (day) Value: 23-25 days
  misc_feature: MA Experiment 20000794 PARAMETER Experiment Name: At_Petals_P Parameter: Plant Line Value: WS
  misc_feature: MA Experiment 20000794 PARAMETER Experiment Name: At_Petals_P Parameter: Tissue Value: Petals vs. Whole plant
ctctgcacattcctcagtgatctatcaaagttcgaagagaccgacgcaaaagggacagaaacggagaaggagaaagaggcagagatgggagtagagatccaatcgccgcaggaacagagctcttacaccgttgagcagctcgtcgcccttaatcctttcaaccctgaaatcctgcctgatctcgaaaactacgttaacgttacatcgcaaacgtatagtctggaagtaaacctatgcttgcttcggctctatcagtttgagcctgagcgcatgaacactcatatcgtggctcgaatcttggtcaaggctcttatggctatgccaactccagacttcagcctttgcctcttcttgattcccgaaagagtgcaaatggaggagcagttcaagtcactaattgttctatcacactaccttgagactgggaggttccaacagttctgggatgaagctgccaagaaccgtcacattctcgaggctgttccaggttttgagcaagctattcaagcatatgcaagtcaccttcttagcttaagctaccaaaaggttccaagatcagtgctggctgaggctgttaacatggatggtgcatctctagacaaattcatcgagcagcaagtgactaacagtggatggattgttgagaaagagggtggaagtattgtcttaccacaaaatgaatttaaccatccggagctcaagaaaaatacaggtgagaatgttcccttggaacacattgcccgcatcttccccatccttggttgaaccaattcatgagaacactgcaaattttccttttgtctcttgttatcttgtgatgtacacttttaagacaccgtaatgtgaattttggcaatggccttcctctttgcaatttgacagattttcttaaaaatctagtagaccgagactttgcc

SEQ ID NO: 36218 - protein, 254 aa, Arabidopsis thaliana
  peptide (1)..(254): Ceres Seq. ID no. 12396495
  misc_feature (33)..(254): Pfam Name: Eukaryotic translation initiation factor 3 Pfam Description: Eukaryotic translation initiation factor 3
  misc_feature (84)..(249): Homolog of NCBI NO: 20380678 NR Description: Similar to RIKEN cDNA 1200009C21 gene [Mus
  misc_feature (39)..(212): Homolog of NCBI NO: 38047673 NR Description: similar to Drosophila melanogaster CG10306
  misc_feature (39)..(249): Homolog of NCBI NO: 19922704 NR Description: CG10306-PA [Drosophila melanogaster]
  misc_feature (38)..(249): Homolog of NCBI NO: 5114051 NR Description: HSPC029 [Homo sapiens]
  misc_feature (38)..(249): Homolog of NCBI NO: 27730981 NR Description: similar to RIKEN cDNA 1200009C21
  misc_feature (38)..(249): Homolog of NCBI NO: 10801345 NR Description: muscle specific gene [Homo sapiens]
  misc_feature (38)..(249): Homolog of NCBI NO: 21312044 NR Description: RIKEN cDNA 1200009C21 [Mus musculus]
  misc_feature (194)..(254): Homolog of NCBI NO: 20453126 NR Description: AT4g33250/F17M5_10 [Arabidopsis thaliana]
  misc_feature (35)..(253): Homolog of NCBI NO: 23396617 NR Description: Eukaryotic translation initiation factor 3
  misc_feature (29)..(254): Homolog of NCBI NO: 15234123 NR Description: putative protein
LCTFLSDLSKFEETDAKGTETEKEKEAEMGVEIQSPQEQSSYTVEQLVALNPFNPEILPDLENYVNVTSQTYSLEVNLCLLRLYQFEPERMNTHIVARILVKALMAMPTPDFSLCLFLIPERVQMEEQFKSLIVLSHYLETGRFQQFWDEAAKNRHILEAVPGFEQAIQAYASHLLSLSYQKVPRSVLAEAVNMDGASLDKFIEQQVTNSGWIVEKEGGSIVLPQNEFNHPELKKNTGENVPLEHIARIFPILG

SEQ ID NO: 36219 - protein, 226 aa, Arabidopsis thaliana
  peptide (1)..(226): Ceres Seq. ID no. 12396496
  misc_feature (5)..(226): Pfam Name: Eukaryotic translation initiation factor 3 Pfam Description: Eukaryotic translation initiation factor 3
  misc_feature (56)..(221): Homolog of NCBI NO: 20380678 NR Description: Similar to RIKEN cDNA 1200009C21 gene [Mus
  misc_feature (11)..(184): Homolog of NCBI NO: 38047673 NR Description: similar to Drosophila melanogaster CG10306
  misc_feature (11)..(221): Homolog of NCBI NO: 19922704 NR Description: CG10306-PA [Drosophila melanogaster]
  misc_feature (10)..(221): Homolog of NCBI NO: 5114051 NR Description: HSPC029 [Homo sapiens]
  misc_feature (10)..(221): Homolog of NCBI NO: 27730981 NR Description: similar to RIKEN cDNA 1200009C21
  misc_feature (10)..(221): Homolog of NCBI NO: 10801345 NR Description: muscle specific gene [Homo sapiens]
  misc_feature (10)..(221): Homolog of NCBI NO: 21312044 NR Description: RIKEN cDNA 1200009C21 [Mus musculus]
  misc_feature (166)..(226): Homolog of NCBI NO: 20453126 NR Description: AT4g33250/F17M5_10 [Arabidopsis thaliana]
  misc_feature (7)..(225): Homolog of NCBI NO: 23396617 NR Description: Eukaryotic translation initiation factor 3
  misc_feature (1)..(226): Homolog of NCBI NO: 15234123 NR Description: putative protein
MGVEIQSPQEQSSYTVEQLVALNPFNPEILPDLENYVNVTSQTYSLEVNLCLLRLYQFEPERMNTHIVARILVKALMAMPTPDFSLCLFLIPERVQMEEQFKSLIVLSHYLETGRFQQFWDEAAKNRHILEAVPGFEQAIQAYASHLLSLSYQKVPRSVLAEAVNMDGASLDKFIEQQVTNSGWIVEKEGGSIVLPQNEFNHPELKKNTGENVPLEHIARIFPILG

SEQ ID NO: 36220 - protein, 164 aa, Arabidopsis thaliana
  peptide (1)..(164): Ceres Seq. ID no. 12396497
  misc_feature (1)..(164): Pfam Name: Eukaryotic translation initiation factor 3 Pfam Description: Eukaryotic translation initiation factor 3
  misc_feature (1)..(159): Homolog of NCBI NO: 20380678 NR Description: Similar to RIKEN cDNA 1200009C21 gene [Mus
  misc_feature (1)..(122): Homolog of NCBI NO: 38047673 NR Description: similar to Drosophila melanogaster CG10306
  misc_feature (1)..(159): Homolog of NCBI NO: 19922704 NR Description: CG10306-PA [Drosophila melanogaster]
  misc_feature (1)..(159): Homolog of NCBI NO: 5114051 NR Description: HSPC029 [Homo sapiens]
  misc_feature (1)..(159): Homolog of NCBI NO: 27730981 NR Description: similar to RIKEN cDNA 1200009C21
  misc_feature (1)..(159): Homolog of NCBI NO: 10801345 NR Description: muscle specific gene [Homo sapiens]
  misc_feature (1)..(159): Homolog of NCBI NO: 21312044 NR Description: RIKEN cDNA 1200009C21 [Mus musculus]
  misc_feature (104)..(164): Homolog of NCBI NO: 20453126 NR Description: AT4g33250/F17M5_10 [Arabidopsis thaliana]
  misc_feature (1)..(163): Homolog of NCBI NO: 23396617 NR Description: Eukaryotic translation initiation factor 3
  misc_feature (1)..(164): Homolog of NCBI NO: 15234123 NR Description: putative protein
MNTHIVARILVKALMAMPTPDFSLCLFLIPERVQMEEQFKSLIVLSHYLETGRFQQFWDEAAKNRHILEAVPGFEQAIQAYASHLLSLSYQKVPRSVLAEAVNMDGASLDKFIEQQVTNSGWIVEKEGGSIVLPQNEFNHPELKKNTGENVPLEHIARIFPILG

SEQ ID NO: 36221 - DNA, 1310 bp, Arabidopsis thaliana
  misc_feature (1)..(1310): Ceres Seq. ID no. 12738714
  misc_feature: MA Experiment ID: 108434 Result: Up-regulated in Transcription
  misc_feature: MA Experiment 108434 PARAMETER Experiment Name: At_Root_Tips_cDNA_P Parameter: Tissue Value: Root Tips
  misc_feature: MA Experiment ID: 108595 Result: Down-regulated in Transcription
  misc_feature: MA Experiment 108595 PARAMETER Experiment Name: At_Ler-pi_Ovule_cDNA_P Parameter: Plant Line Value: null
  misc_feature: MA Experiment ID: 20000185 Result: Up-regulated in Transcription
  misc_feature: MA Experiment 20000185 PARAMETER Experiment Name: At_Roots__P Parameter: Age (day) Value: 7 vs. 21
  misc_feature: MA Experiment 20000185 PARAMETER Experiment Name: At_Roots__P Parameter: Organism Value: A. thaliana
  misc_feature: MA Experiment 20000185 PARAMETER Experiment Name: At_Roots__P Parameter: Tissue Value: Roots vs. Whole Plant
  misc_feature: MA Experiment ID: 20001451 Result: Down-regulated in Transcription
  misc_feature: MA Experiment 20001451 PARAMETER Experiment Name: At_Far-red-induction_P Parameter: Age (day) Value: 7
  misc_feature: MA Experiment 20001451 PARAMETER Experiment Name: At_Far-red-induction_P Parameter: Light Value: Far-red vs. White
  misc_feature: MA Experiment 20001451 PARAMETER Experiment Name: At_Far-red-induction_P Parameter: Organism Value: A. thaliana
  misc_feature: MA Experiment 20001451 PARAMETER Experiment Name: At_Far-red-induction_P Parameter: Plant Line Value: Columbia
  misc_feature: MA Experiment 20001451 PARAMETER Experiment Name: At_Far-red-induction_P Parameter: Timepoint (hr) Value: 24
  misc_feature: MA Experiment 20001451 PARAMETER Experiment Name: At_Far-red-induction_P Parameter: Tissue Value: Whole Plant
gtgtagactgagaaataaagaagcccttgattttgcccattgcagtcatctctctcgaatctctctctataatccgatctgagaaatttcgccggagctaggttttgttgtttaccgatcaatcctttaatcaatggcaatggctgttttccgtcgcgaagggaggcgtctcctcccttcaatcgccgctcgcccaatcgctgctatccgatctcctctctcttctgaccaggaggaaggacttcttggagttcgatctatctcaactcaagtggtgcgtaaccgcatgaagagtgttaagaacatccaaaagatcacaaaggcaatgaagatggttgctgcttccaagcttagagcagttcaaggccgagctgagaactcccgtggactttggcagccatttactgcacttctaggagataatcccagcattgatgtaaagaagagtgtggtggtcactctctcttctgacaagggtctctgtggtggaatcaactccactgtcgttaaagtgagcagggctctgtacaaattgaatgctggtcctgaaaaggaagttcagtttgttattgtcggagagaaagcaaaggctataatgtttcgtgactcaaagaacgacattgtcctctctgtaacagagctgaataagaacccactcaattatgctcaggtgtcagttctagctgatgacatcctgaagaacgttgaatttgatgctttgcgcattgtctacaacaagttccattcagttgtcgcatttctgccaactgtgtccactgttttgtcacctgagattattgagaaggagtctgaaattggaggaaaacttggcgagcttgactcatatgagattgaaggtggggaaacaaagggagaaatattgcagaatctggccgagttccaattctcttgtgtgatgttcaatgcggttctggagaatgcatgtagtgagatgggagcaagaatgtctgccatggacagctcaagcagaaacgcaggagaaatgctcgaccgtctcaccctcacatacaacaggactcgtcaagcttctattacaacagagcttattgagattatctctggagcttctgctcttgaagctgctaaataagcccatccgtgttagttctcttttcttcgctttgatatttacccccaccttgaaggagaagagtgtgttaaaattttactgaatcagtttcctttgctggcttcttgttgagacctaccaatgtttgctcaacgatttttaataaacatacctgtaatttccagcaggatttcgaataattgcattaacattttgttcc

SEQ ID NO: 36222 - protein, 325 aa, Arabidopsis thaliana
  peptide (1)..(325): Ceres Seq. ID no. 12738715
  misc_feature (43)..(321): Pfam Name: ATP synthase Pfam Description: ATP synthase
  misc_feature (40)..(322): Homolog of NCBI NO: 543875 NR Description: ATP synthase gamma chain, mitochondrial precursor
  misc_feature (40)..(321): Homolog of NCBI NO: 38512238 NR Description: Mitochondrial ATP synthase gamma-subunit [Danio
  misc_feature (44)..(325): Homolog of NCBI NO: 11466530 NR Description: ATP synthase F1 subunit alpha [Reclinomonas
  misc_feature (160)..(322): Homolog of NCBI NO: 7436157 NR Description: probable H+-transporting two-sector ATPase (EC
  misc_feature (46)..(179): Homolog of NCBI NO: 37532654 NR Description: putative ATP SYNTHASE GAMMA CHAIN, MITOCHONDRIAL
  misc_feature (180)..(322): Homolog of NCBI NO: 37532654 NR Description: putative ATP SYNTHASE GAMMA CHAIN, MITOCHONDRIAL
  misc_feature (1)..(322): Homolog of NCBI NO: 543867 NR Description: ATP synthase gamma chain, mitochondrial precursor
  misc_feature (3)..(325): Homolog of NCBI NO: 7436158 NR Description: probable H+-transporting two-sector ATPase (EC
  misc_feature (1)..(325): Homolog of NCBI NO: 22530902 NR Description: mitochondrial F1-ATPase, gamma subunit
  misc_feature (1)..(325): Homolog of NCBI NO: 15227257 NR Description: mitochondrial F1-ATPase, gamma subunit
MAMAVFRREGRRLLPSIAARPIAAIRSPLSSDQEEGLLGVRSISTQVVRNRMKSVKNIQKITKAMKMVAASKLRAVQGRAENSRGLWQPFTALLGDNPSIDVKKSVVVTLSSDKGLCGGINSTVVKVSRALYKLNAGPEKEVQFVIVGEKAKAIMFRDSKNDIVLSVTELNKNPLNYAQVSVLADDILKNVEFDALRIVYNKFHSVVAFLPTVSTVLSPEIIEKESEIGGKLGELDSYEIEGGETKGEILQNLAEFQFSCVMFNAVLENACSEMGARMSAMDSSSRNAGEMLDRLTLTYNRTRQASITTELIEIISGASALEAAK

SEQ ID NO: 36223 - protein, 323 aa, Arabidopsis thaliana
  peptide (1)..(323): Ceres Seq. ID no. 12738716
  misc_feature (41)..(319): Pfam Name: ATP synthase Pfam Description: ATP synthase
  misc_feature (38)..(320): Homolog of NCBI NO: 543875 NR Description: ATP synthase gamma chain, mitochondrial precursor
  misc_feature (38)..(319): Homolog of NCBI NO: 38512238 NR Description: Mitochondrial ATP synthase gamma-subunit [Danio
  misc_feature (42)..(323): Homolog of NCBI NO: 11466530 NR Description: ATP synthase F1 subunit alpha [Reclinomonas
  misc_feature (158)..(320): Homolog of NCBI NO: 7436157 NR Description: probable H+-transporting two-sector ATPase (EC
  misc_feature (44)..(177): Homolog of NCBI NO: 37532654 NR Description: putative ATP SYNTHASE GAMMA CHAIN, MITOCHONDRIAL
  misc_feature (178)..(320): Homolog of NCBI NO: 37532654 NR Description: putative ATP SYNTHASE GAMMA CHAIN, MITOCHONDRIAL
  misc_feature (1)..(320): Homolog of NCBI NO: 543867 NR Description: ATP synthase gamma chain, mitochondrial precursor
  misc_feature (1)..(323): Homolog of NCBI NO: 7436158 NR Description: probable H+-transporting two-sector ATPase (EC
  misc_feature (1)..(323): Homolog of NCBI NO: 22530902 NR Description: mitochondrial F1-ATPase, gamma subunit
  misc_feature (1)..(323): Homolog of NCBI NO: 15227257 NR Description: mitochondrial F1-ATPase, gamma subunit
MAVFRREGRRLLPSIAARPIAAIRSPLSSDQEEGLLGVRSISTQVVRNRMKSVKNIQKITKAMKMVAASKLRAVQGRAENSRGLWQPFTALLGDNPSIDVKKSVVVTLSSDKGLCGGINSTVVKVSRALYKLNAGPEKEVQFVIVGEKAKAIMFRDSKNDIVLSVTELNKNPLNYAQVSVLADDILKNVEFDALRIVYNKFHSVVAFLPTVSTVLSPEIIEKESEIGGKLGELDSYEIEGGETKGEILQNLAEFQFSCVMFNAVLENACSEMGARMSAMDSSSRNAGEMLDRLTLTYNRTRQASITTELIEIISGASALEAAK

SEQ ID NO: 36224 - protein, 274 aa, Arabidopsis thaliana
  peptide (1)..(274): Ceres Seq. ID no. 12738717
  misc_feature (1)..(270): Pfam Name: ATP synthase Pfam Description: ATP synthase
  misc_feature (1)..(271): Homolog of NCBI NO: 543875 NR Description: ATP synthase gamma chain, mitochondrial precursor
  misc_feature (1)..(270): Homolog of NCBI NO: 38512238 NR Description: Mitochondrial ATP synthase gamma-subunit [Danio
  misc_feature (1)..(274): Homolog of NCBI NO: 11466530 NR Description: ATP synthase F1 subunit alpha [Reclinomonas
  misc_feature (109)..(271): Homolog of NCBI NO: 7436157 NR Description: probable H+-transporting two-sector ATPase (EC
  misc_feature (1)..(128): Homolog of NCBI NO: 37532654 NR Description: putative ATP SYNTHASE GAMMA CHAIN, MITOCHONDRIAL
  misc_feature (129)..(271): Homolog of NCBI NO: 37532654 NR Description: putative ATP SYNTHASE GAMMA CHAIN, MITOCHONDRIAL
  misc_feature (1)..(271): Homolog of NCBI NO: 543867 NR Description: ATP synthase gamma chain, mitochondrial precursor
  misc_feature (1)..(274): Homolog of NCBI NO: 7436158 NR Description: probable H+-transporting two-sector ATPase (EC
  misc_feature (1)..(274): Homolog of NCBI NO: 22530902 NR Description: mitochondrial F1-ATPase, gamma subunit
  misc_feature (1)..(274): Homolog of NCBI NO: 15227257 NR Description: mitochondrial F1-ATPase, gamma subunit
MKSVKNIQKITKAMKMVAASKLRAVQGRAENSRGLWQPFTALLGDNPSIDVKKSVVVTLSSDKGLCGGINSTVVKVSRALYKLNAGPEKEVQFVIVGEKAKAIMFRDSKNDIVLSVTELNKNPLNYAQVSVLADDILKNVEFDALRIVYNKFHSVVAFLPTVSTVLSPEIIEKESEIGGKLGELDSYEIEGGETKGEILQNLAEFQFSCVMFNAVLENACSEMGARMSAMDSSSRNAGEMLDRLTLTYNRTRQASITTELIEIISGASALEAAK

SEQ ID NO: 36225 - DNA, 1953 bp, Arabidopsis thaliana
  misc_feature (1)..(1953): Ceres Seq. ID no. 13580493
  misc_feature: MA Experiment ID: 108573 Result: Up-regulated in Transcription
  misc_feature: MA Experiment 108573 PARAMETER Experiment Name: At_Drought_cDNA_P Parameter: Timepoint (hr) Value: 6
  misc_feature: MA Experiment 108573 PARAMETER Experiment Name: At_Drought_cDNA_P Parameter: Tissue Value: Aerial
  misc_feature: MA Experiment 108573 PARAMETER Experiment Name: At_Drought_cDNA_P Parameter: Treatment Value: Drought vs. No Drought
  misc_feature: MA Experiment ID: 108577 Result: Down-regulated in Transcription
  misc_feature: MA Experiment 108577 PARAMETER Experiment Name: At_42deg_Heat_cDNA_P Parameter: Temperature (deg C) Value: 42 vs. 22
  misc_feature: MA Experiment 108577 PARAMETER Experiment Name: At_42deg_Heat_cDNA_P Parameter: Timepoint (hr) Value: 6
  misc_feature: MA Experiment 108577 PARAMETER Experiment Name: At_42deg_Heat_cDNA_P Parameter: Tissue Value: Aerial
  misc_feature: MA Experiment ID: 108595 Result: Down-regulated in Transcription
  misc_feature: MA Experiment 108595 PARAMETER Experiment Name: At_Ler-pi_Ovule_cDNA_P Parameter: Plant Line Value: null
  misc_feature: MA Experiment ID: 20000069 Result: Up-regulated in Transcription
  misc_feature: MA Experiment 20000069 PARAMETER Experiment Name: At_100uM_ABA_Mutants_cDNA_P Parameter: Plant Line Value: CS23
  misc_feature: MA Experiment 20000069 PARAMETER Experiment Name: At_100uM_ABA_Mutants_cDNA_P Parameter: Timepoint (hr) Value: 6
  misc_feature: MA Experiment 20000069 PARAMETER Experiment Name: At_100uM_ABA_Mutants_cDNA_P Parameter: Tissue Value: Aerial
  misc_feature: MA Experiment 20000069 PARAMETER Experiment Name: At_100uM_ABA_Mutants_cDNA_P Parameter: Treatment Value: 100uM ABA vs. No Treatment
  misc_feature: MA Experiment ID: 20000072 Result: Up-regulated in Transcription
  misc_feature: MA Experiment 20000072 PARAMETER Experiment Name: At_100uM_ABA_Mutants_cDNA_P Parameter: Plant Line Value: CS8105
  misc_feature: MA Experiment 20000072 PARAMETER Experiment Name: At_100uM_ABA_Mutants_cDNA_P Parameter: Timepoint (hr) Value: 6
  misc_feature: MA Experiment 20000072 PARAMETER Experiment Name: At_100uM_ABA_Mutants_cDNA_P Parameter: Tissue Value: Aerial
  misc_feature: MA Experiment 20000072 PARAMETER Experiment Name: At_100uM_ABA_Mutants_cDNA_P Parameter: Treatment Value: 100uM ABA vs. No Treatment
  misc_feature: MA Experiment ID: 20000111 Result: Down-regulated in Transcription
  misc_feature: MA Experiment 20000111 PARAMETER Experiment Name: At_42deg_Heat_cDNA_P Parameter: Temperature (deg C) Value: 42 vs. 22
  misc_feature: MA Experiment 20000111 PARAMETER Experiment Name: At_42deg_Heat_cDNA_P Parameter: Timepoint (hr) Value: 6
  misc_feature: MA Experiment 20000111 PARAMETER Experiment Name: At_42deg_Heat_cDNA_P Parameter: Tissue Value: Aerial
  misc_feature: MA Experiment ID: 20000173 Result: Down-regulated in Transcription
  misc_feature: MA Experiment 20000173 PARAMETER Experiment Name: At_42deg_Heat_P Parameter: Age (day) Value: 14
  misc_feature: MA Experiment 20000173 PARAMETER Experiment Name: At_42deg_Heat_P Parameter: Organism Value: A. thaliana
  misc_feature: MA Experiment 20000173 PARAMETER Experiment Name: At_42deg_Heat_P Parameter: Plant Line Value: WS
  misc_feature: MA Experiment 20000173 PARAMETER Experiment Name: At_42deg_Heat_P Parameter: Temperature (deg C) Value: 42 vs. 22
  misc_feature: MA Experiment 20000173 PARAMETER Experiment Name: At_42deg_Heat_P Parameter: Timepoint (hr) Value: 6
  misc_feature: MA Experiment 20000173 PARAMETER Experiment Name: At_42deg_Heat_P Parameter: Tissue Value: Aerial
  misc_feature: MA Experiment ID: 20000184 Result: Down-regulated in Transcription
  misc_feature: MA Experiment 20000184 PARAMETER Experiment Name: At_Shoots__P Parameter: Age (day) Value: 7
  misc_feature: MA Experiment 20000184 PARAMETER Experiment Name: At_Shoots__P Parameter: Tissue Value: Shoots vs. Whole Plant
  misc_feature: MA Experiment ID: 20000794 Result: Up-regulated in Transcription
  misc_feature: MA Experiment 20000794 PARAMETER Experiment Name: At_Petals_P Parameter: Age (day) Value: 23-25 days
  misc_feature: MA Experiment 20000794 PARAMETER Experiment Name: At_Petals_P Parameter: Plant Line Value: WS
  misc_feature: MA Experiment 20000794 PARAMETER Experiment Name: At_Petals_P Parameter: Tissue Value: Petals vs. Whole plant
gttttttagcttacgtttttcttcttcttctccttatgagttcaatatctgcaaatccacaaatctggattcacacctgagacgtttgttaatcggtacatctctatatttttgcaatcggagatggagatcgaatccgtcgcagctggttcttgttccaaggagaatcaaatgatctacaaggaatggttcgaattctccgattcagacggcgatggccgtattactggtaacgatgcgatcaagttcttcactatgtcgaatttgcctcgtccggaattgaagcagatctgggctattgcagattcaaagagacaagggtatcttggtttcaaagagtttattgttgccatgcagcttgtttcgttggctcaaactggacatgaaatatcgcatgaagttcttattagcgatgttgatttcaaaaatatcaatcctcctaccatggaaggtctgggtgtattaatggcgaaaaagaagcattcatcaaagtcgagtgatcctaatatgaatggtagccctgccgcagacacctcacttacagctcactggttctcttcaaaatcttcaaaaaagatttctctgtcctccgtaacatctatagtggatggcctgaagaggttgtacattcagaagctgaagccacttgaagtagcatatcggtttaacgattttgtatcccctttgttgactaacagtgatttcgatgcaaaacctatggtaatgcttctgggtcaatactccacaggaaaaacaacattcattaagcatttgcttaaatctacttatccaggagctcatattggaccagagccgactactgacagatttgttgttgtcatgtctggacctgatgaaagaagcattccggggaacacagtagcagttcaagcagatatgccattcagtggtcttacaacttttgggactgcctttttgtcaaagtttgaatgctctcagatgcctcaccctctgctggagcatgtaacatttgtcgacacccctggagttttatcaggggaaaaacaaagaacacagcgagcatatgatttcactggtgttacatcatggtttgcctctaagtgtgatcttatcctcctcctatttgacccacacaagctggatgtaagtgatgagttcaagcgtgtaatttcatctttacgcggtcatgatgacaagatccgcgttgttctgaataaggctgaccaagtggacactcagcagctaatgagggtatatggagctctcatgtggtcacttgggaaagttctcaatactcctgaggtctctcgtgtctacattggttccttcagtgataaacccataaacgaagctgcaactggtccaattgggagagagttgtttgaaaaggagcaagatgaccttcttgctgatttgaaagacattcctaagaaagcttgtgatcgtcgaataaatgagtttgtgaaacgggcaagagcagcaaagatacatgcgtacatcatcagccatttgaagaaggagatgccagcgataatggggaaagccaaagctcaacagaaactgatagataacttggaagacgagtttggaaaggtacaaagagagcatcacttacctaaaggagatttcccaaatgtggatcatttcagggaggtgctaagtggttacaacatcgacaagtttgagaagctaaagccgaaaatgttgcagactgttgatgatatgttggggtatgacatcccagagctcttgaaaaatttcaaaaacccttatgattaatatttctatccctcttatcttctgcggttgctgtataatccaaaactatacattcacttttggcctagcccttgtgacttgtgagcgttaatgcatatttgtattcttacaagccttgtagacaatagagacaaacataaagagtgctgacttgataatttgcttatatcacaaaccaaaagtattattgtt

SEQ ID NO: 36226 - protein, 545 aa, Arabidopsis thaliana
  peptide (1)..(545): Ceres Seq. ID no. 13580494
  misc_feature (18)..(46): Pfam Name: EF hand Pfam Description: EF hand
  misc_feature (143)..(537): Homolog of NCBI NO: 18250262 NR Description: Receptor mediated endocytosis protein 1, isoform
  misc_feature (126)..(537): Homolog of NCBI NO: 17565130 NR Description: Receptor Mediated Endocytosis 1 isoform 1,
  misc_feature (122)..(537): Homolog of NCBI NO: 17565132 NR Description: Receptor Mediated Endocytosis 1 RME-1 isoform 2,
  misc_feature (122)..(537): Homolog of NCBI NO: 7206819 NR Description: Receptor mediated endocytosis protein 1, isoform
  misc_feature (143)..(537): Homolog of NCBI NO: 39594267 NR Description: Hypothetical protein CBG18887 [Caenorhabditis
  misc_feature (5)..(491): Homolog of NCBI NO: 18412957 NR Description: calcium-binding EF-hand family protein
  misc_feature (13)..(545): Homolog of NCBI NO: 38345297 NR Description: OSJNBa0043A12.19 [Oryza sativa (japonica
  misc_feature (1)..(110): Homolog of NCBI NO: 9294546 NR Description: contains similarity to EH domain containing
  misc_feature (127)..(545): Homolog of NCBI NO: 9294546 NR Description: contains similarity to EH domain containing
  misc_feature (1)..(545): Homolog of NCBI NO: 18402561 NR Description: calcium-binding EF-hand family protein
MEIESVAAGSCSKENQMIYKEWFEFSDSDGDGRITGNDAIKFFTMSNLPRPELKQIWAIADSKRQGYLGFKEFIVAMQLVSLAQTGHEISHEVLISDVDFKNINPPTMEGLGVLMAKKKHSSKSSDPNMNGSPAADTSLTAHWFSSKSSKKISLSSVTSIVDGLKRLYIQKLKPLEVAYRFNDFVSPLLTNSDFDAKPMVMLLGQYSTGKTTFIKHLLKSTYPGAHIGPEPTTDRFVVVMSGPDERSIPGNTVAVQADMPFSGLTTFGTAFLSKFECSQMPHPLLEHVTFVDTPGVLSGEKQRTQRAYDFTGVTSWFASKCDLILLLFDPHKLDVSDEFKRVISSLRGHDDKIRVVLNKADQVDTQQLMRVYGALMWSLGKVLNTPEVSRVYIGSFSDKPINEAATGPIGRELFEKEQDDLLADLKDIPKKACDRRINEFVKRARAAKIHAYIISHLKKEMPAIMGKAKAQQKLIDNLEDEFGKVQREHHLPKGDFPNVDHFREVLSGYNIDKFEKLKPKMLQTVDDMLGYDIPELLKNFKNPYD

SEQ ID NO: 36227 - protein, 529 aa, Arabidopsis thaliana
  peptide (1)..(529): Ceres Seq. ID no. 13580495
  misc_feature (2)..(30): Pfam Name: EF hand Pfam Description: EF hand
  misc_feature (127)..(521): Homolog of NCBI NO: 18250262 NR Description: Receptor mediated endocytosis protein 1, isoform
  misc_feature (110)..(521): Homolog of NCBI NO: 17565130 NR Description: Receptor Mediated Endocytosis 1 isoform 1,
  misc_feature (106)..(521): Homolog of NCBI NO: 17565132 NR Description: Receptor Mediated Endocytosis 1 RME-1 isoform 2,
  misc_feature (106)..(521): Homolog of NCBI NO: 7206819 NR Description: Receptor mediated endocytosis protein 1, isoform
  misc_feature (127)..(521): Homolog of NCBI NO: 39594267 NR Description: Hypothetical protein CBG18887 [Caenorhabditis
  misc_feature (1)..(475): Homolog of NCBI NO: 18412957 NR Description: calcium-binding EF-hand family protein
  misc_feature (1)..(529): Homolog of NCBI NO: 38345297 NR Description: OSJNBa0043A12.19 [Oryza sativa (japonica
  misc_feature (1)..(94): Homolog of NCBI NO: 9294546 NR Description: contains similarity to EH domain containing
  misc_feature (111)..(529): Homolog of NCBI NO: 9294546 NR Description: contains similarity to EH domain containing
  misc_feature (1)..(529): Homolog of NCBI NO: 18402561 NR Description: calcium-binding EF-hand family protein
MIYKEWFEFSDSDGDGRITGNDAIKFFTMSNLPRPELKQIWAIADSKRQGYLGFKEFIVAMQLVSLAQTGHEISHEVLISDVDFKNINPPTMEGLGVLMAKKKHSSKSSDPNMNGSPAADTSLTAHWFSSKSSKKISLSSVTSIVDGLKRLYIQKLKPLEVAYRFNDFVSPLLTNSDFDAKPMVMLLGQYSTGKTTFIKHLLKSTYPGAHIGPEPTTDRFVVVMSGPDERSIPGNTVAVQADMPFSGLTTFGTAFLSKFECSQMPHPLLEHVTFVDTPGVLSGEKQRTQRAYDFTGVTSWFASKCDLILLLFDPHKLDVSDEFKRVISSLRGHDDKIRVVLNKADQVDTQQLMRVYGALMWSLGKVLNTPEVSRVYIGSFSDKPINEAATGPIGRELFEKEQDDLLADLKDIPKKACDRRINEFVKRARAAKIHAYIISHLKKEMPAIMGKAKAQQKLIDNLEDEFGKVQREHHLPKGDFPNVDHFREVLSGYNIDKFEKLKPKMLQTVDDMLGYDIPELLKNFKNPYD

SEQ ID NO: 36228 - protein, 501 aa, Arabidopsis thaliana
  peptide (1)..(501): Ceres Seq. ID no. 13580496
  misc_feature (99)..(493): Homolog of NCBI NO: 18250262 NR Description: Receptor mediated endocytosis protein 1, isoform
  misc_feature (82)..(493): Homolog of NCBI NO: 17565130 NR Description: Receptor Mediated Endocytosis 1 isoform 1,
  misc_feature (78)..(493): Homolog of NCBI NO: 17565132 NR Description: Receptor Mediated Endocytosis 1 RME-1 isoform 2,
  misc_feature (78)..(493): Homolog of NCBI NO: 7206819 NR Description: Receptor mediated endocytosis protein 1, isoform
  misc_feature (99)..(493): Homolog of NCBI NO: 39594267 NR Description: Hypothetical protein CBG18887 [Caenorhabditis
  misc_feature (1)..(447): Homolog of NCBI NO: 18412957 NR Description: calcium-binding EF-hand family protein
  misc_feature (1)..(501): Homolog of NCBI NO: 38345297 NR Description: OSJNBa0043A12.19 [Oryza sativa (japonica
  misc_feature (1)..(66): Homolog of NCBI NO: 9294546 NR Description: contains similarity to EH domain containing
  misc_feature (83)..(501): Homolog of NCBI NO: 9294546 NR Description: contains similarity to EH domain containing
  misc_feature (1)..(501): Homolog of NCBI NO: 18402561 NR Description: calcium-binding EF-hand family protein
MSNLPRPELKQIWAIADSKRQGYLGFKEFIVAMQLVSLAQTGHEISHEVLISDVDFKNINPPTMEGLGVLMAKKKHSSKSSDPNMNGSPAADTSLTAHWFSSKSSKKISLSSVTSIVDGLKRLYIQKLKPLEVAYRFNDFVSPLLTNSDFDAKPMVMLLGQYSTGKTTFIKHLLKSTYPGAHIGPEPTTDRFVVVMSGPDERSIPGNTVAVQADMPFSGLTTFGTAFLSKFECSQMPHPLLEHVTFVDTPGVLSGEKQRTQRAYDFTGVTSWFASKCDLILLLFDPHKLDVSDEFKRVISSLRGHDDKIRVVLNKADQVDTQQLMRVYGALMWSLGKVLNTPEVSRVYIGSFSDKPINEAATGPIGRELFEKEQDDLLADLKDIPKKACDRRINEFVKRARAAKIHAYIISHLKKEMPAIMGKAKAQQKLIDNLEDEFGKVQREHHLPKGDFPNVDHFREVLSGYNIDKFEKLKPKMLQTVDDMLGYDIPELLKNFKNPYD

SEQ ID NO: 36229 - DNA, 1477 bp, Arabidopsis thaliana
  misc_feature (1)..(1477): Ceres Seq. ID no. 12321987
  misc_feature: MA Experiment ID: 108462 Result: Down-regulated in Transcription
  misc_feature: MA Experiment 108462 PARAMETER Experiment Name: At_Germinating_Seeds_cDNA_P Parameter: Age (day) Value: 2 vs. 0
  misc_feature: MA Experiment 108462 PARAMETER Experiment Name: At_Germinating_Seeds_cDNA_P Parameter: Tissue Value: Germinating Seeds
  misc_feature: MA Experiment ID: 108463 Result: Down-regulated in Transcription
  misc_feature: MA Experiment 108463 PARAMETER Experiment Name: At_Germinating_Seeds_cDNA_P Parameter: Age (day) Value: 3 vs. 0
  misc_feature: MA Experiment 108463 PARAMETER Experiment Name: At_Germinating_Seeds_cDNA_P Parameter: Tissue Value: Germinating Seeds
  misc_feature: MA Experiment ID: 108464 Result: Down-regulated in Transcription
  misc_feature: MA Experiment 108464 PARAMETER Experiment Name: At_Germinating_Seeds_cDNA_P Parameter: Age (day) Value: 4 vs. 0
  misc_feature: MA Experiment 108464 PARAMETER Experiment Name: At_Germinating_Seeds_cDNA_P Parameter: Tissue Value: Germinating Seeds
  misc_feature: MA Experiment ID: 108595 Result: Down-regulated in Transcription
  misc_feature: MA Experiment 108595 PARAMETER Experiment Name: At_Ler-pi_Ovule_cDNA_P Parameter: Plant Line Value: null
  misc_feature: MA Experiment ID: 20000234 Result: Up-regulated in Transcription
  misc_feature: MA Experiment 20000234 PARAMETER Experiment Name: At_Siliques_P Parameter: Age (day) Value: 21
  misc_feature: MA Experiment 20000234 PARAMETER Experiment Name: At_Siliques_P Parameter: Organism Value: A. thaliana
  misc_feature: MA Experiment 20000234 PARAMETER Experiment Name: At_Siliques_P Parameter: Plant Line Value: WS
  misc_feature: MA Experiment 20000234 PARAMETER Experiment Name: At_Siliques_P Parameter: Tissue Value: Less Than 5mm Siliques vs. Whole Plant
  misc_feature: MA Experiment ID: 20001556 Result: Up-regulated in Transcription
  misc_feature: MA Experiment 20001556 PARAMETER Experiment Name: At_Drought_Soil_Dry_P Parameter: Age (day) Value: 26
  misc_feature: MA Experiment 20001556 PARAMETER Experiment Name: At_Drought_Soil_Dry_P Parameter: Organism Value: A. thaliana
  misc_feature: MA Experiment 20001556 PARAMETER Experiment Name: At_Drought_Soil_Dry_P Parameter: Plant Line Value: WS
  misc_feature: MA Experiment 20001556 PARAMETER Experiment Name: At_Drought_Soil_Dry_P Parameter: Post Timepoint (hr) Value: None
  misc_feature: MA Experiment 20001556 PARAMETER Experiment Name: At_Drought_Soil_Dry_P Parameter: Post-Treatment Value: None
  misc_feature: MA Experiment 20001556 PARAMETER Experiment Name: At_Drought_Soil_Dry_P Parameter: Timepoint (day) Value: 12
  misc_feature: MA Experiment 20001556 PARAMETER Experiment Name: At_Drought_Soil_Dry_P Parameter: Treatment Value: Drought vs. No Drought
  misc_feature: MA Experiment ID: 20001557 Result: Up-regulated in Transcription
  misc_feature: MA Experiment 20001557 PARAMETER Experiment Name: At_Drought_Soil_Dry_P Parameter: Age (day) Value: 27
  misc_feature: MA Experiment 20001557 PARAMETER Experiment Name: At_Drought_Soil_Dry_P Parameter: Organism Value: A. thaliana
  misc_feature: MA Experiment 20001557 PARAMETER Experiment Name: At_Drought_Soil_Dry_P Parameter: Plant Line Value: WS
  misc_feature: MA Experiment 20001557 PARAMETER Experiment Name: At_Drought_Soil_Dry_P Parameter: Post Timepoint (hr) Value: 3
  misc_feature: MA Experiment 20001557 PARAMETER Experiment Name: At_Drought_Soil_Dry_P Parameter: Post-Treatment Value: Re-Water vs. No Drought
  misc_feature: MA Experiment 20001557 PARAMETER Experiment Name: At_Drought_Soil_Dry_P Parameter: Timepoint (day) Value: 13
  misc_feature: MA Experiment 20001557 PARAMETER Experiment Name: At_Drought_Soil_Dry_P Parameter: Treatment Value: Drought vs. No Drought
  misc_feature: MA Experiment ID: 20001558 Result: Up-regulated in Transcription
  misc_feature: MA Experiment 20001558 PARAMETER Experiment Name: At_Drought_Soil_Dry_P Parameter: Age (day) Value: 27
  misc_feature: MA Experiment 20001558 PARAMETER Experiment Name: At_Drought_Soil_Dry_P Parameter: Organism Value: A. thaliana
  misc_feature: MA Experiment 20001558 PARAMETER Experiment Name: At_Drought_Soil_Dry_P Parameter: Plant Line Value: WS
  misc_feature: MA Experiment 20001558 PARAMETER Experiment Name: At_Drought_Soil_Dry_P Parameter: Post Timepoint (hr) Value: 6
  misc_feature: MA Experiment 20001558 PARAMETER Experiment Name: At_Drought_Soil_Dry_P Parameter: Post-Treatment Value: Re-Water vs. No Drought
  misc_feature: MA Experiment 20001558 PARAMETER Experiment Name: At_Drought_Soil_Dry_P Parameter: Timepoint (day) Value: 13
  misc_feature: MA Experiment 20001558 PARAMETER Experiment Name: At_Drought_Soil_Dry_P Parameter: Treatment Value: Drought vs. No Drought
  misc_feature: MA Experiment ID: 20001560 Result: Up-regulated in Transcription
  misc_feature: MA Experiment 20001560 PARAMETER Experiment Name: At_Drought_Soil_Dry_P Parameter: Age (day) Value: 28
  misc_feature: MA Experiment 20001560 PARAMETER Experiment Name: At_Drought_Soil_Dry_P Parameter: Organism Value: A. thaliana
  misc_feature: MA Experiment 20001560 PARAMETER Experiment Name: At_Drought_Soil_Dry_P Parameter: Plant Line Value: WS
  misc_feature: MA Experiment 20001560 PARAMETER Experiment Name: At_Drought_Soil_Dry_P Parameter: Post Timepoint (hr) Value: None
  misc_feature: MA Experiment 20001560 PARAMETER Experiment Name: At_Drought_Soil_Dry_P Parameter: Post-Treatment Value: None
  misc_feature: MA Experiment 20001560 PARAMETER Experiment Name: At_Drought_Soil_Dry_P Parameter: Timepoint (day) Value: 14
  misc_feature: MA Experiment 20001560 PARAMETER Experiment Name: At_Drought_Soil_Dry_P Parameter: Treatment Value: Drought vs. No Drought
  misc_feature: MA Experiment ID: 20001905 Result: Up-regulated in Transcription
  misc_feature: MA Experiment 20001905 PARAMETER Experiment Name: At_Drought_Reproduction_P Parameter: Age (day) Value: 40
  misc_feature: MA Experiment 20001905 PARAMETER Experiment Name: At_Drought_Reproduction_P Parameter: Organism Value: A. thaliana
  misc_feature: MA Experiment 20001905 PARAMETER Experiment Name: At_Drought_Reproduction_P Parameter: Plant Line Value: WS
  misc_feature: MA Experiment 20001905 PARAMETER Experiment Name: At_Drought_Reproduction_P Parameter: Timepoint (day) Value: 10
  misc_feature: MA Experiment 20001905 PARAMETER Experiment Name: At_Drought_Reproduction_P Parameter: Tissue Value: Rosettes
  misc_feature: MA Experiment 20001905 PARAMETER Experiment Name: At_Drought_Reproduction_P Parameter: Treatment Value: Drought vs. No Drought
tagtttcgtcctccgtcaatctctctcgccgctttatccttgttacaaatcccatcgatcttttcggaatcttccctcattatgctcagccaccattaccagagctccattgtttcagttctccgttcaacgattatcggaattattcacaacactattagtatcaccgtcgccaaccgattttgattaccagctttggtgacgacagtcgtgattaaggaggttttggtaaatttcttcgttcctgtttgttttcaaagatggctgctttgaaaggttatggcttgtgttctatggactctgctcttcaattcccctgtcctaagctattcaatggctataagagaaggagctcgaaatgggtctctcccaaagcagctgttgtacccaatttccatctcccaatgcgcagcttggaggttaaaaacaggacaaacacagacgacattaaagctctacgtgtgatcacagctatcaaaacaccgtatctacctgatggaagattcgaccttgaagcctacgatgacttagtcaacattcagatacaaaacggtgctgaaggtgtcattgttggtggtacaactgtgaaggacaactgatgagctgggacgaacacattatgcttataggccataccgttaactgttttggcggaagcatcaaagtcattggaaacactggaagcaattcgactagagaagcaatccacgcgactgaacaaggattcgcggttggaatgcatgctgctcttcatataaacccttactatggcaagacttctattgagggactgattgcacatttccagtctgttcttcatatgggaccgacgattatatacaatgtgcctggtcgaacagggcaagatataccgcctcgtgccatcttcaaactttctcagaatccgaatttagctggtgtgaaggaatgtgttgggaacaagcgagtcgaagagtacactgagaatggggttgttgtgtggagtgggaatgatgatgagtgtcatgattccagatgggattatggagcaacaggagttatatcagttactagtaatttagttccgggtttgatgaggaagttgatgtttgaaggtaggaattcatctttgaactcaaagcttctacctttgatggcttggctgttccacgagccaaacccgattggaatcaacactgctttggctcagcttggagtttcgaggccggtttttaggttaccatatgtaccattgccactgtctaagaggcttgagtttgtgaaactggtgaaggagattggacgagagcattttgtgggtgagaaagatgttcaggctcttgatgatgatgattttatccttatcggtcgatattagcatacttttttttttgaatttttggttcctttttgtttggtgttaatgaagaagagatggttctatcatttggttttatgtagctgatgaatgaatgaaaactcaaggaatgatttcatc

SEQ ID NO: 36230 - protein, 252 aa, Arabidopsis thaliana
  peptide (1)..(252): Ceres Seq. ID no. 12321988
  misc_feature (1)..(228): Pfam Name: Dihydrodipicolinate synthetase family Pfam Description: Dihydrodipicolinate synthetase family
  misc_feature (1)..(252): Homolog of NCBI NO: 1084359 NR Description: dihydrodipicolinate synthase (EC 4.2.1.52)
  misc_feature (1)..(252): Homolog of NCBI NO: 6014907 NR Description: Dihydrodipicolinate synthase, chloroplast
  misc_feature (1)..(251): Homolog of NCBI NO: 1076280 NR Description: dihydrodipicolinate synthase (EC 4.2.1.52)
  misc_feature (1)..(251): Homolog of NCBI NO: 8648949 NR Description: dihydrodipicolinate synthase
  misc_feature (1)..(252): Homolog of NCBI NO: 6014908 NR Description: Dihydrodipicolinate synthase, chloroplast
  misc_feature (1)..(252): Homolog of NCBI NO: 1076317 NR Description: dihydrodipicolinate synthase (EC 4.2.1.52)
  misc_feature (1)..(252): Homolog of NCBI NO: 15232971 NR Description: dihydrodipicolinate synthase precursor
  misc_feature (1)..(252): Homolog of NCBI NO: 30695296 NR Description: dihydrodipicolinate synthase precursor
  misc_feature (1)..(252): Homolog of NCBI NO: 15225477 NR Description: putative dihydrodipicolinate synthase
  misc_feature (1)..(252): Homolog of NCBI NO: 11066382 NR Description: dihydrodipicolinate synthase 2 [Arabidopsis
MSWDEHIMLIGHTVNCFGGSIKVIGNTGSNSTREAIHATEQGFAVGMHAALHINPYYGKTSIEGLIAHFQSVLHMGPTIIYNVPGRTGQDIPPRAIFKLSQNPNLAGVKECVGNKRVEEYTENGVVVWSGNDDECHDSRWDYGATGVISVTSNLVPGLMRKLMFEGRNSSLNSKLLPLMAWLFHEPNPIGINTALAQLGVSRPVFRLPYVPLPLSKRLEFVKLVKEIGREHFVGEKDVQALDDDDFILIGRY

SEQ ID NO: 36231 - protein, 245 aa, Arabidopsis thaliana
  peptide (1)..(245): Ceres Seq. ID no. 12321989
  misc_feature (1)..(221): Pfam Name: Dihydrodipicolinate synthetase family Pfam Description: Dihydrodipicolinate synthetase family
  misc_feature (1)..(245): Homolog of NCBI NO: 1084359 NR Description: dihydrodipicolinate synthase (EC 4.2.1.52)
  misc_feature (1)..(245): Homolog of NCBI NO: 6014907 NR Description: Dihydrodipicolinate synthase, chloroplast
  misc_feature (1)..(244): Homolog of NCBI NO: 1076280 NR Description: dihydrodipicolinate synthase (EC 4.2.1.52)
  misc_feature (1)..(244): Homolog of NCBI NO: 8648949 NR Description: dihydrodipicolinate synthase
  misc_feature (1)..(245): Homolog of NCBI NO: 6014908 NR Description: Dihydrodipicolinate synthase, chloroplast
  misc_feature (1)..(245): Homolog of NCBI NO: 1076317 NR Description: dihydrodipicolinate synthase (EC 4.2.1.52)
  misc_feature (1)..(245): Homolog of NCBI NO: 15232971 NR Description: dihydrodipicolinate synthase precursor
  misc_feature (1)..(245): Homolog of NCBI NO: 30695296 NR Description: dihydrodipicolinate synthase precursor
  misc_feature (1)..(245): Homolog of NCBI NO: 15225477 NR Description: putative dihydrodipicolinate synthase
  misc_feature (1)..(245): Homolog of NCBI NO: 11066382 NR Description: dihydrodipicolinate synthase 2 [Arabidopsis
MLIGHTVNCFGGSIKVIGNTGSNSTREAIHATEQGFAVGMHAALHINPYYGKTSIEGLIAHFQSVLHMGPTIIYNVPGRTGQDIPPRAIFKLSQNPNLAGVKECVGNKRVEEYTENGVVVWSGNDDECHDSRWDYGATGVISVTSNLVPGLMRKLMFEGRNSSLNSKLLPLMAWLFHEPNPIGINTALAQLGVSRPVFRLPYVPLPLSKRLEFVKLVKEIGREHFVGEKDVQALDDDDFILIGRY

SEQ ID NO: 36232 - protein, 206 aa, Arabidopsis thaliana
  peptide (1)..(206): Ceres Seq. ID no. 12321990
  misc_feature (1)..(182): Pfam Name: Dihydrodipicolinate synthetase family Pfam Description: Dihydrodipicolinate synthetase family
  misc_feature (1)..(206): Homolog of NCBI NO: 1084359 NR Description: dihydrodipicolinate synthase (EC 4.2.1.52)
  misc_feature (1)..(206): Homolog of NCBI NO: 6014907 NR Description: Dihydrodipicolinate synthase, chloroplast
  misc_feature (1)..(205): Homolog of NCBI NO: 1076280 NR Description: dihydrodipicolinate synthase (EC 4.2.1.52)
  misc_feature (1)..(205): Homolog of NCBI NO: 8648949 NR Description: dihydrodipicolinate synthase
  misc_feature (1)..(206): Homolog of NCBI NO: 6014908 NR Description: Dihydrodipicolinate synthase, chloroplast
  misc_feature (1)..(206): Homolog of NCBI NO: 1076317 NR Description: dihydrodipicolinate synthase (EC 4.2.1.52)
  misc_feature (1)..(206): Homolog of NCBI NO: 15232971 NR Description: dihydrodipicolinate synthase precursor
  misc_feature (1)..(206): Homolog of NCBI NO: 30695296 NR Description: dihydrodipicolinate synthase precursor
  misc_feature (1)..(206): Homolog of NCBI NO: 15225477 NR Description: putative dihydrodipicolinate synthase
  misc_feature (1)..(206): Homolog of NCBI NO: 11066382 NR Description: dihydrodipicolinate synthase 2 [Arabidopsis
MHAALHINPYYGKTSIEGLIAHFQSVLHMGPTIIYNVPGRTGQDIPPRAIFKLSQNPNLAGVKECVGNKRVEEYTENGVVVWSGNDDECHDSRWDYGATGVISVTSNLVPGLMRKLMFEGRNSSLNSKLLPLMAWLFHEPNPIGINTALAQLGVSRPVFRLPYVPLPLSKRLEFVKLVKEIGREHFVGEKDVQALDDDDFILIGRY

SEQ ID NO: 36233 - DNA, 1290 bp, Arabidopsis thaliana
  misc_feature (1)..(1290): Ceres Seq. ID no. 13486716
  misc_feature: MA Experiment ID: 20000180 Result: Down-regulated in Transcription
  misc_feature: MA Experiment 20000180 PARAMETER Experiment Name: At_Germinating_Seeds_P Parameter: Age (hr) Value: 24 vs. 0
  misc_feature: MA Experiment 20000180 PARAMETER Experiment Name: At_Germinating_Seeds_P Parameter: Tissue Value: Germinating Seeds
  misc_feature: MA Experiment ID: 20000184 Result: Down-regulated in Transcription
  misc_feature: MA Experiment 20000184 PARAMETER Experiment Name: At_Shoots__P Parameter: Age (day) Value: 7
  misc_feature: MA Experiment 20000184 PARAMETER Experiment Name: At_Shoots__P Parameter: Tissue Value: Shoots vs. Whole Plant
aaaaactcagtgagtgagtcaccgaaaacctcttgtagtagattcgtgacgggtttgatcatctcttcgaggtcggttctagggtttcactacgagaatggacggagatgagctcaccgagcaggaaactgctctttatgaccgtcaaattagggtatggggagctggtgctcaaagaagattgagtaaatctcatgttttggtatctggaattaagggcactgttgctgagttttgtaagaacattgtgttggcaggagtaggtagtgtgactctgttggatgatcgattggttacaacggaagtcttcaacgcaaacttcttgattcttcctgatgaaaatgcttatgtaggcaaaaccgtagctgagatttgttgtgattcacttaaggattttaaccctatggttcatgtttcaatagagaaaggtgatttgtcaacacttggtgttgattttttcgagaagtttgatgttgtggttatcggctacagttctcgtgctactaagaaagcagttaatgaaaagtgtaggaacctagcaaaagatgtagcgttctatacagttgattgtagaggctcatgtggcgaaatatttgtcgaccttcagaattataagtacacaaagaaaaagcttgatgaaacagtggaatgtgaactaacatttccaagttttgaggaggcagtttcagtaccgtggaaaccgatgccaaggagaacagcaaagctctactttgcaatgagagtgatagaactatttgaggaaactgaaggacgtaaacctggggaatgttcgctgtctgatctcccaagagttttgaaactcaaaaaggaactatgtgaaggaaattcggtcagcgagaatcatattccagatatcctcttggagagactcgtatctaataacacagaattcccaccggcttgtgccatcattggagggattctaggacaggaggtgataaaagttatatcaggcaaaggagagccgttgaagaacttcttctactttgatgcagaggatgggaaaggtgtaatcgaggacctatcccacaagctttaacttccaaacatgaaaggtgctgtgaaacgctgctcttagtaattagttccttgttgaagattgtattggaaattagactttagagtacttagaacttggctccttgtcttttgtatctactaacttggttcgctcctaaagacaatctgtaacccactatttactttaatccatcaatttacacactcctatctaaaaaaaaaaaaaaaaaactccaccgggggcccggt

SEQ ID NO: 36234 - protein, 320 aa, Arabidopsis thaliana
  peptide (1)..(320): Ceres Seq. ID no. 13486717
  misc_feature (30)..(168): Pfam Name: ThiF family Pfam Description: ThiF family
  misc_feature (176)..(316): Homolog of NCBI NO: 9790247 NR Description: ubiquitin-like 1 (sentrin) activating enzyme
  misc_feature (3)..(178): Homolog of NCBI NO: 9790247 NR Description: ubiquitin-like 1 (sentrin) activating enzyme
  misc_feature (86)..(319): Homolog of NCBI NO: 25494393 NR Description: probable ubiquitin activating enzyme 2
  misc_feature (3)..(317): Homolog of NCBI NO: 3647283 NR Description: ubiquitin activating enzyme [Lycopersicon
  misc_feature (1)..(317): Homolog of NCBI NO: 7488411 NR Description: ubiquitin-activating enzyme homolog F13M23.80 -
  misc_feature (1)..(317): Homolog of NCBI NO: 18416454 NR Description: SUMO activating enzyme, putative [Arabidopsis
  misc_feature (1)..(320): Homolog of NCBI NO: 21554965 NR Description: ubiquitin activating enzyme [Arabidopsis thaliana]
  misc_feature (1)..(320): Homolog of NCBI NO: 30695912 NR Description: SUMO activating enzyme 1b (SAE1b) [Arabidopsis
  misc_feature (1)..(320): Homolog of NCBI NO: 22652852 NR Description: SUMO activating enzyme 1b [Arabidopsis thaliana]
  misc_feature (1)..(320): Homolog of NCBI NO: 18423184 NR Description: SUMO activating enzyme 1b (SAE1b) [Arabidopsis
MDGDELTEQETALYDRQIRVWGAGAQRRLSKSHVLVSGIKGTVAEFCKNIVLAGVGSVTLLDDRLVTTEVFNANFLILPDENAYVGKTVAEICCDSLKDFNPMVHVSIEKGDLSTLGVDFFEKFDVVVIGYSSRATKKAVNEKCRNLAKDVAFYTVDCRGSCGEIFVDLQNYKYTKKKLDETVECELTFPSFEEAVSVPWKPMPRRTAKLYFAMRVIELFEETEGRKPGECSLSDLPRVLKLKKELCEGNSVSENHIPDILLERLVSNNTEFPPACAIIGGILGQEVIKVISGKGEPLKNFFYFDAEDGKGVIEDLSHKL

SEQ ID NO: 36235 - protein, 218 aa, Arabidopsis thaliana
  peptide (1)..(218): Ceres Seq. ID no. 13486718
  misc_feature (1)..(66): Pfam Name: ThiF family Pfam Description: ThiF family
  misc_feature (74)..(214): Homolog of NCBI NO: 9790247 NR Description: ubiquitin-like 1 (sentrin) activating enzyme
  misc_feature (1)..(76): Homolog of NCBI NO: 9790247 NR Description: ubiquitin-like 1 (sentrin) activating enzyme
  misc_feature (1)..(217): Homolog of NCBI NO: 25494393 NR Description: probable ubiquitin activating enzyme 2
  misc_feature (1)..(215): Homolog of NCBI NO: 3647283 NR Description: ubiquitin activating enzyme [Lycopersicon
  misc_feature (1)..(215): Homolog of NCBI NO: 7488411 NR Description: ubiquitin-activating enzyme homolog F13M23.80 -
  misc_feature (1)..(215): Homolog of NCBI NO: 18416454 NR Description: SUMO activating enzyme, putative [Arabidopsis
  misc_feature (1)..(218): Homolog of NCBI NO: 21554965 NR Description: ubiquitin activating enzyme [Arabidopsis thaliana]
  misc_feature (1)..(218): Homolog of NCBI NO: 30695912 NR Description: SUMO activating enzyme 1b (SAE1b) [Arabidopsis
  misc_feature (1)..(218): Homolog of NCBI NO: 22652852 NR Description: SUMO activating enzyme 1b [Arabidopsis thaliana]
  misc_feature (1)..(218): Homolog of NCBI NO: 18423184 NR Description: SUMO activating enzyme 1b (SAE1b) [Arabidopsis
MVHVSIEKGDLSTLGVDFFEKFDVVVIGYSSRATKKAVNEKCRNLAKDVAFYTVDCRGSCGEIFVDLQNYKYTKKKLDETVECELTFPSFEEAVSVPWKPMPRRTAKLYFAMRVIELFEETEGRKPGECSLSDLPRVLKLKKELCEGNSVSENHIPDILLERLVSNNTEFPPACAIIGGILGQEVIKVISGKGEPLKNFFYFDAEDGKGVIEDLSHKL

SEQ ID NO: 36236 - DNA, 1166 bp, Arabidopsis thaliana
  misc_feature (1)..(1166): Ceres Seq. ID no. 12321452
  misc_feature: MA Experiment ID: 108577 Result: Down-regulated in Transcription
  misc_feature: MA Experiment 108577 PARAMETER Experiment Name: At_42deg_Heat_cDNA_P Parameter: Temperature (deg C) Value: 42 vs. 22
  misc_feature: MA Experiment 108577 PARAMETER Experiment Name: At_42deg_Heat_cDNA_P Parameter: Timepoint (hr) Value: 6
  misc_feature: MA Experiment 108577 PARAMETER Experiment Name: At_42deg_Heat_cDNA_P Parameter: Tissue Value: Aerial
aaagctgaactataaaaatggcgatttctacattactctcaatctcttctttcactctatcttcttcctcatcaacaaaaacccatctccttacttcaatacctgcttcaagggtttattcttatccaatttcacccaaatggaagcaaattcgtttcctgcagagtcaaagttccagtcttttctatccattacgccgcaatttcaccagattctgttcttctccagatgggtttctcagaaacaccaaagacgacgaagaaggaaacgaaatcattcagcttccgtctattggtgtaaaccctgtgaaattcgcgatttgcgttgtgttgtgggcttctttctctctgctttggtttgctaggtctggagatgccaaagctgcgactgattctatcaaatcttcgagctttggtctcagaatcgcctccactcttcgccgttttggttggccagacgaagctgttgtgtttgctttagctactcttccggttattgaactccgtggtgccattcctgttggttattggatgcaactaaaaccggtggttctcacttccttctctgttcttggcaatatggttccagttccattcatcgtactttacctcaaaacgtttgcatcttttgtggcgggtaagagccaaacagcttctaaattacttgatatcttgtttaaaagagctaaagagaaagctggacctgtggaagagttcaaatggttagggctaatgctctttgtagctgttccattccctggaaccggtgcttggacaggagctataatagcatcaatcctcgacatgccgttttggtctgctgtttcgtctaatttctgcggtgtagtgttggctggactgttggtgaacttgctggtaaatcttggtttgaaacaagccattgtagctggtattgctctcttctttgtatctacgtttatgtggagcgttctcagaaacattaggaagtctataaaaccatcgttgccttgaattcgttattagatacttagatgtagaagaaagagttcttcacactattggttctttttttcttcaactgttaataatgtttttaagggatttgtgttggtcttaatttcctcaattcactcttctcataaatcccttattgtgatatacaaataatgcaatttatcattactc

SEQ ID NO: 36237 - protein, 324 aa, Arabidopsis thaliana
  peptide (1)..(324): Ceres Seq. ID no. 12321453
  misc_feature (151)..(282): Homolog of NCBI NO: 14591427 NR Description: hypothetical protein [Pyrococcus horikoshii]
  misc_feature (151)..(291): Homolog of NCBI NO: 18978147 NR Description: putative small multidrug export protein; (qacE)
  misc_feature (146)..(296): Homolog of NCBI NO: 23052254 NR Description: hypothetical protein [Methanosarcina barkeri]
  misc_feature (146)..(291): Homolog of NCBI NO: 21227925 NR Description: putative small multi-drug export protein
  misc_feature (150)..(290): Homolog of NCBI NO: 22537969 NR Description: conserved hypothetical protein [Streptococcus
  misc_feature (157)..(285): Homolog of NCBI NO: 15613797 NR Description: small multidrug export related protein [Bacillus
  misc_feature (151)..(290): Homolog of NCBI NO: 28212098 NR Description: putative small multi-drug export protein
  misc_feature (157)..(291): Homolog of NCBI NO: 11499286 NR Description: small multidrug export protein (qacE)
  misc_feature (118)..(319): Homolog of NCBI NO: 34897152 NR Description: unknown protein [Oryza sativa (japonica
  misc_feature (1)..(324): Homolog of NCBI NO: 15227004 NR Description: putative transport protein
MAISTLLSISSFTLSSSSSTKTHLLTSIPASRVYSYPISPKWKQIRFLQSQSSSLFYPLRRNFTRFCSSPDGFLRNTKDDEEGNEIIQLPSIGVNPVKFAICVVLWASFSLLWFARSGDAKAATDSIKSSSFGLRIASTLRRFGWPDEAVVFALATLPVIELRGAIPVGYWMQLKPVVLTSFSVLGNMVPVPFIVLYLKTFASFVAGKSQTASKLLDILFKRAKEKAGPVEEFKWLGLMLFVAVPFPGTGAWTGAIIASILDMPFWSAVSSNFCGVVLAGLLVNLLVNLGLKQAIVAGIALFFVSTFMWSVLRNIRKSIKPSLP

SEQ ID NO: 36238 - DNA, 1300 bp, Arabidopsis thaliana
  misc_feature (1)..(1300): Ceres Seq. ID no. 12357711
  misc_feature: MA Experiment ID: 108434 Result: Down-regulated in Transcription
  misc_feature: MA Experiment 108434 PARAMETER Experiment Name: At_Root_Tips_cDNA_P Parameter: Tissue Value: Root Tips
  misc_feature: MA Experiment ID: 108473 Result: Down-regulated in Transcription
  misc_feature: MA Experiment 108473 PARAMETER Experiment Name: At_Drought_Flowers_cDNA_P Parameter: Timepoint (hr) Value: 7 d
  misc_feature: MA Experiment 108473 PARAMETER Experiment Name: At_Drought_Flowers_cDNA_P Parameter: Tissue Value: Flower
  misc_feature: MA Experiment 108473 PARAMETER Experiment Name: At_Drought_Flowers_cDNA_P Parameter: Treatment Value: Drought vs. No Drought
  misc_feature: MA Experiment ID: 108501 Result: Down-regulated in Transcription
  misc_feature: MA Experiment 108501 PARAMETER Experiment Name: At_ap2_floral_buds_cDNA_P Parameter: Plant Line Value: ap2 (Ler.)
  misc_feature: MA Experiment 108501 PARAMETER Experiment Name: At_ap2_floral_buds_cDNA_P Parameter: Tissue Value: Closed Flower
  misc_feature: MA Experiment ID: 108561 Result: Up-regulated in Transcription
  misc_feature: MA Experiment 108561 PARAMETER Experiment Name: At_100uM_ABA_cDNA_P Parameter: Timepoint (hr) Value: 6
  misc_feature: MA Experiment 108561 PARAMETER Experiment Name: At_100uM_ABA_cDNA_P Parameter: Tissue Value: Aerial
  misc_feature: MA Experiment 108561 PARAMETER Experiment Name: At_100uM_ABA_cDNA_P Parameter: Treatment Value: 100uM ABA vs. No Treatment
  misc_feature: MA Experiment ID: 108576 Result: Up-regulated in Transcription
  misc_feature: MA Experiment 108576 PARAMETER Experiment Name: At_42deg_Heat_cDNA_P Parameter: Temperature (deg C) Value: 42 vs. 22
  misc_feature: MA Experiment 108576 PARAMETER Experiment Name: At_42deg_Heat_cDNA_P Parameter: Timepoint (hr) Value: 1
  misc_feature: MA Experiment 108576 PARAMETER Experiment Name: At_42deg_Heat_cDNA_P Parameter: Tissue Value: Aerial
  misc_feature: MA Experiment ID: 108585 Result: Up-regulated in Transcription
  misc_feature: MA Experiment 108585 PARAMETER Experiment Name: At_5mM_NaNP_cDNA_P Parameter: Timepoint (hr) Value: 6
  misc_feature: MA Experiment 108585 PARAMETER Experiment Name: At_5mM_NaNP_cDNA_P Parameter: Tissue Value: Aerial
  misc_feature: MA Experiment 108585 PARAMETER Experiment Name: At_5mM_NaNP_cDNA_P Parameter: Treatment Value: null
  misc_feature: MA Experiment ID: 108668 Result: Up-regulated in Transcription
  misc_feature: MA Experiment 108668 PARAMETER Experiment Name: At_2mM_SA_cDNA_P Parameter: Plant Line Value: WS
  misc_feature: MA Experiment 108668 PARAMETER Experiment Name: At_2mM_SA_cDNA_P Parameter: Timepoint (hr) Value: 6
  misc_feature: MA Experiment 108668 PARAMETER Experiment Name: At_2mM_SA_cDNA_P Parameter: Treatment Value: 2mM SA vs. No Treatment
  misc_feature: MA Experiment ID: 20000087 Result: Up-regulated in Transcription
  misc_feature: MA Experiment 20000087 PARAMETER Experiment Name: At_100uM_ABA_Mutants_cDNA_P Parameter: Plant Line Value: WS
  misc_feature: MA Experiment 20000087 PARAMETER Experiment Name: At_100uM_ABA_Mutants_cDNA_P Parameter: Timepoint (hr) Value: 6
  misc_feature: MA Experiment 20000087 PARAMETER Experiment Name: At_100uM_ABA_Mutants_cDNA_P Parameter: Tissue Value: Aerial
  misc_feature: MA Experiment 20000087 PARAMETER Experiment Name: At_100uM_ABA_Mutants_cDNA_P Parameter: Treatment Value: 100uM ABA vs. No Treatment
  misc_feature: MA Experiment ID: 20000111 Result: Up-regulated in Transcription
  misc_feature: MA Experiment 20000111 PARAMETER Experiment Name: At_42deg_Heat_cDNA_P Parameter: Temperature (deg C) Value: 42 vs. 22
  misc_feature: MA Experiment 20000111 PARAMETER Experiment Name: At_42deg_Heat_cDNA_P Parameter: Timepoint (hr) Value: 6
  misc_feature: MA Experiment 20000111 PARAMETER Experiment Name: At_42deg_Heat_cDNA_P Parameter: Tissue Value: Aerial
  misc_feature: MA Experiment ID: 20000113 Result: Up-regulated in Transcription
  misc_feature: MA Experiment 20000113 PARAMETER Experiment Name: At_42deg_Heat_cDNA_P Parameter: Temperature (deg C) Value: 42 vs. 22
  misc_feature: MA Experiment 20000113 PARAMETER Experiment Name: At_42deg_Heat_cDNA_P Parameter: Timepoint (hr) Value: 8
  misc_feature: MA Experiment 20000113 PARAMETER Experiment Name: At_42deg_Heat_cDNA_P Parameter: Tissue Value: Aerial
  misc_feature: MA Experiment ID: 20000144 Result: Up-regulated in Transcription
  misc_feature: MA Experiment 20000144 PARAMETER Experiment Name: At_42deg_Heat_cDNA_P Parameter: Temperature (deg C) Value: 42 vs. 22
  misc_feature: MA Experiment 20000144 PARAMETER Experiment Name: At_42deg_Heat_cDNA_P Parameter: Timepoint (hr) Value: 1
  misc_feature: MA Experiment 20000144 PARAMETER Experiment Name: At_42deg_Heat_cDNA_P Parameter: Tissue Value: Aerial
  misc_feature: MA Experiment ID: 20000184 Result: Down-regulated in Transcription
  misc_feature: MA Experiment 20000184 PARAMETER Experiment Name: At_Shoots__P Parameter: Age (day) Value: 7
  misc_feature: MA Experiment 20000184 PARAMETER Experiment Name: At_Shoots__P Parameter: Tissue Value: Shoots vs. Whole Plant
  misc_feature: MA Experiment ID: 20000265 Result: Up-regulated in Transcription
  misc_feature: MA Experiment 20000265 PARAMETER Experiment Name: At_Open_Flower_P Parameter: Age (day) Value: 21
  misc_feature: MA Experiment 20000265 PARAMETER Experiment Name: At_Open_Flower_P Parameter: Plant Line Value: WS
  misc_feature: MA Experiment 20000265 PARAMETER Experiment Name: At_Open_Flower_P Parameter: Tissue Value: Closed Flower vs. Whole Plant
  misc_feature: MA Experiment ID: 20000286 Result: Up-regulated in Transcription
  misc_feature: MA Experiment 20000286 PARAMETER Experiment Name: At_Open_Flower_P Parameter: Age (day) Value: 21
  misc_feature: MA Experiment 20000286 PARAMETER Experiment Name: At_Open_Flower_P Parameter: Plant Line Value: WS
  misc_feature: MA Experiment 20000286 PARAMETER Experiment Name: At_Open_Flower_P Parameter: Tissue Value: Half Open vs. Whole Plant
  misc_feature: MA Experiment ID: 20000439 Result: Up-regulated in Transcription
  misc_feature: MA Experiment 20000439 PARAMETER Experiment Name: At_Roots__P Parameter: Age (day) Value: 14 vs. 21
  misc_feature: MA Experiment 20000439 PARAMETER Experiment Name: At_Roots__P Parameter: Organism Value: A. thaliana
  misc_feature: MA Experiment 20000439 PARAMETER Experiment Name: At_Roots__P Parameter: Tissue Value: Roots vs. Whole Plant
  misc_feature: MA Experiment ID: 20000794 Result: Up-regulated in Transcription
  misc_feature: MA Experiment 20000794 PARAMETER Experiment Name: At_Petals_P Parameter: Age (day) Value: 23-25 days
  misc_feature: MA Experiment 20000794 PARAMETER Experiment Name: At_Petals_P Parameter: Plant Line Value: WS
  misc_feature: MA Experiment 20000794 PARAMETER Experiment Name: At_Petals_P Parameter: Tissue Value: Petals vs. Whole plant
  misc_feature: MA Experiment ID: 20001451 Result: Up-regulated in Transcription
  misc_feature: MA Experiment 20001451 PARAMETER Experiment Name: At_Far-red-induction_P Parameter: Age (day) Value: 7
  misc_feature: MA Experiment 20001451 PARAMETER Experiment Name: At_Far-red-induction_P Parameter: Light Value: Far-red vs. White
  misc_feature: MA Experiment 20001451 PARAMETER Experiment Name: At_Far-red-induction_P Parameter: Organism Value: A. thaliana
  misc_feature: MA Experiment 20001451 PARAMETER Experiment Name: At_Far-red-induction_P Parameter: Plant Line Value: Columbia
  misc_feature: MA Experiment 20001451 PARAMETER Experiment Name: At_Far-red-induction_P Parameter: Timepoint (hr) Value: 24
  misc_feature: MA Experiment 20001451 PARAMETER Experiment Name: At_Far-red-induction_P Parameter: Tissue Value: Whole Plant
  misc_feature: MA Experiment ID: 20001904 Result: Up-regulated in Transcription
  misc_feature: MA Experiment 20001904 PARAMETER Experiment Name: At_Drought_Reproduction_P Parameter: Age (day) Value: 37
  misc_feature: MA Experiment 20001904 PARAMETER Experiment Name: At_Drought_Reproduction_P Parameter: Organism Value: A. thaliana
  misc_feature: MA Experiment 20001904 PARAMETER Experiment Name: At_Drought_Reproduction_P Parameter: Plant Line Value: WS
  misc_feature: MA Experiment 20001904 PARAMETER Experiment Name: At_Drought_Reproduction_P Parameter: Timepoint (day) Value: 7
  misc_feature: MA Experiment 20001904 PARAMETER Experiment Name: At_Drought_Reproduction_P Parameter: Tissue Value: Rosettes
  misc_feature: MA Experiment 20001904 PARAMETER Experiment Name: At_Drought_Reproduction_P Parameter: Treatment Value: Drought vs. No Drought
ataacctttgattaatcaaacctttctctatgtgtttttccctcaaaccacatcgttgacttggatctctcattcatcttgttctgtttttgtgacctaattttacagaaacaaaatgggtgtatctgaaatttcaagatcagaggagaagagcggtataggtttcgttaaattgtttgaaaataacgttgtgtttcctggatttttggtatggatgaatcaaacaattcaagagcctcttaaggctgagttcaaaagattaaggaatgtgaaagagctaagtttgaagtcagtgtcaaagatagagactgcttatgaggagcatagagatgaagagaagttagagaagcaattacaagcttggagagataatccctcatggatagatcagcctcctaaagtggtggtgaaatcacaaaatggtttgttttgccatttaaacattgaagcagacgtaggattgcctcctgaattagtatacaacattttcactcatccagacaacaaaagatacttcaaaaacatcaaggaaaacatatcaagaaaagttttgatcgacgaagggccaaagcagaccgtggaagtgaagcaagccgcggcctggaagttcctttggtgggatggaacttgtcctatacatctcattgtcgaagaaaaccggaaaaatctcacttcaaaatataagcaagagacaacaatgttcatgaaagtgtttgagggttgttggaaagtggagccattgtttatagacgaacatttgtgtgaccgctcaaagccaaaatctcaaaaagattaccatagctgtagcaacggacgaggaaggatcggatcaaaggtgacaatggatcaaatgtttcagccttcagctcttcttactcccccgccactttcttggtacatacgtgggatcaccattaaaaccacagagagtatgatcgaagatcttttcgctgaagctactagacttcggggaggaaaaggaggaggctatattgatgatcaaggagaaaacaatgtggtaaccgagaagagcaaagctgatgacattaaggaaagatggagatcacataggagaagtaaacggaggagatttacaactgctaggtcaatgtaattgaagagactgtgattctagaatttcttgattattctggagatttgtaatgttcaagctctttacaagtttcccaaaagggatcctctgtttttaccactaacagaaactacaccttccaatagaaaaaaaaatgcattaaatctctcatatagttccctccacgttttgattgaggcttgtcct

SEQ ID NO: 36239 - protein, 332 aa, Arabidopsis thaliana
  peptide (1)..(332): Ceres Seq. ID no. 12357712
  misc_feature (168)..(268): Pfam Name: Domain of unknown function DUF220 Pfam Description: Domain of unknown function DUF220
  misc_feature (26)..(286): Homolog of NCBI NO: 15220781 NR Description: OBP32pep protein, putative; protein id:
  misc_feature (26)..(139): Homolog of NCBI NO: 8778583 NR Description: F28C11.19 [Arabidopsis thaliana]
  misc_feature (137)..(310): Homolog of NCBI NO: 8778583 NR Description: F28C11.19 [Arabidopsis thaliana]
  misc_feature (26)..(285): Homolog of NCBI NO: 15220802 NR Description: putative OBP32pep protein; protein id:
  misc_feature (32)..(283): Homolog of NCBI NO: 2129655 NR Description: hypothetical protein OBP32 - Arabidopsis thaliana
  misc_feature (32)..(325): Homolog of NCBI NO: 21592433 NR Description: unknown [Arabidopsis thaliana]
  misc_feature (32)..(325): Homolog of NCBI NO: 18409585 NR Description: expressed protein
  misc_feature (1)..(332): Homolog of NCBI NO: 21554971 NR Description: unknown [Arabidopsis thaliana]
  misc_feature (1)..(332): Homolog of NCBI NO: 8778583 NR Description: F28C11.19 [Arabidopsis thaliana]
  misc_feature (1)..(332): Homolog of NCBI NO: 18395257 NR Description: Expressed protein
MGVSEISRSEEKSGIGFVKLFENNVVFPGFLVWMNQTIQEPLKAEFKRLRNVKELSLKSVSKIETAYEEHRDEEKLEKQLQAWRDNPSWIDQPPKVVVKSQNGLFCHLNIEADVGLPPELVYNIFTHPDNKRYFKNIKENISRKVLIDEGPKQTVEVKQAAAWKFLWWDGTCPIHLIVEENRKNLTSKYKQETTMFMKVFEGCWKVEPLFIDEHLCDRSKPKSQKDYHSCSNGRGRIGSKVTMDQMFQPSALLTPPPLSWYIRGITIKTTESMIEDLFAEATRLRGGKGGGYIDDQGENNVVTEKSKADDIKERWRSHRRSKRRRFTTARSM

SEQ ID NO: 36240 - protein, 299 aa, Arabidopsis thaliana
  peptide (1)..(299): Ceres Seq. ID no. 12357713
  misc_feature (135)..(235): Pfam Name: Domain of unknown function DUF220 Pfam Description: Domain of unknown function DUF220
  misc_feature (1)..(253): Homolog of NCBI NO: 15220781 NR Description: OBP32pep protein, putative; protein id:
  misc_feature (1)..(106): Homolog of NCBI NO: 8778583 NR Description: F28C11.19 [Arabidopsis thaliana]
  misc_feature (104)..(277): Homolog of NCBI NO: 8778583 NR Description: F28C11.19 [Arabidopsis thaliana]
  misc_feature (1)..(252): Homolog of NCBI NO: 15220802 NR Description: putative OBP32pep protein; protein id:
  misc_feature (1)..(250): Homolog of NCBI NO: 2129655 NR Description: hypothetical protein OBP32 - Arabidopsis thaliana
  misc_feature (1)..(292): Homolog of NCBI NO: 21592433 NR Description: unknown [Arabidopsis thaliana]
  misc_feature (1)..(292): Homolog of NCBI NO: 18409585 NR Description: expressed protein
  misc_feature (1)..(299): Homolog of NCBI NO: 21554971 NR Description: unknown [Arabidopsis thaliana]
  misc_feature (1)..(299): Homolog of NCBI NO: 8778583 NR Description: F28C11.19 [Arabidopsis thaliana]
  misc_feature (1)..(299): Homolog of NCBI NO: 18395257 NR Description: Expressed protein
MNQTIQEPLKAEFKRLRNVKELSLKSVSKIETAYEEHRDEEKLEKQLQAWRDNPSWIDQPPKVVVKSQNGLFCHLNIEADVGLPPELVYNIFTHPDNKRYFKNIKENISRKVLIDEGPKQTVEVKQAAAWKFLWWDGTCPIHLIVEENRKNLTSKYKQETTMFMKVFEGCWKVEPLFIDEHLCDRSKPKSQKDYHSCSNGRGRIGSKVTMDQMFQPSALLTPPPLSWYIRGITIKTTESMIEDLFAEATRLRGGKGGGYIDDQGENNVVTEKSKADDIKERWRSHRRSKRRRFTTARSM

SEQ ID NO: 36241 - DNA, 904 bp, Arabidopsis thaliana
  misc_feature (1)..(904): Ceres Seq. ID no. 12323852
  misc_feature: MA Experiment ID: 108434 Result: Down-regulated in Transcription
  misc_feature: MA Experiment 108434 PARAMETER Experiment Name: At_Root_Tips_cDNA_P Parameter: Tissue Value: Root Tips
  misc_feature: MA Experiment ID: 108435 Result: Down-regulated in Transcription
  misc_feature: MA Experiment 108435 PARAMETER Experiment Name: At_stm_Mutants_cDNA_P Parameter: Plant Line Value: wt Landsburg vs stm
  misc_feature: MA Experiment 108435 PARAMETER Experiment Name: At_stm_Mutants_cDNA_P Parameter: Tissue Value: Shoot Apical Meristem Region
  misc_feature: MA Experiment ID: 108488 Result: Down-regulated in Transcription
  misc_feature: MA Experiment ID: 108574 Result: Up-regulated in Transcription
  misc_feature: MA Experiment 108574 PARAMETER Experiment Name: At_Wounding__cDNA_P Parameter: Timepoint (hr) Value: 1
  misc_feature: MA Experiment 108574 PARAMETER Experiment Name: At_Wounding__cDNA_P Parameter: Tissue Value: Aerial
  misc_feature: MA Experiment 108574 PARAMETER Experiment Name: At_Wounding__cDNA_P Parameter: Treatment Value: Wounding vs. No Wounding
  misc_feature: MA Experiment ID: 108579 Result: Up-regulated in Transcription
  misc_feature: MA Experiment 108579 PARAMETER Experiment Name: At_4deg_Cold_cDNA_P Parameter: Temperature (deg C) Value: 4 vs. 22
  misc_feature: MA Experiment 108579 PARAMETER Experiment Name: At_4deg_Cold_cDNA_P Parameter: Timepoint (hr) Value: 6
  misc_feature: MA Experiment 108579 PARAMETER Experiment Name: At_4deg_Cold_cDNA_P Parameter: Tissue Value: Aerial
  misc_feature: MA Experiment ID: 108585 Result: Up-regulated in Transcription
  misc_feature: MA Experiment 108585 PARAMETER Experiment Name: At_5mM_NaNP_cDNA_P Parameter: Timepoint (hr) Value: 6
  misc_feature: MA Experiment 108585 PARAMETER Experiment Name: At_5mM_NaNP_cDNA_P Parameter: Tissue Value: Aerial
  misc_feature: MA Experiment 108585 PARAMETER Experiment Name: At_5mM_NaNP_cDNA_P Parameter: Treatment Value: null
  misc_feature: MA Experiment ID: 108608 Result: Up-regulated in Transcription
  misc_feature: MA Experiment 108608 PARAMETER Experiment Name: At_100uM_ABA_cDNA_P Parameter: Timepoint (hr) Value: 1
  misc_feature: MA Experiment 108608 PARAMETER Experiment Name: At_100uM_ABA_cDNA_P Parameter: Tissue Value: Aerial
  misc_feature: MA Experiment 108608 PARAMETER Experiment Name: At_100uM_ABA_cDNA_P Parameter: Treatment Value: 100uM ABA vs. No Treatment
  misc_feature: MA Experiment ID: 108668 Result: Up-regulated in Transcription
  misc_feature: MA Experiment 108668 PARAMETER Experiment Name: At_2mM_SA_cDNA_P Parameter: Plant Line Value: WS
  misc_feature: MA Experiment 108668 PARAMETER Experiment Name: At_2mM_SA_cDNA_P Parameter: Timepoint (hr) Value: 6
  misc_feature: MA Experiment 108668 PARAMETER Experiment Name: At_2mM_SA_cDNA_P Parameter: Treatment Value: 2mM SA vs. No Treatment
  misc_feature: MA Experiment ID: 20000069 Result: Up-regulated in Transcription
  misc_feature: MA Experiment 20000069 PARAMETER Experiment Name: At_100uM_ABA_Mutants_cDNA_P Parameter: Plant Line Value: CS23
  misc_feature: MA Experiment 20000069 PARAMETER Experiment Name: At_100uM_ABA_Mutants_cDNA_P Parameter: Timepoint (hr) Value: 6
  misc_feature: MA Experiment 20000069 PARAMETER Experiment Name: At_100uM_ABA_Mutants_cDNA_P Parameter: Tissue Value: Aerial
  misc_feature: MA Experiment 20000069 PARAMETER Experiment Name: At_100uM_ABA_Mutants_cDNA_P Parameter: Treatment Value: 100uM ABA vs. No Treatment
  misc_feature: MA Experiment ID: 20000070 Result: Up-regulated in Transcription
  misc_feature: MA Experiment 20000070 PARAMETER Experiment Name: At_100uM_ABA_Mutants_cDNA_P Parameter: Plant Line Value: CS24
  misc_feature: MA Experiment 20000070 PARAMETER Experiment Name: At_100uM_ABA_Mutants_cDNA_P Parameter: Timepoint (hr) Value: 6
  misc_feature: MA Experiment 20000070 PARAMETER Experiment Name: At_100uM_ABA_Mutants_cDNA_P Parameter: Tissue Value: Aerial
  misc_feature: MA Experiment 20000070 PARAMETER Experiment Name: At_100uM_ABA_Mutants_cDNA_P Parameter: Treatment Value: 100uM ABA vs. No Treatment
  misc_feature: MA Experiment ID: 20000071 Result: Up-regulated in Transcription
  misc_feature: MA Experiment 20000071 PARAMETER Experiment Name: At_100uM_ABA_Mutants_cDNA_P Parameter: Plant Line Value: CS8104
  misc_feature: MA Experiment 20000071 PARAMETER Experiment Name: At_100uM_ABA_Mutants_cDNA_P Parameter: Timepoint (hr) Value: 6
  misc_feature: MA Experiment 20000071 PARAMETER Experiment Name: At_100uM_ABA_Mutants_cDNA_P Parameter: Tissue Value: Aerial
  misc_feature: MA Experiment 20000071 PARAMETER Experiment Name: At_100uM_ABA_Mutants_cDNA_P Parameter: Treatment Value: 100uM ABA vs. No Treatment
  misc_feature: MA Experiment ID: 20000072 Result: Up-regulated in Transcription
  misc_feature: MA Experiment 20000072 PARAMETER Experiment Name: At_100uM_ABA_Mutants_cDNA_P Parameter: Plant Line Value: CS8105
  misc_feature: MA Experiment 20000072 PARAMETER Experiment Name: At_100uM_ABA_Mutants_cDNA_P Parameter: Timepoint (hr) Value: 6
  misc_feature: MA Experiment 20000072 PARAMETER Experiment Name: At_100uM_ABA_Mutants_cDNA_P Parameter: Tissue Value: Aerial
  misc_feature: MA Experiment 20000072 PARAMETER Experiment Name: At_100uM_ABA_Mutants_cDNA_P Parameter: Treatment Value: 100uM ABA vs. No Treatment
  misc_feature: MA Experiment ID: 20000086 Result: Up-regulated in Transcription
  misc_feature: MA Experiment 20000086 PARAMETER Experiment Name: At_100uM_ABA_Mutants_cDNA_P Parameter: Plant Line Value: CS22
  misc_feature: MA Experiment 20000086 PARAMETER Experiment Name: At_100uM_ABA_Mutants_cDNA_P Parameter: Timepoint (hr) Value: 6
  misc_feature: MA Experiment 20000086 PARAMETER Experiment Name: At_100uM_ABA_Mutants_cDNA_P Parameter: Tissue Value: Aerial
  misc_feature: MA Experiment 20000086 PARAMETER Experiment Name: At_100uM_ABA_Mutants_cDNA_P Parameter: Treatment Value: 100uM ABA vs. No Treatment
  misc_feature: MA Experiment ID: 20000087 Result: Up-regulated in Transcription
  misc_feature: MA Experiment 20000087 PARAMETER Experiment Name: At_100uM_ABA_Mutants_cDNA_P Parameter: Plant Line Value: WS
  misc_feature: MA Experiment 20000087 PARAMETER Experiment Name: At_100uM_ABA_Mutants_cDNA_P Parameter: Timepoint (hr) Value: 6
  misc_feature: MA Experiment 20000087 PARAMETER Experiment Name: At_100uM_ABA_Mutants_cDNA_P Parameter: Tissue Value: Aerial
  misc_feature: MA Experiment 20000087 PARAMETER Experiment Name: At_100uM_ABA_Mutants_cDNA_P Parameter: Treatment Value: 100uM ABA vs. No Treatment
  misc_feature: MA Experiment ID: 20000088 Result: Up-regulated in Transcription
  misc_feature: MA Experiment 20000088 PARAMETER Experiment Name: At_100uM_ABA_Mutants_cDNA_P Parameter: Plant Line Value: Landsberg
  misc_feature: MA Experiment 20000088 PARAMETER Experiment Name: At_100uM_ABA_Mutants_cDNA_P Parameter: Timepoint (hr) Value: 6
  misc_feature: MA Experiment 20000088 PARAMETER Experiment Name: At_100uM_ABA_Mutants_cDNA_P Parameter: Tissue Value: Aerial
  misc_feature: MA Experiment 20000088 PARAMETER Experiment Name: At_100uM_ABA_Mutants_cDNA_P Parameter: Treatment Value: 100uM ABA vs. No Treatment
  misc_feature: MA Experiment ID: 20000089 Result: Up-regulated in Transcription
  misc_feature: MA Experiment ID: 20000090 Result: Up-regulated in Transcription
  misc_feature: MA Experiment ID: 20000117 Result: Up-regulated in Transcription
  misc_feature: MA Experiment 20000117 PARAMETER Experiment Name: At_100uM_ABA_Mutants_cDNA_P Parameter: Plant Line Value: Columbia
  misc_feature: MA Experiment 20000117 PARAMETER Experiment Name: At_100uM_ABA_Mutants_cDNA_P Parameter: Timepoint (hr) Value: 6
  misc_feature: MA Experiment 20000117 PARAMETER Experiment Name: At_100uM_ABA_Mutants_cDNA_P Parameter: Tissue Value: Aerial
  misc_feature: MA Experiment 20000117 PARAMETER Experiment Name: At_100uM_ABA_Mutants_cDNA_P Parameter: Treatment Value: 100uM ABA vs. No Treatment
  misc_feature: MA Experiment ID: 20000166 Result: Up-regulated in Transcription
  misc_feature: MA Experiment 20000166 PARAMETER Experiment Name: At_100uM_ABA_P Parameter: Age (day) Value: 14
  misc_feature: MA Experiment 20000166 PARAMETER Experiment Name: At_100uM_ABA_P Parameter: Organism Value: A. thaliana
  misc_feature: MA Experiment 20000166 PARAMETER Experiment Name: At_100uM_ABA_P Parameter: Plant Line Value: WS
  misc_feature: MA Experiment 20000166 PARAMETER Experiment Name: At_100uM_ABA_P Parameter: Timepoint (hr) Value: 1
  misc_feature: MA Experiment 20000166 PARAMETER Experiment Name: At_100uM_ABA_P Parameter: Tissue Value: Aerial
  misc_feature: MA Experiment 20000166 PARAMETER Experiment Name: At_100uM_ABA_P Parameter: Treatment Value: 100uM ABA vs. No Treatment
  misc_feature: MA Experiment ID: 20000182 Result: Up-regulated in Transcription
  misc_feature: MA Experiment 20000182 PARAMETER Experiment Name: At_2mM_SA_P Parameter: Age (day) Value: 14
  misc_feature: MA Experiment 20000182 PARAMETER Experiment Name: At_2mM_SA_P Parameter: Organism Value: A. thaliana
  misc_feature: MA Experiment 20000182 PARAMETER Experiment Name: At_2mM_SA_P Parameter: Plant Line Value: WS
  misc_feature: MA Experiment 20000182 PARAMETER Experiment Name: At_2mM_SA_P Parameter: Timepoint (hr) Value: 6
  misc_feature: MA Experiment 20000182 PARAMETER Experiment Name: At_2mM_SA_P Parameter: Tissue Value: Aerial
  misc_feature: MA Experiment 20000182 PARAMETER Experiment Name: At_2mM_SA_P Parameter: Treatment Value: 2mM SA vs. No Treatment
  misc_feature: MA Experiment ID: 20000184 Result: Down-regulated in Transcription
  misc_feature: MA Experiment 20000184 PARAMETER Experiment Name: At_Shoots__P Parameter: Age (day) Value: 7
  misc_feature: MA Experiment 20000184 PARAMETER Experiment Name: At_Shoots__P Parameter: Tissue Value: Shoots vs. Whole Plant
  misc_feature: MA Experiment ID: 20000213 Result: Up-regulated in Transcription
  misc_feature: MA Experiment 20000213 PARAMETER Experiment Name: At_4deg_Cold_P Parameter: Timepoint (hr) Value: 2
  misc_feature: MA Experiment ID: 20000264 Result: Up-regulated in Transcription
  misc_feature: MA Experiment 20000264 PARAMETER Experiment Name: At_Open_Flower_P Parameter: Age (day) Value: 21
  misc_feature: MA Experiment 20000264 PARAMETER Experiment Name: At_Open_Flower_P Parameter: Plant Line Value: WS
  misc_feature: MA Experiment 20000264 PARAMETER Experiment Name: At_Open_Flower_P Parameter: Tissue Value: Open Flower vs. Whole Plant
  misc_feature: MA Experiment ID: 20000437 Result: Up-regulated in Transcription
  misc_feature: MA Experiment 20000437 PARAMETER Experiment Name: At_Drought_P Parameter: Age (day) Value: 8
  misc_feature: MA Experiment 20000437 PARAMETER Experiment Name: At_Drought_P Parameter: Organism Value: A. thaliana
  misc_feature: MA Experiment 20000437 PARAMETER Experiment Name: At_Drought_P Parameter: Plant Line Value: WS
  misc_feature: MA Experiment 20000437 PARAMETER Experiment Name: At_Drought_P Parameter: Timepoint (hr) Value: 24
  misc_feature: MA Experiment 20000437 PARAMETER Experiment Name: At_Drought_P Parameter: Tissue Value: Whole Plant
  misc_feature: MA Experiment 20000437 PARAMETER Experiment Name: At_Drought_P Parameter: Treatment Value: Drought vs. No Drought
  misc_feature: MA Experiment ID: 20000439 Result: Up-regulated in Transcription
  misc_feature: MA Experiment 20000439 PARAMETER Experiment Name: At_Roots__P Parameter: Age (day) Value: 14 vs. 21
  misc_feature: MA Experiment 20000439 PARAMETER Experiment Name: At_Roots__P Parameter: Organism Value: A. thaliana
  misc_feature: MA Experiment 20000439 PARAMETER Experiment Name: At_Roots__P Parameter: Tissue Value: Roots vs. Whole Plant
  misc_feature: MA Experiment ID: 20000794 Result: Up-regulated in Transcription
  misc_feature: MA Experiment 20000794 PARAMETER Experiment Name: At_Petals_P Parameter: Age (day) Value: 23-25 days
  misc_feature: MA Experiment 20000794 PARAMETER Experiment Name: At_Petals_P Parameter: Plant Line Value: WS
  misc_feature: MA Experiment 20000794 PARAMETER Experiment Name: At_Petals_P Parameter: Tissue Value: Petals vs. Whole plant
  misc_feature: MA Experiment ID: 20001450 Result: Down-regulated in Transcription
  misc_feature: MA Experiment 20001450 PARAMETER Experiment Name: At_Far-red-induction_P Parameter: Age (day) Value: 7
  misc_feature: MA Experiment 20001450 PARAMETER Experiment Name: At_Far-red-induction_P Parameter: Light Value: Far-red vs. White
  misc_feature: MA Experiment 20001450 PARAMETER Experiment Name: At_Far-red-induction_P Parameter: Organism Value: A. thaliana
  misc_feature: MA Experiment 20001450 PARAMETER Experiment Name: At_Far-red-induction_P Parameter: Plant Line Value: Columbia
  misc_feature: MA Experiment 20001450 PARAMETER Experiment Name: At_Far-red-induction_P Parameter: Timepoint (hr) Value: 8
  misc_feature: MA Experiment 20001450 PARAMETER Experiment Name: At_Far-red-induction_P Parameter: Tissue Value: Whole Plant
  misc_feature: MA Experiment ID: 20001451 Result: Down-regulated in Transcription
  misc_feature: MA Experiment 20001451 PARAMETER Experiment Name: At_Far-red-induction_P Parameter: Age (day) Value: 7
  misc_feature: MA Experiment 20001451 PARAMETER Experiment Name: At_Far-red-induction_P Parameter: Light Value: Far-red vs. White
  misc_feature: MA Experiment 20001451 PARAMETER Experiment Name: At_Far-red-induction_P Parameter: Organism Value: A. thaliana
  misc_feature: MA Experiment 20001451 PARAMETER Experiment Name: At_Far-red-induction_P Parameter: Plant Line Value: Columbia
  misc_feature: MA Experiment 20001451 PARAMETER Experiment Name: At_Far-red-induction_P Parameter: Timepoint (hr) Value: 24
  misc_feature: MA Experiment 20001451 PARAMETER Experiment Name: At_Far-red-induction_P Parameter: Tissue Value: Whole Plant
agtgagaaaagaatcttcttttggcaaatgcttcgatcctcaattcgacttctctatataagaagaaccagtcctctgcttcgaagtttatcatcatcatcatcattatcatcaaaacgattcgattctgcgaaaccgattttcaattctcatcggactttttgtcttcctccaatctctacaacgggagctaaactttctagatcggagcattcaatggctgcttcttccgaacctaaatctctttacgatttcaccgtcaaggatgctaagggaaacgatgttgatctaagcatctacaaagggaaggttctcttgattgtgaacgttgcttctcaatgtggcttgactaattcgaattatactgagcttgcgcagctgtatgagaagtacaaaggccatggtttcgagattcttgcgtttccgtgtaaccagtttgggaatcaagagcctggtactaatgaagagattgttcagtttgcttgtactcgtttcaaggccgagtacccgattttcgacaaggttgatgttaacggtgacaaagctgccccagtctacaagtttctgaaatcaagcaaaggcgggctctttggagacggcattaagtggaacttcgcaaagttcttggttgacaaagatggaaatgttgtcgaccgtttcgcaccaactacctcccctctcagcattgagaaggatttgaagaagttgttgggagttactgcttaagcaaggcaagattgcataattagacaaataaaagctcattagtattgtattaccaatactgtgtagtaagctgagttcgtgagtgtgtgtgcctttgggaccgcgtacaattataatccgttttttagcggccaaactatgtaataatcgtaaatctaaatatcagatttccctttac

SEQ ID NO: 36242 - protein, 241 aa, Arabidopsis thaliana
  peptide (1)..(241): Ceres Seq. ID no. 12323853
  misc_feature (81)..(190): Pfam Name: Glutathione peroxidase Pfam Description: Glutathione peroxidase
  misc_feature (73)..(240): Homolog of NCBI NO: 20138384 NR Description: Probable phospholipid hydroperoxide glutathione
  misc_feature (73)..(237): Homolog of NCBI NO: 6179604 NR Description: glutathione peroxidase-like protein GPX54Hv
  misc_feature (73)..(238): Homolog of NCBI NO: 21360380 NR Description: glutathione peroxidase 1 [Oryza sativa]
  misc_feature (73)..(238): Homolog of NCBI NO: 34334012 NR Description: cytosolic glutathione peroxidase [Triticum
  misc_feature (75)..(239): Homolog of NCBI NO: 20138151 NR Description: Probable phospholipid hydroperoxide glutathione
  misc_feature (73)..(238): Homolog of NCBI NO: 22268405 NR Description: putative glutathione peroxidase [Zea mays]
  misc_feature (74)..(237): Homolog of NCBI NO: 27544804 NR Description: phospholipid hydroperoxide glutathione
  misc_feature (57)..(237): Homolog of NCBI NO: 6179600 NR Description: GPX12Hv, glutathione peroxidase-like protein
  misc_feature (73)..(241): Homolog of NCBI NO: 20138157 NR Description: Probable phospholipid hydroperoxide glutathione
  misc_feature (10)..(241): Homolog of NCBI NO: 30681827 NR Description: glutathione peroxidase, putative [Arabidopsis
SEKRIFFWQMLRSSIRLLYIRRTSPLLRSLSSSSSLSSKRFDSAKPIFNSHRTFCLPPISTTGAKLSRSEHSMAASSEPKSLYDFTVKDAKGNDVDLSIYKGKVLLIVNVASQCGLTNSNYTELAQLYEKYKGHGFEILAFPCNQFGNQEPGTNEEIVQFACTRFKAEYPIFDKVDVNGDKAAPVYKFLKSSKGGLFGDGIKWNFAKFLVDKDGNVVDRFAPTTSPLSIEKDLKKLLGVTA

SEQ ID NO: 36243 - protein, 232 aa, Arabidopsis thaliana
  peptide (1)..(232): Ceres Seq. ID no. 12323854
  misc_feature (72)..(181): Pfam Name: Glutathione peroxidase Pfam Description: Glutathione peroxidase
  misc_feature (64)..(231): Homolog of NCBI NO: 20138384 NR Description: Probable phospholipid hydroperoxide glutathione
  misc_feature (64)..(228): Homolog of NCBI NO: 6179604 NR Description: glutathione peroxidase-like protein GPX54Hv
  misc_feature (64)..(229): Homolog of NCBI NO: 21360380 NR Description: glutathione peroxidase 1 [Oryza sativa]
  misc_feature (64)..(229): Homolog of NCBI NO: 34334012 NR Description: cytosolic glutathione peroxidase [Triticum
  misc_feature (66)..(230): Homolog of NCBI NO: 20138151 NR Description: Probable phospholipid hydroperoxide glutathione
  misc_feature (64)..(229): Homolog of NCBI NO: 22268405 NR Description: putative glutathione peroxidase [Zea mays]
  misc_feature (65)..(228): Homolog of NCBI NO: 27544804 NR Description: phospholipid hydroperoxide glutathione
  misc_feature (48)..(228): Homolog of NCBI NO: 6179600 NR Description: GPX12Hv, glutathione peroxidase-like protein
  misc_feature (64)..(232): Homolog of NCBI NO: 20138157 NR Description: Probable phospholipid hydroperoxide glutathione
  misc_feature (1)..(232): Homolog of NCBI NO: 30681827 NR Description: glutathione peroxidase, putative [Arabidopsis
MLRSSIRLLYIRRTSPLLRSLSSSSSLSSKRFDSAKPIFNSHRTFCLPPISTTGAKLSRSEHSMAASSEPKSLYDFTVKDAKGNDVDLSIYKGKVLLIVNVASQCGLTNSNYTELAQLYEKYKGHGFEILAFPCNQFGNQEPGTNEEIVQFACTRFKAEYPIFDKVDVNGDKAAPVYKFLKSSKGGLFGDGIKWNFAKFLVDKDGNVVDRFAPTTSPLSIEKDLKKLLGVTA

SEQ ID NO: 36244 - protein, 169 aa, Arabidopsis thaliana
  peptide (1)..(169): Ceres Seq. ID no. 12323855
  misc_feature (9)..(118): Pfam Name: Glutathione peroxidase Pfam Description: Glutathione peroxidase
  misc_feature (1)..(168): Homolog of NCBI NO: 20138384 NR Description: Probable phospholipid hydroperoxide glutathione
  misc_feature (1)..(165): Homolog of NCBI NO: 6179604 NR Description: glutathione peroxidase-like protein GPX54Hv
  misc_feature (1)..(166): Homolog of NCBI NO: 21360380 NR Description: glutathione peroxidase 1 [Oryza sativa]
  misc_feature (1)..(166): Homolog of NCBI NO: 34334012 NR Description: cytosolic glutathione peroxidase [Triticum
  misc_feature (3)..(167): Homolog of NCBI NO: 20138151 NR Description: Probable phospholipid hydroperoxide glutathione
  misc_feature (1)..(166): Homolog of NCBI NO: 22268405 NR Description: putative glutathione peroxidase [Zea mays]
  misc_feature (2)..(165): Homolog of NCBI NO: 27544804 NR Description: phospholipid hydroperoxide glutathione
  misc_feature (1)..(165): Homolog of NCBI NO: 6179600 NR Description: GPX12Hv, glutathione peroxidase-like protein
  misc_feature (1)..(169): Homolog of NCBI NO: 20138157 NR Description: Probable phospholipid hydroperoxide glutathione
  misc_feature (1)..(169): Homolog of NCBI NO: 30681827 NR Description: glutathione peroxidase, putative [Arabidopsis
MAASSEPKSLYDFTVKDAKGNDVDLSIYKGKVLLIVNVASQCGLTNSNYTELAQLYEKYKGHGFEILAFPCNQFGNQEPGTNEEIVQFACTRFKAEYPIFDKVDVNGDKAAPVYKFLKSSKGGLFGDGIKWNFAKFLVDKDGNVVDRFAPTTSPLSIEKDLKKLLGVTA

SEQ ID NO: 36245 - DNA, 1167 bp, Arabidopsis thaliana
  misc_feature (1)..(1167): Ceres Seq. ID no. 12321925
  misc_feature: MA Experiment ID: 20000182 Result: Up-regulated in Transcription
  misc_feature: MA Experiment 20000182 PARAMETER Experiment Name: At_2mM_SA_P Parameter: Age (day) Value: 14
  misc_feature: MA Experiment 20000182 PARAMETER Experiment Name: At_2mM_SA_P Parameter: Organism Value: A. thaliana
  misc_feature: MA Experiment 20000182 PARAMETER Experiment Name: At_2mM_SA_P Parameter: Plant Line Value: WS
  misc_feature: MA Experiment 20000182 PARAMETER Experiment Name: At_2mM_SA_P Parameter: Timepoint (hr) Value: 6
  misc_feature: MA Experiment 20000182 PARAMETER Experiment Name: At_2mM_SA_P Parameter: Tissue Value: Aerial
  misc_feature: MA Experiment 20000182 PARAMETER Experiment Name: At_2mM_SA_P Parameter: Treatment Value: 2mM SA vs. No Treatment
aaaataatttgaaaggaatatgaatattccgttgaagaagacttgctcctgaaatcctttggaccgaaactcgtaaaattatttcccttcaatttctctgaaatctattcaccgtctcctttgtctcctcctccaaatcgatcgttcctcgtcgtcgtctgattttctctacgattgctttttctgtctagctcgataagataaaacaaaactaatttttgaagagtttttttttttgggtttgggagcgatgggtcaagcttttcgtaagctattcgatactttcttcggcaatcaagaaatgagggtcgttatgctggggctggatgctgctggaaaaacaactattctctacaagcttcatattggagaagttttgtctactgttcccaccattggattcaatgttgagaaagttcagtacaagaatgtgatgttcacagtttgggatgttggtggccaagagaaactgagacctctttggaggcattacttcaataaatttnaaaaacccccnttttttttggatggacttatatacgtggtggattccttagatcgagagaggatcgggaaagcaaagcaagaatttcaggagatcataaaagacccattcatgctaaacagtatcattctggtgtttgcaaacaaacaggacatgagaggagccatgtcaccgagagaagtatgtgaagggttaggcttatttgatctcaagaacaggaaatggcacatacaaggtacttgtgctcttcgtggagacgggctttatgaaggcttggactggttatcatctactcttaaggatgttaaagccgctggattcacatcggttggccactcgttttaaatcttccaggtatactttgatatcaatggccagtgtcttcttcttggctttatcacgaaatcagaatctctgaagactttttttgttaaggaaagaatgatcttctcattgtggcaatattagactccattagactatttttgaattttgatcatgctgccatgaaagcttctttgtatattctgctgatgaagagttgtatcatctgaaaaaccttctctttggggtcatctttgtccgattaagactttggtagatgtatatacattccttcgaaatcatgatatatttttttataacaattataagttttcccc

SEQ ID NO: 36246 - protein, 199 aa, Arabidopsis thaliana
  peptide (1)..(199): Ceres Seq. ID no. 12321926
  misc_feature (4)..(184): Pfam Name: ADP-ribosylation factor family Pfam Description: ADP-ribosylation factor family
  misc_feature (4)..(184): Pfam Name: ADP-ribosylation factor family Pfam Description: ADP-ribosylation factor family
  misc_feature (1)..(186): Homolog of NCBI NO: 39584902 NR Description: Hypothetical protein CBG09004 [Caenorhabditis
  misc_feature (1)..(186): Homolog of NCBI NO: 17551730 NR Description: ADP-Ribosylation Factor related ARF-1 (20.5 kD)
  misc_feature (1)..(186): Homolog of NCBI NO: 31240205 NR Description: ENSANGP00000015770 [Anopheles gambiae]
  misc_feature (1)..(186): Homolog of NCBI NO: 17136866 NR Description: ADP ribosylation factor 79F CG8385-PB
  misc_feature (1)..(188): Homolog of NCBI NO: 32401087 NR Description: ADP-ribosylation factor 1 [Aiptasia pulchella]
  misc_feature (1)..(186): Homolog of NCBI NO: 39584902 NR Description: Hypothetical protein CBG09004 [Caenorhabditis
  misc_feature (1)..(186): Homolog of NCBI NO: 31240205 NR Description: ENSANGP00000015770 [Anopheles gambiae]
  misc_feature (1)..(188): Homolog of NCBI NO: 32401087 NR Description: ADP-ribosylation factor 1 [Aiptasia pulchella]
  misc_feature (1)..(199): Homolog of NCBI NO: 15237901 NR Description: ADP-ribosylation factor -like protein
  misc_feature (1)..(199): Homolog of NCBI NO: 15228464 NR Description: putative ADP-ribosylation factor
  misc_feature (1)..(198): Homolog of NCBI NO: 37537196 NR Description: putative ADP-ribosylation factor
  misc_feature (1)..(195): Homolog of NCBI NO: 34897926 NR Description: Similar to Drosophila melanogaster
  misc_feature (1)..(186): Homolog of NCBI NO: 3182915 NR Description: ADP-RIBOSYLATION FACTOR
  misc_feature (1)..(186): Homolog of NCBI NO: 17136866 NR Description: ADP ribosylation factor 79F CG8385-PB
  misc_feature (1)..(186): Homolog of NCBI NO: 17551730 NR Description: ADP-Ribosylation Factor related ARF-1 (20.5 kD)
  misc_feature (1)..(186): Homolog of NCBI NO: 3182915 NR Description: ADP-RIBOSYLATION FACTOR
  misc_feature (1)..(195): Homolog of NCBI NO: 34897926 NR Description: Similar to Drosophila melanogaster
  misc_feature (1)..(198): Homolog of NCBI NO: 37537196 NR Description: putative ADP-ribosylation factor
  misc_feature (1)..(199): Homolog of NCBI NO: 15228464 NR Description: putative ADP-ribosylation factor
  misc_feature (1)..(199): Homolog of NCBI NO: 15237901 NR Description: ADP-ribosylation factor -like protein
  misc_feature (86)..(86): Xaa is any aa, unknown or other
  misc_feature (89)..(89): Xaa is any aa, unknown or other
MGQAFRKLFDTFFGNQEMRVVMLGLDAAGKTTILYKLHIGEVLSTVPTIGFNVEKVQYKNVMFTVWDVGGQEKLRPLWRHYFNKFXKPXFFLDGLIYVVDSLDRERIGKAKQEFQEIIKDPFMLNSIILVFANKQDMRGAMSPREVCEGLGLFDLKNRKWHIQGTCALRGDGLYEGLDWLSSTLKDVKAAGFTSVGHSF

SEQ ID NO: 36247 - protein, 182 aa, Arabidopsis thaliana
  peptide (1)..(182): Ceres Seq. ID no. 12321927
  misc_feature (1)..(167): Pfam Name: ADP-ribosylation factor family Pfam Description: ADP-ribosylation factor family
  misc_feature (1)..(167): Pfam Name: ADP-ribosylation factor family Pfam Description: ADP-ribosylation factor family
  misc_feature (1)..(169): Homolog of NCBI NO: 39584902 NR Description: Hypothetical protein CBG09004 [Caenorhabditis
  misc_feature (1)..(169): Homolog of NCBI NO: 17551730 NR Description: ADP-Ribosylation Factor related ARF-1 (20.5 kD)
  misc_feature (1)..(169): Homolog of NCBI NO: 31240205 NR Description: ENSANGP00000015770 [Anopheles gambiae]
  misc_feature (1)..(169): Homolog of NCBI NO: 17136866 NR Description: ADP ribosylation factor 79F CG8385-PB
  misc_feature (1)..(171): Homolog of NCBI NO: 32401087 NR Description: ADP-ribosylation factor 1 [Aiptasia pulchella]
  misc_feature (1)..(169): Homolog of NCBI NO: 39584902 NR Description: Hypothetical protein CBG09004 [Caenorhabditis
  misc_feature (1)..(169): Homolog of NCBI NO: 31240205 NR Description: ENSANGP00000015770 [Anopheles gambiae]
  misc_feature (1)..(171): Homolog of NCBI NO: 32401087 NR Description: ADP-ribosylation factor 1 [Aiptasia pulchella]
  misc_feature (1)..(182): Homolog of NCBI NO: 15237901 NR Description: ADP-ribosylation factor -like protein
  misc_feature (1)..(182): Homolog of NCBI NO: 15228464 NR Description: putative ADP-ribosylation factor
  misc_feature (1)..(181): Homolog of NCBI NO: 37537196 NR Description: putative ADP-ribosylation factor
  misc_feature (1)..(178): Homolog of NCBI NO: 34897926 NR Description: Similar to Drosophila melanogaster
  misc_feature (1)..(169): Homolog of NCBI NO: 3182915 NR Description: ADP-RIBOSYLATION FACTOR
  misc_feature (1)..(169): Homolog of NCBI NO: 17136866 NR Description: ADP ribosylation factor 79F CG8385-PB
  misc_feature (1)..(169): Homolog of NCBI NO: 17551730 NR Description: ADP-Ribosylation Factor related ARF-1 (20.5 kD)
  misc_feature (1)..(169): Homolog of NCBI NO: 3182915 NR Description: ADP-RIBOSYLATION FACTOR
  misc_feature (1)..(178): Homolog of NCBI NO: 34897926 NR Description: Similar to Drosophila melanogaster
  misc_feature (1)..(181): Homolog of NCBI NO: 37537196 NR Description: putative ADP-ribosylation factor
  misc_feature (1)..(182): Homolog of NCBI NO: 15228464 NR Description: putative ADP-ribosylation factor
  misc_feature (1)..(182): Homolog of NCBI NO: 15237901 NR Description: ADP-ribosylation factor -like protein
  misc_feature (69)..(69): Xaa is any aa, unknown or other
  misc_feature (72)..(72): Xaa is any aa, unknown or other
MRVVMLGLDAAGKTTILYKLHIGEVLSTVPTIGFNVEKVQYKNVMFTVWDVGGQEKLRPLWRHYFNKFXKPXFFLDGLIYVVDSLDRERIGKAKQEFQEIIKDPFMLNSIILVFANKQDMRGAMSPREVCEGLGLFDLKNRKWHIQGTCALRGDGLYEGLDWLSSTLKDVKAAGFTSVGHSF

SEQ ID NO: 36248 - protein, 178 aa, Arabidopsis thaliana
  peptide (1)..(178): Ceres Seq. ID no. 12321928
  misc_feature (1)..(163): Pfam Name: ADP-ribosylation factor family Pfam Description: ADP-ribosylation factor family
  misc_feature (1)..(163): Pfam Name: ADP-ribosylation factor family Pfam Description: ADP-ribosylation factor family
  misc_feature (1)..(165): Homolog of NCBI NO: 39584902 NR Description: Hypothetical protein CBG09004 [Caenorhabditis
  misc_feature (1)..(165): Homolog of NCBI NO: 17551730 NR Description: ADP-Ribosylation Factor related ARF-1 (20.5 kD)
  misc_feature (1)..(165): Homolog of NCBI NO: 31240205 NR Description: ENSANGP00000015770 [Anopheles gambiae]
  misc_feature (1)..(165): Homolog of NCBI NO: 17136866 NR Description: ADP ribosylation factor 79F CG8385-PB
  misc_feature (1)..(167): Homolog of NCBI NO: 32401087 NR Description: ADP-ribosylation factor 1 [Aiptasia pulchella]
  misc_feature (1)..(165): Homolog of NCBI NO: 39584902 NR Description: Hypothetical protein CBG09004 [Caenorhabditis
  misc_feature (1)..(165): Homolog of NCBI NO: 31240205 NR Description: ENSANGP00000015770 [Anopheles gambiae]
  misc_feature (1)..(167): Homolog of NCBI NO: 32401087 NR Description: ADP-ribosylation factor 1 [Aiptasia pulchella]
  misc_feature (1)..(178): Homolog of NCBI NO: 15237901 NR Description: ADP-ribosylation factor -like protein
  misc_feature (1)..(178): Homolog of NCBI NO: 15228464 NR Description: putative ADP-ribosylation factor
  misc_feature (1)..(177): Homolog of NCBI NO: 37537196 NR Description: putative ADP-ribosylation factor
  misc_feature (1)..(174): Homolog of NCBI NO: 34897926 NR Description: Similar to Drosophila melanogaster
  misc_feature (1)..(165): Homolog of NCBI NO: 3182915 NR Description: ADP-RIBOSYLATION FACTOR
  misc_feature (1)..(165): Homolog of NCBI NO: 17136866 NR Description: ADP ribosylation factor 79F CG8385-PB
  misc_feature (1)..(165): Homolog of NCBI NO: 17551730 NR Description: ADP-Ribosylation Factor related ARF-1 (20.5 kD)
  misc_feature (1)..(165): Homolog of NCBI NO: 3182915 NR Description: ADP-RIBOSYLATION FACTOR
  misc_feature (1)..(174): Homolog of NCBI NO: 34897926 NR Description: Similar to Drosophila melanogaster
  misc_feature (1)..(177): Homolog of NCBI NO: 37537196 NR Description: putative ADP-ribosylation factor
  misc_feature (1)..(178): Homolog of NCBI NO: 15228464 NR Description: putative ADP-ribosylation factor
  misc_feature (1)..(178): Homolog of NCBI NO: 15237901 NR Description: ADP-ribosylation factor -like protein
  misc_feature (65)..(65): Xaa is any aa, unknown or other
  misc_feature (68)..(68): Xaa is any aa, unknown or other
MLGLDAAGKTTILYKLHIGEVLSTVPTIGFNVEKVQYKNVMFTVWDVGGQEKLRPLWRHYFNKFXKPXFFLDGLIYVVDSLDRERIGKAKQEFQEIIKDPFMLNSIILVFANKQDMRGAMSPREVCEGLGLFDLKNRKWHIQGTCALRGDGLYEGLDWLSSTLKDVKAAGFTSVGHSF

SEQ ID NO: 36249 - DNA, 1243 bp, Arabidopsis thaliana; identical to SEQ ID NO: 22030
  misc_feature (1)..(1243): Ceres Seq. ID no. 12562371
  misc_feature: MA Experiment ID: 20000179 Result: Down-regulated in Transcription
  misc_feature: MA Experiment 20000179 PARAMETER Experiment Name: At_Germinating_Seeds_P Parameter: Age (hr) Value: 6 vs. 0
  misc_feature: MA Experiment 20000179 PARAMETER Experiment Name: At_Germinating_Seeds_P Parameter: Tissue Value: Germinating Seeds
  misc_feature: MA Experiment ID: 20000180 Result: Down-regulated in Transcription
  misc_feature: MA Experiment 20000180 PARAMETER Experiment Name: At_Germinating_Seeds_P Parameter: Age (hr) Value: 24 vs. 0
  misc_feature: MA Experiment 20000180 PARAMETER Experiment Name: At_Germinating_Seeds_P Parameter: Tissue Value: Germinating Seeds
  misc_feature: MA Experiment ID: 20000437 Result: Up-regulated in Transcription
  misc_feature: MA Experiment 20000437 PARAMETER Experiment Name: At_Drought_P Parameter: Age (day) Value: 8
  misc_feature: MA Experiment 20000437 PARAMETER Experiment Name: At_Drought_P Parameter: Organism Value: A. thaliana
  misc_feature: MA Experiment 20000437 PARAMETER Experiment Name: At_Drought_P Parameter: Plant Line Value: WS
  misc_feature: MA Experiment 20000437 PARAMETER Experiment Name: At_Drought_P Parameter: Timepoint (hr) Value: 24
  misc_feature: MA Experiment 20000437 PARAMETER Experiment Name: At_Drought_P Parameter: Tissue Value: Whole Plant
  misc_feature: MA Experiment 20000437 PARAMETER Experiment Name: At_Drought_P Parameter: Treatment Value: Drought vs. No Drought
  misc_feature: MA Experiment ID: 20001450 Result: Up-regulated in Transcription
  misc_feature: MA Experiment 20001450 PARAMETER Experiment Name: At_Far-red-induction_P Parameter: Age (day) Value: 7
  misc_feature: MA Experiment 20001450 PARAMETER Experiment Name: At_Far-red-induction_P Parameter: Light Value: Far-red vs. White
  misc_feature: MA Experiment 20001450 PARAMETER Experiment Name: At_Far-red-induction_P Parameter: Organism Value: A. thaliana
  misc_feature: MA Experiment 20001450 PARAMETER Experiment Name: At_Far-red-induction_P Parameter: Plant Line Value: Columbia
  misc_feature: MA Experiment 20001450 PARAMETER Experiment Name: At_Far-red-induction_P Parameter: Timepoint (hr) Value: 8
  misc_feature: MA Experiment 20001450 PARAMETER Experiment Name: At_Far-red-induction_P Parameter: Tissue Value: Whole Plant
  misc_feature: MA Experiment ID: 20001451 Result: Up-regulated in Transcription
  misc_feature: MA Experiment 20001451 PARAMETER Experiment Name: At_Far-red-induction_P Parameter: Age (day) Value: 7
  misc_feature: MA Experiment 20001451 PARAMETER Experiment Name: At_Far-red-induction_P Parameter: Light Value: Far-red vs. White
  misc_feature: MA Experiment 20001451 PARAMETER Experiment Name: At_Far-red-induction_P Parameter: Organism Value: A. thaliana
  misc_feature: MA Experiment 20001451 PARAMETER Experiment Name: At_Far-red-induction_P Parameter: Plant Line Value: Columbia
  misc_feature: MA Experiment 20001451 PARAMETER Experiment Name: At_Far-red-induction_P Parameter: Timepoint (hr) Value: 24
  misc_feature: MA Experiment 20001451 PARAMETER Experiment Name: At_Far-red-induction_P Parameter: Tissue Value: Whole Plant
  misc_feature: Phenotype: ROSETTE LEAVES Shape-Serrate
  misc_feature: Phenotype: ROSETTE LEAVES Shape-Serrate
  misc_feature: Phenotype: WHOLE PLANT Other
  misc_feature: Phenotype: INFLORESCENCE Flowering Time-Late Flowering
  misc_feature: Phenotype: INFLORESCENCE Height-Short
  misc_feature: Phenotype: ROSETTE LEAVES Shape-Serrate
  misc_feature: Phenotype: WHOLE PLANT Other
  misc_feature: Phenotype: ROSETTE LEAVES Shape-Serrate
  misc_feature: Phenotype: ROSETTE LEAVES Other
  misc_feature: Phenotype: WHOLE PLANT Size-Small
  misc_feature: Phenotype: WHOLE PLANT Size-Small
  misc_feature: Phenotype: WHOLE PLANT Other
  misc_feature: Phenotype: INFLORESCENCE Flowering Time-Late Flowering
  misc_feature: Phenotype: INFLORESCENCE Height-Short
  misc_feature: Phenotype: INFLORESCENCE Strength-Weak
  misc_feature: Phenotype: ROSETTE LEAVES Shape-Serrate
  misc_feature: Phenotype: WHOLE PLANT Size-Small
  misc_feature: Phenotype: WHOLE PLANT Other
  misc_feature: Phenotype: WHOLE PLANT Color-Yellow-Green Viable 2
  misc_feature: Phenotype: WHOLE PLANT Size-Small
  misc_feature: Phenotype: ROSETTE LEAVES Shape-Serrate
  misc_feature: Phenotype: WHOLE PLANT Color-Yellow-Green Viable 2
  misc_feature: Phenotype: WHOLE PLANT Size-Small
  misc_feature: Phenotype: WHOLE PLANT Size-Small
  misc_feature: Phenotype: WHOLE PLANT Color-Yellow-Green Viable 3
  misc_feature: Phenotype: WHOLE PLANT Size-Small

SEQ ID NO: 36250 - protein, 244 aa, Arabidopsis thaliana; identical to SEQ ID NO: 20888
  peptide (1)..(244): Ceres Seq. ID no. 12562372
  misc_feature (90)..(160): Pfam Name: RNA recognition motif. (a.k.a. RRM, RBD, or RNP domain) Pfam Description: RNA recognition motif. (a.k.a. RRM, RBD, or RNP
  misc_feature (90)..(160): Pfam Name: RNA recognition motif. (a.k.a. RRM, RBD, or RNP domain) Pfam Description: RNA recognition motif. (a.k.a. RRM, RBD, or RNP
  misc_feature (90)..(160): Pfam Name: RNA recognition motif. (a.k.a. RRM, RBD, or RNP domain) Pfam Description: RNA recognition motif. (a.k.a. RRM, RBD, or RNP
  misc_feature (90)..(160): Pfam Name: RNA recognition motif. (a.k.a. RRM, RBD, or RNP domain) Pfam Description: RNA recognition motif. (a.k.a. RRM, RBD, or RNP
  misc_feature (18)..(219): Homolog of NCBI NO: 30679669 NR Description: RNA and export factor binding protein, putative
  misc_feature (18)..(219): Homolog of NCBI NO: 11358209 NR Description: hypothetical protein T22P11.120 - Arabidopsis
  misc_feature (1)..(36): Homolog of NCBI NO: 30411083 NR Description: Similar to THO complex 4 [Homo sapiens]
  misc_feature (18)..(244): Homolog of NCBI NO: 30411083 NR Description: Similar to THO complex 4 [Homo sapiens]
  misc_feature (1)..(36): Homolog of NCBI NO: 6755763 NR Description: RNA and export factor binding protein 1
  misc_feature (18)..(219): Homolog of NCBI NO: 30679669 NR Description: RNA and export factor binding protein, putative
  misc_feature (1)..(36): Homolog of NCBI NO: 30411083 NR Description: Similar to THO complex 4 [Homo sapiens]
  misc_feature (1)..(36): Homolog of NCBI NO: 6755763 NR Description: RNA and export factor binding protein 1
  misc_feature (18)..(244): Homolog of NCBI NO: 30411083 NR Description: Similar to THO complex 4 [Homo sapiens]
  misc_feature (1)..(36): Homolog of NCBI NO: 30411083 NR Description: Similar to THO complex 4 [Homo sapiens]
  misc_feature (18)..(219): Homolog of NCBI NO: 11358209 NR Description: hypothetical protein T22P11.120 - Arabidopsis
  misc_feature (18)..(219): Homolog of NCBI NO: 30679669 NR Description: RNA and export factor binding protein, putative
  misc_feature (1)..(244): Homolog of NCBI NO: 30697310 NR Description: RNA and export factor binding protein, putative
  misc_feature (1)..(244): Homolog of NCBI NO: 30697313 NR Description: RNA and export factor binding protein, putative
  misc_feature (1)..(244): Homolog of NCBI NO: 21555029 NR Description: transcriptional coactivator-like protein
  misc_feature (1)..(244): Homolog of NCBI NO: 9757916 NR Description: RNA and export factor binding protein 2-I-like
  misc_feature (14)..(244): Homolog of NCBI NO: 6755763 NR Description: RNA and export factor binding protein 1
  misc_feature (1)..(244): Homolog of NCBI NO: 30697310 NR Description: RNA and export factor binding protein, putative
  misc_feature (1)..(244): Homolog of NCBI NO: 30697313 NR Description: RNA and export factor binding protein, putative
  misc_feature (1)..(244): Homolog of NCBI NO: 21555029 NR Description: transcriptional coactivator-like protein
  misc_feature (1)..(244): Homolog of NCBI NO: 9757916 NR Description: RNA and export factor binding protein 2-I-like
  misc_feature (14)..(244): Homolog of NCBI NO: 6755763 NR Description: RNA and export factor binding protein 1
  misc_feature (1)..(36): Homolog of NCBI NO: 6755763 NR Description: RNA and export factor binding protein 1
  misc_feature (18)..(244): Homolog of NCBI NO: 30411083 NR Description: Similar to THO complex 4 [Homo sapiens]
  misc_feature (1)..(36): Homolog of NCBI NO: 30411083 NR Description: Similar to THO complex 4 [Homo sapiens]
  misc_feature (18)..(219): Homolog of NCBI NO: 11358209 NR Description: hypothetical protein T22P11.120 - Arabidopsis
  misc_feature (18)..(219): Homolog of NCBI NO: 30679669 NR Description: RNA and export factor binding protein, putative
  misc_feature (1)..(244): Homolog of NCBI NO: 30697310 NR Description: RNA and export factor binding protein, putative
  misc_feature (1)..(244): Homolog of NCBI NO: 30697313 NR Description: RNA and export factor binding protein, putative
  misc_feature (1)..(244): Homolog of NCBI NO: 21555029 NR Description: transcriptional coactivator-like protein
  misc_feature (1)..(244): Homolog of NCBI NO: 9757916 NR Description: RNA and export factor binding protein 2-I-like
  misc_feature (14)..(244): Homolog of NCBI NO: 6755763 NR Description: RNA and export factor binding protein 1
  misc_feature (1)..(36): Homolog of NCBI NO: 6755763 NR Description: RNA and export factor binding protein 1
  misc_feature (18)..(244): Homolog of NCBI NO: 30411083 NR Description: Similar to THO complex 4 [Homo sapiens]
  misc_feature (18)..(219): Homolog of NCBI NO: 11358209 NR Description: hypothetical protein T22P11.120 - Arabidopsis
  misc_feature (14)..(244): Homolog of NCBI NO: 6755763 NR Description: RNA and export factor binding protein 1
  misc_feature (1)..(244): Homolog of NCBI NO: 9757916 NR Description: RNA and export factor binding protein 2-I-like
  misc_feature (1)..(244): Homolog of NCBI NO: 21555029 NR Description: transcriptional coactivator-like protein
  misc_feature (1)..(244): Homolog of NCBI NO: 30697313 NR Description: RNA and export factor binding protein, putative
  misc_feature (1)..(244): Homolog of NCBI NO: 30697310 NR Description: RNA and export factor binding protein, putative

SEQ ID NO: 36251 - protein, 238 aa, Arabidopsis thaliana; identical to SEQ ID NO: 20889
  peptide (1)..(238): Ceres Seq. ID no. 12562373
  misc_feature (84)..(154): Pfam Name: RNA recognition motif. (a.k.a. RRM, RBD, or RNP domain) Pfam Description: RNA recognition motif. (a.k.a. RRM, RBD, or RNP
  misc_feature (84)..(154): Pfam Name: RNA recognition motif. (a.k.a. RRM, RBD, or RNP domain) Pfam Description: RNA recognition motif. (a.k.a. RRM, RBD, or RNP
  misc_feature (84)..(154): Pfam Name: RNA recognition motif. (a.k.a. RRM, RBD, or RNP domain) Pfam Description: RNA recognition motif. (a.k.a. RRM, RBD, or RNP
  misc_feature (84)..(154): Pfam Name: RNA recognition motif. (a.k.a. RRM, RBD, or RNP domain) Pfam Description: RNA recognition motif. (a.k.a. RRM, RBD, or RNP
  misc_feature (12)..(213): Homolog of NCBI NO: 30679669 NR Description: RNA and export factor binding protein, putative
  misc_feature (12)..(213): Homolog of NCBI NO: 11358209 NR Description: hypothetical protein T22P11.120 - Arabidopsis
  misc_feature (1)..(30): Homolog of NCBI NO: 30411083 NR Description: Similar to THO complex 4 [Homo sapiens]
  misc_feature (12)..(238): Homolog of NCBI NO: 30411083 NR Description: Similar to THO complex 4 [Homo sapiens]
  misc_feature (1)..(30): Homolog of NCBI NO: 6755763 NR Description: RNA and export factor binding protein 1
  misc_feature (12)..(213): Homolog of NCBI NO: 30679669 NR Description: RNA and export factor binding protein, putative
  misc_feature (1)..(30): Homolog of NCBI NO: 30411083 NR Description: Similar to THO complex 4 [Homo sapiens]
  misc_feature (1)..(30): Homolog of NCBI NO: 6755763 NR Description: RNA and export factor binding protein 1
  misc_feature (12)..(238): Homolog of NCBI NO: 30411083 NR Description: Similar to THO complex 4 [Homo sapiens]
  misc_feature (1)..(30): Homolog of NCBI NO: 30411083 NR Description: Similar to THO complex 4 [Homo sapiens]
  misc_feature (12)..(213): Homolog of NCBI NO: 11358209 NR Description: hypothetical protein T22P11.120 - Arabidopsis
  misc_feature (12)..(213): Homolog of NCBI NO: 30679669 NR Description: RNA and export factor binding protein, putative
  misc_feature (1)..(238): Homolog of NCBI NO: 30697310 NR Description: RNA and export factor binding protein, putative
  misc_feature (1)..(238): Homolog of NCBI NO: 30697313 NR Description: RNA and export factor binding protein, putative
  misc_feature (1)..(238): Homolog of NCBI NO: 21555029 NR Description: transcriptional coactivator-like protein
  misc_feature (1)..(238): Homolog of NCBI NO: 9757916 NR Description: RNA and export factor binding protein 2-I-like
  misc_feature (8)..(238): Homolog of NCBI NO: 6755763 NR Description: RNA and export factor binding protein 1
  misc_feature (1)..(238): Homolog of NCBI NO: 30697310 NR Description: RNA and export factor binding protein, putative
  misc_feature (1)..(238): Homolog of NCBI NO: 30697313 NR Description: RNA and export factor binding protein, putative
  misc_feature (1)..(238): Homolog of NCBI NO: 21555029 NR Description: transcriptional coactivator-like protein
  misc_feature (1)..(238): Homolog of NCBI NO: 9757916 NR Description: RNA and export factor binding protein 2-I-like
  misc_feature (8)..(238): Homolog of NCBI NO: 6755763 NR Description: RNA and export factor binding protein 1
  misc_feature (1)..(30): Homolog of NCBI NO: 6755763 NR Description: RNA and export factor binding protein 1
  misc_feature (12)..(238): Homolog of NCBI NO: 30411083 NR Description: Similar to THO complex 4 [Homo sapiens]
  misc_feature (1)..(30): Homolog of NCBI NO: 30411083 NR Description: Similar to THO complex 4 [Homo sapiens]
  misc_feature (12)..(213): Homolog of NCBI NO: 11358209 NR Description: hypothetical protein T22P11.120 - Arabidopsis
  misc_feature (12)..(213): Homolog of NCBI NO: 30679669 NR Description: RNA and export factor binding protein, putative
  misc_feature (1)..(238): Homolog of NCBI NO: 30697310 NR Description: RNA and export factor binding protein, putative
  misc_feature (1)..(238): Homolog of NCBI NO: 30697313 NR Description: RNA and export factor binding protein, putative
  misc_feature (1)..(238): Homolog of NCBI NO: 21555029 NR Description: transcriptional coactivator-like protein
  misc_feature (1)..(238): Homolog of NCBI NO: 9757916 NR Description: RNA and export factor binding protein 2-I-like
  misc_feature (8)..(238): Homolog of NCBI NO: 6755763 NR Description: RNA and export factor binding protein 1
  misc_feature (1)..(30): Homolog of NCBI NO: 6755763 NR Description: RNA and export factor binding protein 1
  misc_feature (12)..(238): Homolog of NCBI NO: 30411083 NR Description: Similar to THO complex 4 [Homo sapiens]
  misc_feature (12)..(213): Homolog of NCBI NO: 11358209 NR Description: hypothetical protein T22P11.120 - Arabidopsis
  misc_feature (8)..(238): Homolog of NCBI NO: 6755763 NR Description: RNA and export factor binding protein 1
  misc_feature (1)..(238): Homolog of NCBI NO: 9757916 NR Description: RNA and export factor binding protein 2-I-like
  misc_feature (1)..(238): Homolog of NCBI NO: 21555029 NR Description: transcriptional coactivator-like protein
  misc_feature (1)..(238): Homolog of NCBI NO: 30697313 NR Description: RNA and export factor binding protein, putative
  misc_feature (1)..(238): Homolog of NCBI NO: 30697310 NR Description: RNA and export factor binding protein, putative

SEQ ID NO: 36252 - protein, 233 aa, Arabidopsis thaliana; identical to SEQ ID NO: 22033
  peptide (1)..(233): Ceres Seq. ID no. 12562374
  misc_feature (79)..(149): Pfam Name: RNA recognition motif. (a.k.a. RRM, RBD, or RNP domain) Pfam Description: RNA recognition motif. (a.k.a. RRM, RBD, or RNP
  misc_feature (79)..(149): Pfam Name: RNA recognition motif. (a.k.a. RRM, RBD, or RNP domain) Pfam Description: RNA recognition motif. (a.k.a. RRM, RBD, or RNP
  misc_feature (79)..(149): Pfam Name: RNA recognition motif. (a.k.a. RRM, RBD, or RNP domain) Pfam Description: RNA recognition motif. (a.k.a. RRM, RBD, or RNP
  misc_feature (79)..(149): Pfam Name: RNA recognition motif. (a.k.a. RRM, RBD, or RNP domain) Pfam Description: RNA recognition motif. (a.k.a. RRM, RBD, or RNP
  misc_feature (7)..(208): Homolog of NCBI NO: 30679669 NR Description: RNA and export factor binding protein, putative
  misc_feature (7)..(208): Homolog of NCBI NO: 11358209 NR Description: hypothetical protein T22P11.120 - Arabidopsis
  misc_feature (1)..(25): Homolog of NCBI NO: 30411083 NR Description: Similar to THO complex 4 [Homo sapiens]
  misc_feature (7)..(233): Homolog of NCBI NO: 30411083 NR Description: Similar to THO complex 4 [Homo sapiens]
  misc_feature (1)..(25): Homolog of NCBI NO: 6755763 NR Description: RNA and export factor binding protein 1
  misc_feature (7)..(208): Homolog of NCBI NO: 30679669 NR Description: RNA and export factor binding protein, putative
  misc_feature (1)..(25): Homolog of NCBI NO: 30411083 NR Description: Similar to THO complex 4 [Homo sapiens]
  misc_feature (1)..(25): Homolog of NCBI NO: 6755763 NR Description: RNA and export factor binding protein 1
  misc_feature (7)..(233): Homolog of NCBI NO: 30411083 NR Description: Similar to THO complex 4 [Homo sapiens]
  misc_feature (1)..(25): Homolog of NCBI NO: 30411083 NR Description: Similar to THO complex 4 [Homo sapiens]
  misc_feature (7)..(208): Homolog of NCBI NO: 11358209 NR Description: hypothetical protein T22P11.120 - Arabidopsis
  misc_feature (7)..(208): Homolog of NCBI NO: 30679669 NR Description: RNA and export factor binding protein, putative
  misc_feature (1)..(233): Homolog of NCBI NO: 30697310 NR Description: RNA and export factor binding protein, putative
  misc_feature (1)..(233): Homolog of NCBI NO: 30697313 NR Description: RNA and export factor binding protein, putative
  misc_feature (1)..(233): Homolog of NCBI NO: 21555029 NR Description: transcriptional coactivator-like protein
  misc_feature (1)..(233): Homolog of NCBI NO: 9757916 NR Description: RNA and export factor binding protein 2-I-like
  misc_feature (3)..(233): Homolog of NCBI NO: 6755763 NR Description: RNA and export factor binding protein 1
  misc_feature (1)..(233): Homolog of NCBI NO: 30697310 NR Description: RNA and export factor binding protein, putative
  misc_feature (1)..(233): Homolog of NCBI NO: 30697313 NR Description: RNA and export factor binding protein, putative
  misc_feature (1)..(233): Homolog of NCBI NO: 21555029 NR Description: transcriptional coactivator-like protein
  misc_feature (1)..(233): Homolog of NCBI NO: 9757916 NR Description: RNA and export factor binding protein 2-I-like
  misc_feature (3)..(233): Homolog of NCBI NO: 6755763 NR Description: RNA and export factor binding protein 1
  misc_feature (1)..(25): Homolog of NCBI NO: 6755763 NR Description: RNA and export factor binding protein 1
  misc_feature (7)..(233): Homolog of NCBI NO: 30411083 NR Description: Similar to THO complex 4 [Homo sapiens]
  misc_feature (1)..(25): Homolog of NCBI NO: 30411083 NR Description: Similar to THO complex 4 [Homo sapiens]
  misc_feature (7)..(208): Homolog of NCBI NO: 11358209 NR Description: hypothetical protein T22P11.120 - Arabidopsis
  misc_feature (7)..(208): Homolog of NCBI NO: 30679669 NR Description: RNA and export factor binding protein, putative
  misc_feature (1)..(233): Homolog of NCBI NO: 30697310 NR Description: RNA and export factor binding protein, putative
  misc_feature (1)..(233): Homolog of NCBI NO: 30697313 NR Description: RNA and export factor binding protein, putative
  misc_feature (1)..(233): Homolog of NCBI NO: 21555029 NR Description: transcriptional coactivator-like protein
  misc_feature (1)..(233): Homolog of NCBI NO: 9757916 NR Description: RNA and export factor binding protein 2-I-like
  misc_feature (3)..(233): Homolog of NCBI NO: 6755763 NR Description: RNA and export factor binding protein 1
  misc_feature (1)..(25): Homolog of NCBI NO: 6755763 NR Description: RNA and export factor binding protein 1
  misc_feature (7)..(233): Homolog of NCBI NO: 30411083 NR Description: Similar to THO complex 4 [Homo sapiens]
  misc_feature (7)..(208): Homolog of NCBI NO: 11358209 NR Description: hypothetical protein T22P11.120 - Arabidopsis
  misc_feature (3)..(233): Homolog of NCBI NO: 6755763 NR Description: RNA and export factor binding protein 1
  misc_feature (1)..(233): Homolog of NCBI NO: 9757916 NR Description: RNA and export factor binding protein 2-I-like
  misc_feature (1)..(233): Homolog of NCBI NO: 21555029 NR Description: transcriptional coactivator-like protein
  misc_feature (1)..(233): Homolog of NCBI NO: 30697313 NR Description: RNA and export factor binding protein, putative
  misc_feature (1)..(233): Homolog of NCBI NO: 30697310 NR Description: RNA and export factor binding protein, putative

SEQ ID NO: 36253 - DNA, 849 bp, Arabidopsis thaliana
  misc_feature (1)..(849): Ceres Seq. ID no. 13491481
  misc_feature: MA Experiment ID: 20000794 Result: Down-regulated in Transcription
  misc_feature: MA Experiment 20000794 PARAMETER Experiment Name: At_Petals_P Parameter: Age (day) Value: 23-25 days
  misc_feature: MA Experiment 20000794 PARAMETER Experiment Name: At_Petals_P Parameter: Plant Line Value: WS
  misc_feature: MA Experiment 20000794 PARAMETER Experiment Name: At_Petals_P Parameter: Tissue Value: Petals vs. Whole plant
  misc_feature: MA Experiment ID: 20001557 Result: Up-regulated in Transcription
  misc_feature: MA Experiment 20001557 PARAMETER Experiment Name: At_Drought_Soil_Dry_P Parameter: Age (day) Value: 27
  misc_feature: MA Experiment 20001557 PARAMETER Experiment Name: At_Drought_Soil_Dry_P Parameter: Organism Value: A. thaliana
  misc_feature: MA Experiment 20001557 PARAMETER Experiment Name: At_Drought_Soil_Dry_P Parameter: Plant Line Value: WS
  misc_feature: MA Experiment 20001557 PARAMETER Experiment Name: At_Drought_Soil_Dry_P Parameter: Post Timepoint (hr) Value: 3
  misc_feature: MA Experiment 20001557 PARAMETER Experiment Name: At_Drought_Soil_Dry_P Parameter: Post-Treatment Value: Re-Water vs. No Drought
  misc_feature: MA Experiment 20001557 PARAMETER Experiment Name: At_Drought_Soil_Dry_P Parameter: Timepoint (day) Value: 13
  misc_feature: MA Experiment 20001557 PARAMETER Experiment Name: At_Drought_Soil_Dry_P Parameter: Treatment Value: Drought vs. No Drought
  misc_feature: MA Experiment ID: 20001558 Result: Up-regulated in Transcription
  misc_feature: MA Experiment 20001558 PARAMETER Experiment Name: At_Drought_Soil_Dry_P Parameter: Age (day) Value: 27
  misc_feature: MA Experiment 20001558 PARAMETER Experiment Name: At_Drought_Soil_Dry_P Parameter: Organism Value: A. thaliana
  misc_feature: MA Experiment 20001558 PARAMETER Experiment Name: At_Drought_Soil_Dry_P Parameter: Plant Line Value: WS
  misc_feature: MA Experiment 20001558 PARAMETER Experiment Name: At_Drought_Soil_Dry_P Parameter: Post Timepoint (hr) Value: 6
  misc_feature: MA Experiment 20001558 PARAMETER Experiment Name: At_Drought_Soil_Dry_P Parameter: Post-Treatment Value: Re-Water vs. No Drought
  misc_feature: MA Experiment 20001558 PARAMETER Experiment Name: At_Drought_Soil_Dry_P Parameter: Timepoint (day) Value: 13
  misc_feature: MA Experiment 20001558 PARAMETER Experiment Name: At_Drought_Soil_Dry_P Parameter: Treatment Value: Drought vs. No Drought
  misc_feature: MA Experiment ID: 20001757 Result: Up-regulated in Transcription
  misc_feature: MA Experiment 20001757 PARAMETER Experiment Name: At_50mM_NH4NO3_L-to-H_P Parameter: Timepoint (hr) Value: 6
  misc_feature: MA Experiment 20001757 PARAMETER Experiment Name: At_50mM_NH4NO3_L-to-H_P Parameter: Tissue Value: Leaf
  misc_feature: MA Experiment 20001757 PARAMETER Experiment Name: At_50mM_NH4NO3_L-to-H_P Parameter: Treatment Value: 50mM NH4NO3 vs 100mM Mannitol
accctaaaactcagcaacaatggccgttaccttttcagatctacacacagaggagggtgtcaaatccgtggaggagcacctcgccggaaaaacctacatctccggagatcaattgtctgtggatgatgtcaaggtttacgctgccgttccagtgaaacccagcgatgccttccccaatgctagcaagtggtacgagtccgtggcttcccaacttgctaaaagtttccctggccgttggagtacaattcggtggctctgctgctgctgctccagctgttgaagctgaggcacctgcagctgcagctgatgatgatgatgacatggatctctttggtgacgagaccgaagaagaaaagaaagctgcagaggagagggaggctgctaagaaggacaccaagaagcctaaagagagtggaaagtcttctgtgctcatggatgttaagccatgggatgatgaaaccgacatgaagaaactggaagaggctgttcgtggtgttgagatgcctggtcttttctggggagcctcaaaacttgtaccagttggttatgggatcaagaaactcacaattatgttcacgattgttgatgacctcgtgtccccggacaacctcattgaagacttcctcacctcagagcctaacaacgagtacatccagagttgtgacattgtcgctttcaacaagatttagagacttcaaatttctccttaccgaaacatatcagaatttcaagttttgttttcgtttgtgttgtttaccgaaatgtttctttcctagttgcaagaccgctttcatgttacaataacactaaattttcaatggttactattccgttgcatcattgttaagg

SEQ ID NO: 36254 - protein, 174 aa, Arabidopsis thaliana
  peptide (1)..(174): Ceres Seq. ID no. 13491482
  misc_feature (85)..(174): Pfam Name: EF-1 guanine nucleotide exchange domain Pfam Description: EF-1 guanine nucleotide exchange domain
  misc_feature (31)..(174): Homolog of NCBI NO: 6166140 NR Description: ELONGATION FACTOR 1-BETA (EF-1-BETA)
  misc_feature (31)..(174): Homolog of NCBI NO: 38232568 NR Description: translational elongation factor 1 subunit Bbeta
  misc_feature (25)..(174): Homolog of NCBI NO: 6015064 NR Description: ELONGATION FACTOR 1-BETA (EF-1-BETA)
  misc_feature (23)..(174): Homolog of NCBI NO: 34899162 NR Description: putative translation elongation factor eEF-1
  misc_feature (23)..(174): Homolog of NCBI NO: 232031 NR Description: ELONGATION FACTOR 1-BETA' (EF-1-BETA')
  misc_feature (25)..(174): Homolog of NCBI NO: 232033 NR Description: ELONGATION FACTOR 1-BETA' (EF-1-BETA')
  misc_feature (23)..(174): Homolog of NCBI NO: 38175744 NR Description: putative translation elongation factor eEF-1
  misc_feature (23)..(174): Homolog of NCBI NO: 27754711 NR Description: putative elongation factor 1B alpha-subunit
  misc_feature (23)..(174): Homolog of NCBI NO: 15239877 NR Description: elongation factor 1B alpha-subunit
  misc_feature (23)..(174): Homolog of NCBI NO: 30687350 NR Description: elongation factor 1B alpha-subunit [Arabidopsis
MPSPMLASGTSPWLPNLLKVSLAVGVQFGGSAAAAPAVEAEAPAAAADDDDDMDLFGDETEEEKKAAEEREAAKKDTKKPKESGKSSVLMDVKPWDDETDMKKLEEAVRGVEMPGLFWGASKLVPVGYGIKKLTIMFTIVDDLVSPDNLIEDFLTSEPNNEYIQSCDIVAFNKI

SEQ ID NO: 36255 - protein, 170 aa, Arabidopsis thaliana
  peptide (1)..(170): Ceres Seq. ID no. 13491483
  misc_feature (81)..(170): Pfam Name: EF-1 guanine nucleotide exchange domain Pfam Description: EF-1 guanine nucleotide exchange domain
  misc_feature (27)..(170): Homolog of NCBI NO: 6166140 NR Description: ELONGATION FACTOR 1-BETA (EF-1-BETA)
  misc_feature (27)..(170): Homolog of NCBI NO: 38232568 NR Description: translational elongation factor 1 subunit Bbeta
  misc_feature (21)..(170): Homolog of NCBI NO: 6015064 NR Description: ELONGATION FACTOR 1-BETA (EF-1-BETA)
  misc_feature (19)..(170): Homolog of NCBI NO: 34899162 NR Description: putative translation elongation factor eEF-1
  misc_feature (19)..(170): Homolog of NCBI NO: 232031 NR Description: ELONGATION FACTOR 1-BETA' (EF-1-BETA')
  misc_feature (21)..(170): Homolog of NCBI NO: 232033 NR Description: ELONGATION FACTOR 1-BETA' (EF-1-BETA')
  misc_feature (19)..(170): Homolog of NCBI NO: 38175744 NR Description: putative translation elongation factor eEF-1
  misc_feature (19)..(170): Homolog of NCBI NO: 27754711 NR Description: putative elongation factor 1B alpha-subunit
  misc_feature (19)..(170): Homolog of NCBI NO: 15239877 NR Description: elongation factor 1B alpha-subunit
  misc_feature (19)..(170): Homolog of NCBI NO: 30687350 NR Description: elongation factor 1B alpha-subunit [Arabidopsis
MLASGTSPWLPNLLKVSLAVGVQFGGSAAAAPAVEAEAPAAAADDDDDMDLFGDETEEEKKAAEEREAAKKDTKKPKESGKSSVLMDVKPWDDETDMKKLEEAVRGVEMPGLFWGASKLVPVGYGIKKLTIMFTIVDDLVSPDNLIEDFLTSEPNNEYIQSCDIVAFNKI

SEQ ID NO: 36256 - protein, 122 aa, Arabidopsis thaliana
  peptide (1)..(122): Ceres Seq. ID no. 13491484
  misc_feature (33)..(122): Pfam Name: EF-1 guanine nucleotide exchange domain Pfam Description: EF-1 guanine nucleotide exchange domain
  misc_feature (1)..(122): Homolog of NCBI NO: 6166140 NR Description: ELONGATION FACTOR 1-BETA (EF-1-BETA)
  misc_feature (1)..(122): Homolog of NCBI NO: 38232568 NR Description: translational elongation factor 1 subunit Bbeta
  misc_feature (1)..(122): Homolog of NCBI NO: 6015064 NR Description: ELONGATION FACTOR 1-BETA (EF-1-BETA)
  misc_feature (1)..(122): Homolog of NCBI NO: 34899162 NR Description: putative translation elongation factor eEF-1
  misc_feature (1)..(122): Homolog of NCBI NO: 232031 NR Description: ELONGATION FACTOR 1-BETA' (EF-1-BETA')
  misc_feature (1)..(122): Homolog of NCBI NO: 232033 NR Description: ELONGATION FACTOR 1-BETA' (EF-1-BETA')
  misc_feature (1)..(122): Homolog of NCBI NO: 38175744 NR Description: putative translation elongation factor eEF-1
  misc_feature (1)..(122): Homolog of NCBI NO: 27754711 NR Description: putative elongation factor 1B alpha-subunit
  misc_feature (1)..(122): Homolog of NCBI NO: 15239877 NR Description: elongation factor 1B alpha-subunit
  misc_feature (1)..(122): Homolog of NCBI NO: 30687350 NR Description: elongation factor 1B alpha-subunit [Arabidopsis
MDLFGDETEEEKKAAEEREAAKKDTKKPKESGKSSVLMDVKPWDDETDMKKLEEAVRGVEMPGLFWGASKLVPVGYGIKKLTIMFTIVDDLVSPDNLIEDFLTSEPNNEYIQSCDIVAFNKI

SEQ ID NO: 36257 - DNA, 776 bp, Arabidopsis thaliana
  misc_feature (1)..(776): Ceres Seq. ID no. 12602631
  misc_feature: MA Experiment ID: 108434 Result: Up-regulated in Transcription
  misc_feature: MA Experiment 108434 PARAMETER Experiment Name: At_Root_Tips_cDNA_P Parameter: Tissue Value: Root Tips
  misc_feature: MA Experiment ID: 20000111 Result: Up-regulated in Transcription
  misc_feature: MA Experiment 20000111 PARAMETER Experiment Name: At_42deg_Heat_cDNA_P Parameter: Temperature (deg C) Value: 42 vs. 22
  misc_feature: MA Experiment 20000111 PARAMETER Experiment Name: At_42deg_Heat_cDNA_P Parameter: Timepoint (hr) Value: 6
  misc_feature: MA Experiment 20000111 PARAMETER Experiment Name: At_42deg_Heat_cDNA_P Parameter: Tissue Value: Aerial
  misc_feature: MA Experiment ID: 20000113 Result: Up-regulated in Transcription
  misc_feature: MA Experiment 20000113 PARAMETER Experiment Name: At_42deg_Heat_cDNA_P Parameter: Temperature (deg C) Value: 42 vs. 22
  misc_feature: MA Experiment 20000113 PARAMETER Experiment Name: At_42deg_Heat_cDNA_P Parameter: Timepoint (hr) Value: 8
  misc_feature: MA Experiment 20000113 PARAMETER Experiment Name: At_42deg_Heat_cDNA_P Parameter: Tissue Value: Aerial
  misc_feature: MA Experiment ID: 20000179 Result: Up-regulated in Transcription
  misc_feature: MA Experiment 20000179 PARAMETER Experiment Name: At_Germinating_Seeds_P Parameter: Age (hr) Value: 6 vs. 0
  misc_feature: MA Experiment 20000179 PARAMETER Experiment Name: At_Germinating_Seeds_P Parameter: Tissue Value: Germinating Seeds
  misc_feature: MA Experiment ID: 20000794 Result: Down-regulated in Transcription
  misc_feature: MA Experiment 20000794 PARAMETER Experiment Name: At_Petals_P Parameter: Age (day) Value: 23-25 days
  misc_feature: MA Experiment 20000794 PARAMETER Experiment Name: At_Petals_P Parameter: Plant Line Value: WS
  misc_feature: MA Experiment 20000794 PARAMETER Experiment Name: At_Petals_P Parameter: Tissue Value: Petals vs. Whole plant
aatcgaaaaattcgtataatttttcagtaaattatctaaccctctcgatcctctctcgcctgttgaaaaagcacgacgcaagagcaaaggatcaaaaagggaagacgaaagaagagatggatccagacgctgttgcaaaggctttcgttgagcactactactccaccttcgatgaatcgtccaggtttggtttctctataccaagaaggatccatgttgaccttcgaaggccagaagatccagggctctcagaacatcgtcgctaagctcaccggcctccctttccagcagtgtaagcacaacatcaccaccgtcgattgtcagccttctggtcccgccggtggtatgctcgtctttgtctccggcaatcttcagctcgctggtgaacaacacgctctcaagttcagccagatgttccatttgatatcgaatcagggaaactactacgtgttcaatgacatattcaggttgaactatgcctgaggaatttgatgccagaggtacatggaaccattattggaagctgaaaagagagtggtggaaagtttgggactattcaaaaactgtttgagttggttttagatttggaacattaagctttgtttcaggtggtttgctgtctgtttttattttaatcaatggagctatttgttactttgtttgagatgactccttttgttttcgggcactgaaccatgattcagtaagggtaaaacaaaagattttttgaaatacggttctcttttggaaccctttttcatgtggaaaagtttgag

SEQ ID NO: 36258 - protein, 103 aa, Arabidopsis thaliana
  peptide (1)..(103): Ceres Seq. ID no. 12602632
  misc_feature (2)..(100): Pfam Name: Nuclear transport factor 2 (NTF2) domain Pfam Description: Nuclear transport factor 2 (NTF2) domain
  misc_feature (2)..(100): Pfam Name: Nuclear transport factor 2 (NTF2) domain Pfam Description: Nuclear transport factor 2 (NTF2) domain
  misc_feature (2)..(103): Homolog of NCBI NO: 15214172 NR Description: Nuclear transport factor 2 (NTF-2)
  misc_feature (2)..(102): Homolog of NCBI NO: 25402667 NR Description: protein T23J18.22 [imported] - Arabidopsis
  misc_feature (2)..(103): Homolog of NCBI NO: 21730277 NR Description: Chain A, N77y Point Mutant Of S.Cerevisiae Ntf2
  misc_feature (2)..(103): Homolog of NCBI NO: 6320846 NR Description: May coordinate the Ran-dependent (GSP1/GSP2)
  misc_feature (2)..(102): Homolog of NCBI NO: 19114665 NR Description: nuclear transport factor, NTF2 homolog
  misc_feature (2)..(103): Homolog of NCBI NO: 15214172 NR Description: Nuclear transport factor 2 (NTF-2)
  misc_feature (2)..(103): Homolog of NCBI NO: 21730277 NR Description: Chain A, N77y Point Mutant Of S.Cerevisiae Ntf2
  misc_feature (2)..(102): Homolog of NCBI NO: 19114665 NR Description: nuclear transport factor, NTF2 homolog
  misc_feature (2)..(103): Homolog of NCBI NO: 15223491 NR Description: putative nuclear transport factor
  misc_feature (2)..(103): Homolog of NCBI NO: 15217779 NR Description: nuclear transport factor 2, putative
  misc_feature (2)..(103): Homolog of NCBI NO: 21555203 NR Description: nuclear transport factor 2, putative [Arabidopsis
  misc_feature (2)..(102): Homolog of NCBI NO: 15214179 NR Description: Nuclear transport factor 2 (NTF-2)
  misc_feature (2)..(102): Homolog of NCBI NO: 34908774 NR Description: putative Nuclear transport factor 2
  misc_feature (2)..(103): Homolog of NCBI NO: 6320846 NR Description: May coordinate the Ran-dependent (GSP1/GSP2)
  misc_feature (2)..(102): Homolog of NCBI NO: 25402667 NR Description: protein T23J18.22 [imported] - Arabidopsis
  misc_feature (2)..(102): Homolog of NCBI NO: 34908774 NR Description: putative Nuclear transport factor 2
  misc_feature (2)..(102): Homolog of NCBI NO: 15214179 NR Description: Nuclear transport factor 2 (NTF-2)
  misc_feature (2)..(103): Homolog of NCBI NO: 21555203 NR Description: nuclear transport factor 2, putative [Arabidopsis
  misc_feature (2)..(103): Homolog of NCBI NO: 15217779 NR Description: nuclear transport factor 2, putative
  misc_feature (2)..(103): Homolog of NCBI NO: 15223491 NR Description: putative nuclear transport factor
MNRPGLVSLYQEGSMLTFEGQKIQGSQNIVAKLTGLPFQQCKHNITTVDCQPSGPAGGMLVFVSGNLQLAGEQHALKFSQMFHLISNQGNYYVFNDIFRLNYA

SEQ ID NO: 36259 - protein, 89 aa, Arabidopsis thaliana
  peptide (1)..(89): Ceres Seq. ID no. 12602633
  misc_feature (1)..(86): Pfam Name: Nuclear transport factor 2 (NTF2) domain Pfam Description: Nuclear transport factor 2 (NTF2) domain
  misc_feature (1)..(86): Pfam Name: Nuclear transport factor 2 (NTF2) domain Pfam Description: Nuclear transport factor 2 (NTF2) domain
  misc_feature (1)..(89): Homolog of NCBI NO: 15214172 NR Description: Nuclear transport factor 2 (NTF-2)
  misc_feature (1)..(88): Homolog of NCBI NO: 25402667 NR Description: protein T23J18.22 [imported] - Arabidopsis
  misc_feature (1)..(89): Homolog of NCBI NO: 21730277 NR Description: Chain A, N77y Point Mutant Of S.Cerevisiae Ntf2
  misc_feature (1)..(89): Homolog of NCBI NO: 6320846 NR Description: May coordinate the Ran-dependent (GSP1/GSP2)
  misc_feature (1)..(88): Homolog of NCBI NO: 19114665 NR Description: nuclear transport factor, NTF2 homolog
  misc_feature (1)..(89): Homolog of NCBI NO: 15214172 NR Description: Nuclear transport factor 2 (NTF-2)
  misc_feature (1)..(89): Homolog of NCBI NO: 21730277 NR Description: Chain A, N77y Point Mutant Of S.Cerevisiae Ntf2
  misc_feature (1)..(88): Homolog of NCBI NO: 19114665 NR Description: nuclear transport factor, NTF2 homolog
  misc_feature (1)..(89): Homolog of NCBI NO: 15223491 NR Description: putative nuclear transport factor
  misc_feature (1)..(89): Homolog of NCBI NO: 15217779 NR Description: nuclear transport factor 2, putative
  misc_feature (1)..(89): Homolog of NCBI NO: 21555203 NR Description: nuclear transport factor 2, putative [Arabidopsis
  misc_feature (1)..(88): Homolog of NCBI NO: 15214179 NR Description: Nuclear transport factor 2 (NTF-2)
  misc_feature (1)..(88): Homolog of NCBI NO: 34908774 NR Description: putative Nuclear transport factor 2
  misc_feature (1)..(89): Homolog of NCBI NO: 6320846 NR Description: May coordinate the Ran-dependent (GSP1/GSP2)
  misc_feature (1)..(88): Homolog of NCBI NO: 25402667 NR Description: protein T23J18.22 [imported] - Arabidopsis
  misc_feature (1)..(88): Homolog of NCBI NO: 34908774 NR Description: putative Nuclear transport factor 2
  misc_feature (1)..(88): Homolog of NCBI NO: 15214179 NR Description: Nuclear transport factor 2 (NTF-2)
  misc_feature (1)..(89): Homolog of NCBI NO: 21555203 NR Description: nuclear transport factor 2, putative [Arabidopsis
  misc_feature (1)..(89): Homolog of NCBI NO: 15217779 NR Description: nuclear transport factor 2, putative
  misc_feature (1)..(89): Homolog of NCBI NO: 15223491 NR Description: putative nuclear transport factor
MLTFEGQKIQGSQNIVAKLTGLPFQQCKHNITTVDCQPSGPAGGMLVFVSGNLQLAGEQHALKFSQMFHLISNQGNYYVFNDIFRLNYA

SEQ ID NO: 36260 - protein, 87 aa, Arabidopsis thaliana
  peptide (1)..(87): Ceres Seq. ID no. 12602634
  misc_feature (39)..(57): Homolog of NCBI NO: 15214179 NR Description: Nuclear transport factor 2 (NTF-2)
  misc_feature (39)..(65): Homolog of NCBI NO: 21555203 NR Description: nuclear transport factor 2, putative [Arabidopsis
  misc_feature (38)..(65): Homolog of NCBI NO: 15217779 NR Description: nuclear transport factor 2, putative
  misc_feature (39)..(57): Homolog of NCBI NO: 15223491 NR Description: putative nuclear transport factor
  misc_feature (39)..(57): Homolog of NCBI NO: 15214179 NR Description: Nuclear transport factor 2 (NTF-2)
  misc_feature (39)..(65): Homolog of NCBI NO: 21555203 NR Description: nuclear transport factor 2, putative [Arabidopsis
  misc_feature (38)..(65): Homolog of NCBI NO: 15217779 NR Description: nuclear transport factor 2, putative
  misc_feature (39)..(57): Homolog of NCBI NO: 15223491 NR Description: putative nuclear transport factor
SKNSYNFSVNYLTLSILSRLLKKHDARAKDQKGKTKEEMDPDAVAKAFVEHYYSTFDESSRFGFSIPRRIHVDLRRPEDPGLSEHRR

SEQ ID NO: 36261 - DNA, 754 bp, Arabidopsis thaliana
  misc_feature (1)..(754): Ceres Seq. ID no. 13499502
  misc_feature: MA Experiment ID: 108434 Result: Down-regulated in Transcription
  misc_feature: MA Experiment 108434 PARAMETER Experiment Name: At_Root_Tips_cDNA_P Parameter: Tissue Value: Root Tips
  misc_feature: MA Experiment ID: 108435 Result: Down-regulated in Transcription
  misc_feature: MA Experiment 108435 PARAMETER Experiment Name: At_stm_Mutants_cDNA_P Parameter: Plant Line Value: wt Landsburg vs stm
  misc_feature: MA Experiment 108435 PARAMETER Experiment Name: At_stm_Mutants_cDNA_P Parameter: Tissue Value: Shoot Apical Meristem Region
  misc_feature: MA Experiment ID: 108501 Result: Down-regulated in Transcription
  misc_feature: MA Experiment 108501 PARAMETER Experiment Name: At_ap2_floral_buds_cDNA_P Parameter: Plant Line Value: ap2 (Ler.)
  misc_feature: MA Experiment 108501 PARAMETER Experiment Name: At_ap2_floral_buds_cDNA_P Parameter: Tissue Value: Closed Flower
  misc_feature: MA Experiment ID: 108573 Result: Up-regulated in Transcription
  misc_feature: MA Experiment 108573 PARAMETER Experiment Name: At_Drought_cDNA_P Parameter: Timepoint (hr) Value: 6
  misc_feature: MA Experiment 108573 PARAMETER Experiment Name: At_Drought_cDNA_P Parameter: Tissue Value: Aerial
  misc_feature: MA Experiment 108573 PARAMETER Experiment Name: At_Drought_cDNA_P Parameter: Treatment Value: Drought vs. No Drought
  misc_feature: MA Experiment ID: 108579 Result: Up-regulated in Transcription
  misc_feature: MA Experiment 108579 PARAMETER Experiment Name: At_4deg_Cold_cDNA_P Parameter: Temperature (deg C) Value: 4 vs. 22
  misc_feature: MA Experiment 108579 PARAMETER Experiment Name: At_4deg_Cold_cDNA_P Parameter: Timepoint (hr) Value: 6
  misc_feature: MA Experiment 108579 PARAMETER Experiment Name: At_4deg_Cold_cDNA_P Parameter: Tissue Value: Aerial
  misc_feature: MA Experiment ID: 108668 Result: Up-regulated in Transcription
  misc_feature: MA Experiment 108668 PARAMETER Experiment Name: At_2mM_SA_cDNA_P Parameter: Plant Line Value: WS
  misc_feature: MA Experiment 108668 PARAMETER Experiment Name: At_2mM_SA_cDNA_P Parameter: Timepoint (hr) Value: 6
  misc_feature: MA Experiment 108668 PARAMETER Experiment Name: At_2mM_SA_cDNA_P Parameter: Treatment Value: 2mM SA vs. No Treatment
  misc_feature: MA Experiment ID: 20000068 Result: Down-regulated in Transcription
  misc_feature: MA Experiment ID: 20000069 Result: Up-regulated in Transcription
  misc_feature: MA Experiment 20000069 PARAMETER Experiment Name: At_100uM_ABA_Mutants_cDNA_P Parameter: Plant Line Value: CS23
  misc_feature: MA Experiment 20000069 PARAMETER Experiment Name: At_100uM_ABA_Mutants_cDNA_P Parameter: Timepoint (hr) Value: 6
  misc_feature: MA Experiment 20000069 PARAMETER Experiment Name: At_100uM_ABA_Mutants_cDNA_P Parameter: Tissue Value: Aerial
  misc_feature: MA Experiment 20000069 PARAMETER Experiment Name: At_100uM_ABA_Mutants_cDNA_P Parameter: Treatment Value: 100uM ABA vs. No Treatment
  misc_feature: MA Experiment ID: 20000070 Result: Up-regulated in Transcription
  misc_feature: MA Experiment 20000070 PARAMETER Experiment Name: At_100uM_ABA_Mutants_cDNA_P Parameter: Plant Line Value: CS24
  misc_feature: MA Experiment 20000070 PARAMETER Experiment Name: At_100uM_ABA_Mutants_cDNA_P Parameter: Timepoint (hr) Value: 6
  misc_feature: MA Experiment 20000070 PARAMETER Experiment Name: At_100uM_ABA_Mutants_cDNA_P Parameter: Tissue Value: Aerial
  misc_feature: MA Experiment 20000070 PARAMETER Experiment Name: At_100uM_ABA_Mutants_cDNA_P Parameter: Treatment Value: 100uM ABA vs. No Treatment
  misc_feature: MA Experiment ID: 20000071 Result: Up-regulated in Transcription
  misc_feature: MA Experiment 20000071 PARAMETER Experiment Name: At_100uM_ABA_Mutants_cDNA_P Parameter: Plant Line Value: CS8104
  misc_feature: MA Experiment 20000071 PARAMETER Experiment Name: At_100uM_ABA_Mutants_cDNA_P Parameter: Timepoint (hr) Value: 6
  misc_feature: MA Experiment 20000071 PARAMETER Experiment Name: At_100uM_ABA_Mutants_cDNA_P Parameter: Tissue Value: Aerial
  misc_feature: MA Experiment 20000071 PARAMETER Experiment Name: At_100uM_ABA_Mutants_cDNA_P Parameter: Treatment Value: 100uM ABA vs. No Treatment
  misc_feature: MA Experiment ID: 20000072 Result: Up-regulated in Transcription
  misc_feature: MA Experiment 20000072 PARAMETER Experiment Name: At_100uM_ABA_Mutants_cDNA_P Parameter: Plant Line Value: CS8105
  misc_feature: MA Experiment 20000072 PARAMETER Experiment Name: At_100uM_ABA_Mutants_cDNA_P Parameter: Timepoint (hr) Value: 6
  misc_feature: MA Experiment 20000072 PARAMETER Experiment Name: At_100uM_ABA_Mutants_cDNA_P Parameter: Tissue Value: Aerial
  misc_feature: MA Experiment 20000072 PARAMETER Experiment Name: At_100uM_ABA_Mutants_cDNA_P Parameter: Treatment Value: 100uM ABA vs. No Treatment
  misc_feature: MA Experiment ID: 20000087 Result: Up-regulated in Transcription
  misc_feature: MA Experiment 20000087 PARAMETER Experiment Name: At_100uM_ABA_Mutants_cDNA_P Parameter: Plant Line Value: WS
  misc_feature: MA Experiment 20000087 PARAMETER Experiment Name: At_100uM_ABA_Mutants_cDNA_P Parameter: Timepoint (hr) Value: 6
  misc_feature: MA Experiment 20000087 PARAMETER Experiment Name: At_100uM_ABA_Mutants_cDNA_P Parameter: Tissue Value: Aerial
  misc_feature: MA Experiment 20000087 PARAMETER Experiment Name: At_100uM_ABA_Mutants_cDNA_P Parameter: Treatment Value: 100uM ABA vs. No Treatment
  misc_feature: MA Experiment ID: 20000088 Result: Up-regulated in Transcription
  misc_feature: MA Experiment 20000088 PARAMETER Experiment Name: At_100uM_ABA_Mutants_cDNA_P Parameter: Plant Line Value: Landsberg
  misc_feature: MA Experiment 20000088 PARAMETER Experiment Name: At_100uM_ABA_Mutants_cDNA_P Parameter: Timepoint (hr) Value: 6
  misc_feature: MA Experiment 20000088 PARAMETER Experiment Name: At_100uM_ABA_Mutants_cDNA_P Parameter: Tissue Value: Aerial
  misc_feature: MA Experiment 20000088 PARAMETER Experiment Name: At_100uM_ABA_Mutants_cDNA_P Parameter: Treatment Value: 100uM ABA vs. No Treatment
  misc_feature: MA Experiment ID: 20000089 Result: Up-regulated in Transcription
  misc_feature: MA Experiment ID: 20000093 Result: Down-regulated in Transcription
  misc_feature: MA Experiment 20000093 PARAMETER Experiment Name: At_42deg_Heat_cDNA_P Parameter: Temperature (deg C) Value: 42 vs. 22
  misc_feature: MA Experiment 20000093 PARAMETER Experiment Name: At_42deg_Heat_cDNA_P Parameter: Timepoint (hr) Value: 0.5
  misc_feature: MA Experiment 20000093 PARAMETER Experiment Name: At_42deg_Heat_cDNA_P Parameter: Tissue Value: Aerial
  misc_feature: MA Experiment ID: 20000111 Result: Down-regulated in Transcription
  misc_feature: MA Experiment 20000111 PARAMETER Experiment Name: At_42deg_Heat_cDNA_P Parameter: Temperature (deg C) Value: 42 vs. 22
  misc_feature: MA Experiment 20000111 PARAMETER Experiment Name: At_42deg_Heat_cDNA_P Parameter: Timepoint (hr) Value: 6
  misc_feature: MA Experiment 20000111 PARAMETER Experiment Name: At_42deg_Heat_cDNA_P Parameter: Tissue Value: Aerial
  misc_feature: MA Experiment ID: 20000113 Result: Down-regulated in Transcription
  misc_feature: MA Experiment 20000113 PARAMETER Experiment Name: At_42deg_Heat_cDNA_P Parameter: Temperature (deg C) Value: 42 vs. 22
  misc_feature: MA Experiment 20000113 PARAMETER Experiment Name: At_42deg_Heat_cDNA_P Parameter: Timepoint (hr) Value: 8
  misc_feature: MA Experiment 20000113 PARAMETER Experiment Name: At_42deg_Heat_cDNA_P Parameter: Tissue Value: Aerial
  misc_feature: MA Experiment ID: 20000117 Result: Up-regulated in Transcription
  misc_feature: MA Experiment 20000117 PARAMETER Experiment Name: At_100uM_ABA_Mutants_cDNA_P Parameter: Plant Line Value: Columbia
  misc_feature: MA Experiment 20000117 PARAMETER Experiment Name: At_100uM_ABA_Mutants_cDNA_P Parameter: Timepoint (hr) Value: 6
  misc_feature: MA Experiment 20000117 PARAMETER Experiment Name: At_100uM_ABA_Mutants_cDNA_P Parameter: Tissue Value: Aerial
  misc_feature: MA Experiment 20000117 PARAMETER Experiment Name: At_100uM_ABA_Mutants_cDNA_P Parameter: Treatment Value: 100uM ABA vs. No Treatment
  misc_feature: MA Experiment ID: 20000173 Result: Down-regulated in Transcription
  misc_feature: MA Experiment 20000173 PARAMETER Experiment Name: At_42deg_Heat_P Parameter: Age (day) Value: 14
  misc_feature: MA Experiment 20000173 PARAMETER Experiment Name: At_42deg_Heat_P Parameter: Organism Value: A. thaliana
  misc_feature: MA Experiment 20000173 PARAMETER Experiment Name: At_42deg_Heat_P Parameter: Plant Line Value: WS
  misc_feature: MA Experiment 20000173 PARAMETER Experiment Name: At_42deg_Heat_P Parameter: Temperature (deg C) Value: 42 vs. 22
  misc_feature: MA Experiment 20000173 PARAMETER Experiment Name: At_42deg_Heat_P Parameter: Timepoint (hr) Value: 6
  misc_feature: MA Experiment 20000173 PARAMETER Experiment Name: At_42deg_Heat_P Parameter: Tissue Value: Aerial
  misc_feature: MA Experiment ID: 20000182 Result: Up-regulated in Transcription
  misc_feature: MA Experiment 20000182 PARAMETER Experiment Name: At_2mM_SA_P Parameter: Age (day) Value: 14
  misc_feature: MA Experiment 20000182 PARAMETER Experiment Name: At_2mM_SA_P Parameter: Organism Value: A. thaliana
  misc_feature: MA Experiment 20000182 PARAMETER Experiment Name: At_2mM_SA_P Parameter: Plant Line Value: WS
  misc_feature: MA Experiment 20000182 PARAMETER Experiment Name: At_2mM_SA_P Parameter: Timepoint (hr) Value: 6
  misc_feature: MA Experiment 20000182 PARAMETER Experiment Name: At_2mM_SA_P Parameter: Tissue Value: Aerial
  misc_feature: MA Experiment 20000182 PARAMETER Experiment Name: At_2mM_SA_P Parameter: Treatment Value: 2mM SA vs. No Treatment
  misc_feature: MA Experiment ID: 20000184 Result: Down-regulated in Transcription
  misc_feature: MA Experiment 20000184 PARAMETER Experiment Name: At_Shoots__P Parameter: Age (day) Value: 7
  misc_feature: MA Experiment 20000184 PARAMETER Experiment Name: At_Shoots__P Parameter: Tissue Value: Shoots vs. Whole Plant
  misc_feature: MA Experiment ID: 20000185 Result: Down-regulated in Transcription
  misc_feature: MA Experiment 20000185 PARAMETER Experiment Name: At_Roots__P Parameter: Age (day) Value: 7 vs. 21
  misc_feature: MA Experiment 20000185 PARAMETER Experiment Name: At_Roots__P Parameter: Organism Value: A. thaliana
  misc_feature: MA Experiment 20000185 PARAMETER Experiment Name: At_Roots__P Parameter: Tissue Value: Roots vs. Whole Plant
  misc_feature: MA Experiment ID: 20000227 Result: Down-regulated in Transcription
  misc_feature: MA Experiment 20000227 PARAMETER Experiment Name: At_Root-Tips-vs-Tops_P Parameter: Tissue Value: Root Tips vs. Root Tops
  misc_feature: MA Experiment ID: 20000234 Result: Down-regulated in Transcription
  misc_feature: MA Experiment 20000234 PARAMETER Experiment Name: At_Siliques_P Parameter: Age (day) Value: 21
  misc_feature: MA Experiment 20000234 PARAMETER Experiment Name: At_Siliques_P Parameter: Organism Value: A. thaliana
  misc_feature: MA Experiment 20000234 PARAMETER Experiment Name: At_Siliques_P Parameter: Plant Line Value: WS
  misc_feature: MA Experiment 20000234 PARAMETER Experiment Name: At_Siliques_P Parameter: Tissue Value: Less Than 5mm Siliques vs. Whole Plant
  misc_feature: MA Experiment ID: 20000265 Result: Down-regulated in Transcription
  misc_feature: MA Experiment 20000265 PARAMETER Experiment Name: At_Open_Flower_P Parameter: Age (day) Value: 21
  misc_feature: MA Experiment 20000265 PARAMETER Experiment Name: At_Open_Flower_P Parameter: Plant Line Value: WS
  misc_feature: MA Experiment 20000265 PARAMETER Experiment Name: At_Open_Flower_P Parameter: Tissue Value: Closed Flower vs. Whole Plant
  misc_feature: MA Experiment ID: 20000437 Result: Up-regulated in Transcription
  misc_feature: MA Experiment 20000437 PARAMETER Experiment Name: At_Drought_P Parameter: Age (day) Value: 8
  misc_feature: MA Experiment 20000437 PARAMETER Experiment Name: At_Drought_P Parameter: Organism Value: A. thaliana
  misc_feature: MA Experiment 20000437 PARAMETER Experiment Name: At_Drought_P Parameter: Plant Line Value: WS
  misc_feature: MA Experiment 20000437 PARAMETER Experiment Name: At_Drought_P Parameter: Timepoint (hr) Value: 24
  misc_feature: MA Experiment 20000437 PARAMETER Experiment Name: At_Drought_P Parameter: Tissue Value: Whole Plant
  misc_feature: MA Experiment 20000437 PARAMETER Experiment Name: At_Drought_P Parameter: Treatment Value: Drought vs. No Drought
  misc_feature: MA Experiment ID: 20000438 Result: Down-regulated in Transcription
  misc_feature: MA Experiment 20000438 PARAMETER Experiment Name: At_Shoots__P Parameter: Age (day) Value: 14
  misc_feature: MA Experiment 20000438 PARAMETER Experiment Name: At_Shoots__P Parameter: Tissue Value: Shoots vs. Whole Plant
  misc_feature: MA Experiment ID: 20000451 Result: Down-regulated in Transcription
  misc_feature: MA Experiment 20000451 PARAMETER Experiment Name: At_CS6879_Shoots-Roots_P Parameter: Age (day) Value: 14
  misc_feature: MA Experiment 20000451 PARAMETER Experiment Name: At_CS6879_Shoots-Roots_P Parameter: Organism Value: A. thaliana
  misc_feature: MA Experiment 20000451 PARAMETER Experiment Name: At_CS6879_Shoots-Roots_P Parameter: Plant Line Value: CS6879 vs. WS
  misc_feature: MA Experiment 20000451 PARAMETER Experiment Name: At_CS6879_Shoots-Roots_P Parameter: Tissue Value: Roots
  misc_feature: MA Experiment ID: 20000573 Result: Up-regulated in Transcription
  misc_feature: MA Experiment 20000573 PARAMETER Experiment Name: At_100uM_ABA_Mutants__P Parameter: Organism Value: A. thaliana
  misc_feature: MA Experiment 20000573 PARAMETER Experiment Name: At_100uM_ABA_Mutants__P Parameter: Plant Line Value: CS22 vs. Ler wt
  misc_feature: MA Experiment 20000573 PARAMETER Experiment Name: At_100uM_ABA_Mutants__P Parameter: Timepoint (hr) Value: N/A
  misc_feature: MA Experiment 20000573 PARAMETER Experiment Name: At_100uM_ABA_Mutants__P Parameter: Tissue Value: Whole Plant
  misc_feature: MA Experiment 20000573 PARAMETER Experiment Name: At_100uM_ABA_Mutants__P Parameter: Treatment Value: None
  misc_feature: MA Experiment ID: 20000574 Result: Up-regulated in Transcription
  misc_feature: MA Experiment 20000574 PARAMETER Experiment Name: At_100uM_ABA_Mutants__P Parameter: Organism Value: A. thaliana
  misc_feature: MA Experiment 20000574 PARAMETER Experiment Name: At_100uM_ABA_Mutants__P Parameter: Plant Line Value: CS23 vs. Ler wt
  misc_feature: MA Experiment 20000574 PARAMETER Experiment Name: At_100uM_ABA_Mutants__P Parameter: Timepoint (hr) Value: N/A
  misc_feature: MA Experiment 20000574 PARAMETER Experiment Name: At_100uM_ABA_Mutants__P Parameter: Tissue Value: Whole Plant
  misc_feature: MA Experiment 20000574 PARAMETER Experiment Name: At_100uM_ABA_Mutants__P Parameter: Treatment Value: None
  misc_feature: MA Experiment ID: 20001904 Result: Up-regulated in Transcription
  misc_feature: MA Experiment 20001904 PARAMETER Experiment Name: At_Drought_Reproduction_P Parameter: Age (day) Value: 37
  misc_feature: MA Experiment 20001904 PARAMETER Experiment Name: At_Drought_Reproduction_P Parameter: Organism Value: A. thaliana
  misc_feature: MA Experiment 20001904 PARAMETER Experiment Name: At_Drought_Reproduction_P Parameter: Plant Line Value: WS
  misc_feature: MA Experiment 20001904 PARAMETER Experiment Name: At_Drought_Reproduction_P Parameter: Timepoint (day) Value: 7
  misc_feature: MA Experiment 20001904 PARAMETER Experiment Name: At_Drought_Reproduction_P Parameter: Tissue Value: Rosettes
  misc_feature: MA Experiment 20001904 PARAMETER Experiment Name: At_Drought_Reproduction_P Parameter: Treatment Value: Drought vs. No Drought
  misc_feature: MA Experiment ID: 20001905 Result: Up-regulated in Transcription
  misc_feature: MA Experiment 20001905 PARAMETER Experiment Name: At_Drought_Reproduction_P Parameter: Age (day) Value: 40
  misc_feature: MA Experiment 20001905 PARAMETER Experiment Name: At_Drought_Reproduction_P Parameter: Organism Value: A. thaliana
  misc_feature: MA Experiment 20001905 PARAMETER Experiment Name: At_Drought_Reproduction_P Parameter: Plant Line Value: WS
  misc_feature: MA Experiment 20001905 PARAMETER Experiment Name: At_Drought_Reproduction_P Parameter: Timepoint (day) Value: 10
  misc_feature: MA Experiment 20001905 PARAMETER Experiment Name: At_Drought_Reproduction_P Parameter: Tissue Value: Rosettes
  misc_feature: MA Experiment 20001905 PARAMETER Experiment Name: At_Drought_Reproduction_P Parameter: Treatment Value: Drought vs. No Drought
  misc_feature: MA Experiment ID: 20001911 Result: Up-regulated in Transcription
  misc_feature: MA Experiment 20001911 PARAMETER Experiment Name: At_Drought_Reproduction_P Parameter: Age (day) Value: 40
  misc_feature: MA Experiment 20001911 PARAMETER Experiment Name: At_Drought_Reproduction_P Parameter: Organism Value: A. thaliana
  misc_feature: MA Experiment 20001911 PARAMETER Experiment Name: At_Drought_Reproduction_P Parameter: Plant Line Value: WS
  misc_feature: MA Experiment 20001911 PARAMETER Experiment Name: At_Drought_Reproduction_P Parameter: Timepoint (day) Value: 10
  misc_feature: MA Experiment 20001911 PARAMETER Experiment Name: At_Drought_Reproduction_P Parameter: Tissue Value: Flowers
  misc_feature: MA Experiment 20001911 PARAMETER Experiment Name: At_Drought_Reproduction_P Parameter: Treatment Value: Drought vs. No Drought
gaaaaaagctctccacgcctaaaaaaaaagaaaaaagagacagaagaagaaaaagataaagaagaatcaaactttgtaaccctttagcagcaatggcgatggctttcaagatggcgacgacggggatgcgtgtgacggatgagtgtacgagttcattcatggacatgaaatggaagaaagttcatagatacatcgttttcaagatcgaagagaagtcacgtaaagtcaccgtcgataaagtcggcggcgccggtgaaagctaccacgatctcgaagattctttaccggtggatgattgtcgctacgctgtctttgatttcgactttgtcaccgtcgataactgccgcaagagcaagatcttcttcattgcatggtcaccggaggcatcaaagataagggcaaagatattgtacgcaacgtcgaaagatgggctgaggagagtgttggaagggattcactatgaacttcaagctactgatccgacggagatgggtttcgatattatccaagaccgtgccaaatagattgatcacttaagagaatatgatttgactcactttgtcaataattaacattaattaggtcatcggttaatgtttaattattgctggttagtgcttactcttttttgagtttattatccttgatcagtcttaccggcactatcctttaattatgacgtttgtgttttgattgtgttgttaaaatatttttttgtcggttaagcaaacataaaaagctacgaatttgtcct

SEQ ID NO: 36262 - protein, 143 aa, Arabidopsis thaliana
  peptide (1)..(143): Ceres Seq. ID no. 13499503
  misc_feature (16)..(143): Pfam Name: Cofilin/tropomyosin-type actin-binding protein Pfam Description: Cofilin/tropomyosin-type actin-binding protein
  misc_feature (10)..(143): Homolog of NCBI NO: 17136986 NR Description: twinstar CG4254-PA [Drosophila melanogaster]
  misc_feature (8)..(142): Homolog of NCBI NO: 21554405 NR Description: Actin-depolymerizing factor ADF-6 [Arabidopsis
  misc_feature (8)..(142): Homolog of NCBI NO: 17366768 NR Description: Actin-depolymerizing factor 1 (ADF 1)
  misc_feature (8)..(142): Homolog of NCBI NO: 18402587 NR Description: actin depolymerizing factor 6 [Arabidopsis
  misc_feature (8)..(142): Homolog of NCBI NO: 24745620 NR Description: actin depolymerizing factor 6 [Solanum tuberosum]
  misc_feature (8)..(142): Homolog of NCBI NO: 4566614 NR Description: actin depolymerizing factor [Populus x canescens]
  misc_feature (7)..(143): Homolog of NCBI NO: 7330254 NR Description: actin depolymerizing factor [Elaeis guineensis]
  misc_feature (14)..(143): Homolog of NCBI NO: 15236233 NR Description: actin depolymerizing factor - like protein
  misc_feature (12)..(143): Homolog of NCBI NO: 25295742 NR Description: actin depolymerizing factor 5 [imported] -
  misc_feature (1)..(143): Homolog of NCBI NO: 18398187 NR Description: actin depolymerizing factor 5 [Arabidopsis
MAMAFKMATTGMRVTDECTSSFMDMKWKKVHRYIVFKIEEKSRKVTVDKVGGAGESYHDLEDSLPVDDCRYAVFDFDFVTVDNCRKSKIFFIAWSPEASKIRAKILYATSKDGLRRVLEGIHYELQATDPTEMGFDIIQDRAK

SEQ ID NO: 36263 - protein, 141 aa, Arabidopsis thaliana
  peptide (1)..(141): Ceres Seq. ID no. 13499504
  misc_feature (14)..(141): Pfam Name: Cofilin/tropomyosin-type actin-binding protein Pfam Description: Cofilin/tropomyosin-type actin-binding protein
  misc_feature (8)..(141): Homolog of NCBI NO: 17136986 NR Description: twinstar CG4254-PA [Drosophila melanogaster]
  misc_feature (6)..(140): Homolog of NCBI NO: 21554405 NR Description: Actin-depolymerizing factor ADF-6 [Arabidopsis
  misc_feature (6)..(140): Homolog of NCBI NO: 17366768 NR Description: Actin-depolymerizing factor 1 (ADF 1)
  misc_feature (6)..(140): Homolog of NCBI NO: 18402587 NR Description: actin depolymerizing factor 6 [Arabidopsis
  misc_feature (6)..(140): Homolog of NCBI NO: 24745620 NR Description: actin depolymerizing factor 6 [Solanum tuberosum]
  misc_feature (6)..(140): Homolog of NCBI NO: 4566614 NR Description: actin depolymerizing factor [Populus x canescens]
  misc_feature (5)..(141): Homolog of NCBI NO: 7330254 NR Description: actin depolymerizing factor [Elaeis guineensis]
  misc_feature (12)..(141): Homolog of NCBI NO: 15236233 NR Description: actin depolymerizing factor - like protein
  misc_feature (10)..(141): Homolog of NCBI NO: 25295742 NR Description: actin depolymerizing factor 5 [imported] -
  misc_feature (1)..(141): Homolog of NCBI NO: 18398187 NR Description: actin depolymerizing factor 5 [Arabidopsis
MAFKMATTGMRVTDECTSSFMDMKWKKVHRYIVFKIEEKSRKVTVDKVGGAGESYHDLEDSLPVDDCRYAVFDFDFVTVDNCRKSKIFFIAWSPEASKIRAKILYATSKDGLRRVLEGIHYELQATDPTEMGFDIIQDRAK

SEQ ID NO: 36264 - protein, 137 aa, Arabidopsis thaliana
  peptide (1)..(137): Ceres Seq. ID no. 13499505
  misc_feature (10)..(137): Pfam Name: Cofilin/tropomyosin-type actin-binding protein Pfam Description: Cofilin/tropomyosin-type actin-binding protein
  misc_feature (4)..(137): Homolog of NCBI NO: 17136986 NR Description: twinstar CG4254-PA [Drosophila melanogaster]
  misc_feature (2)..(136): Homolog of NCBI NO: 21554405 NR Description: Actin-depolymerizing factor ADF-6 [Arabidopsis
  misc_feature (2)..(136): Homolog of NCBI NO: 17366768 NR Description: Actin-depolymerizing factor 1 (ADF 1)
  misc_feature (2)..(136): Homolog of NCBI NO: 18402587 NR Description: actin depolymerizing factor 6 [Arabidopsis
  misc_feature (2)..(136): Homolog of NCBI NO: 24745620 NR Description: actin depolymerizing factor 6 [Solanum tuberosum]
  misc_feature (2)..(136): Homolog of NCBI NO: 4566614 NR Description: actin depolymerizing factor [Populus x canescens]
  misc_feature (1)..(137): Homolog of NCBI NO: 7330254 NR Description: actin depolymerizing factor [Elaeis guineensis]
  misc_feature (8)..(137): Homolog of NCBI NO: 15236233 NR Description: actin depolymerizing factor - like protein
  misc_feature (6)..(137): Homolog of NCBI NO: 25295742 NR Description: actin depolymerizing factor 5 [imported] -
  misc_feature (1)..(137): Homolog of NCBI NO: 18398187 NR Description: actin depolymerizing factor 5 [Arabidopsis
MATTGMRVTDECTSSFMDMKWKKVHRYIVFKIEEKSRKVTVDKVGGAGESYHDLEDSLPVDDCRYAVFDFDFVTVDNCRKSKIFFIAWSPEASKIRAKILYATSKDGLRRVLEGIHYELQATDPTEMGFDIIQDRAK

SEQ ID NO: 36265 - DNA, 895 bp, Arabidopsis thaliana
  misc_feature (1)..(895): Ceres Seq. ID no. 12334166
  misc_feature: MA Experiment ID: 108435 Result: Down-regulated in Transcription
  misc_feature: MA Experiment 108435 PARAMETER Experiment Name: At_stm_Mutants_cDNA_P Parameter: Plant Line Value: wt Landsburg vs stm
  misc_feature: MA Experiment 108435 PARAMETER Experiment Name: At_stm_Mutants_cDNA_P Parameter: Tissue Value: Shoot Apical Meristem Region
  misc_feature: MA Experiment ID: 108462 Result: Up-regulated in Transcription
  misc_feature: MA Experiment 108462 PARAMETER Experiment Name: At_Germinating_Seeds_cDNA_P Parameter: Age (day) Value: 2 vs. 0
  misc_feature: MA Experiment 108462 PARAMETER Experiment Name: At_Germinating_Seeds_cDNA_P Parameter: Tissue Value: Germinating Seeds
  misc_feature: MA Experiment ID: 108464 Result: Up-regulated in Transcription
  misc_feature: MA Experiment 108464 PARAMETER Experiment Name: At_Germinating_Seeds_cDNA_P Parameter: Age (day) Value: 4 vs. 0
  misc_feature: MA Experiment 108464 PARAMETER Experiment Name: At_Germinating_Seeds_cDNA_P Parameter: Tissue Value: Germinating Seeds
  misc_feature: MA Experiment ID: 108488 Result: Up-regulated in Transcription
  misc_feature: MA Experiment ID: 20000069 Result: Down-regulated in Transcription
  misc_feature: MA Experiment 20000069 PARAMETER Experiment Name: At_100uM_ABA_Mutants_cDNA_P Parameter: Plant Line Value: CS23
  misc_feature: MA Experiment 20000069 PARAMETER Experiment Name: At_100uM_ABA_Mutants_cDNA_P Parameter: Timepoint (hr) Value: 6
  misc_feature: MA Experiment 20000069 PARAMETER Experiment Name: At_100uM_ABA_Mutants_cDNA_P Parameter: Tissue Value: Aerial
  misc_feature: MA Experiment 20000069 PARAMETER Experiment Name: At_100uM_ABA_Mutants_cDNA_P Parameter: Treatment Value: 100uM ABA vs. No Treatment
  misc_feature: MA Experiment ID: 20000070 Result: Down-regulated in Transcription
  misc_feature: MA Experiment 20000070 PARAMETER Experiment Name: At_100uM_ABA_Mutants_cDNA_P Parameter: Plant Line Value: CS24
  misc_feature: MA Experiment 20000070 PARAMETER Experiment Name: At_100uM_ABA_Mutants_cDNA_P Parameter: Timepoint (hr) Value: 6
  misc_feature: MA Experiment 20000070 PARAMETER Experiment Name: At_100uM_ABA_Mutants_cDNA_P Parameter: Tissue Value: Aerial
  misc_feature: MA Experiment 20000070 PARAMETER Experiment Name: At_100uM_ABA_Mutants_cDNA_P Parameter: Treatment Value: 100uM ABA vs. No Treatment
  misc_feature: MA Experiment ID: 20000071 Result: Down-regulated in Transcription
  misc_feature: MA Experiment 20000071 PARAMETER Experiment Name: At_100uM_ABA_Mutants_cDNA_P Parameter: Plant Line Value: CS8104
  misc_feature: MA Experiment 20000071 PARAMETER Experiment Name: At_100uM_ABA_Mutants_cDNA_P Parameter: Timepoint (hr) Value: 6
  misc_feature: MA Experiment 20000071 PARAMETER Experiment Name: At_100uM_ABA_Mutants_cDNA_P Parameter: Tissue Value: Aerial
  misc_feature: MA Experiment 20000071 PARAMETER Experiment Name: At_100uM_ABA_Mutants_cDNA_P Parameter: Treatment Value: 100uM ABA vs. No Treatment
  misc_feature: MA Experiment ID: 20000072 Result: Down-regulated in Transcription
  misc_feature: MA Experiment 20000072 PARAMETER Experiment Name: At_100uM_ABA_Mutants_cDNA_P Parameter: Plant Line Value: CS8105
  misc_feature: MA Experiment 20000072 PARAMETER Experiment Name: At_100uM_ABA_Mutants_cDNA_P Parameter: Timepoint (hr) Value: 6
  misc_feature: MA Experiment 20000072 PARAMETER Experiment Name: At_100uM_ABA_Mutants_cDNA_P Parameter: Tissue Value: Aerial
  misc_feature: MA Experiment 20000072 PARAMETER Experiment Name: At_100uM_ABA_Mutants_cDNA_P Parameter: Treatment Value: 100uM ABA vs. No Treatment
  misc_feature: MA Experiment ID: 20000086 Result: Down-regulated in Transcription
  misc_feature: MA Experiment 20000086 PARAMETER Experiment Name: At_100uM_ABA_Mutants_cDNA_P Parameter: Plant Line Value: CS22
  misc_feature: MA Experiment 20000086 PARAMETER Experiment Name: At_100uM_ABA_Mutants_cDNA_P Parameter: Timepoint (hr) Value: 6
  misc_feature: MA Experiment 20000086 PARAMETER Experiment Name: At_100uM_ABA_Mutants_cDNA_P Parameter: Tissue Value: Aerial
  misc_feature: MA Experiment 20000086 PARAMETER Experiment Name: At_100uM_ABA_Mutants_cDNA_P Parameter: Treatment Value: 100uM ABA vs. No Treatment
  misc_feature: MA Experiment ID: 20000087 Result: Down-regulated in Transcription
  misc_feature: MA Experiment 20000087 PARAMETER Experiment Name: At_100uM_ABA_Mutants_cDNA_P Parameter: Plant Line Value: WS
  misc_feature: MA Experiment 20000087 PARAMETER Experiment Name: At_100uM_ABA_Mutants_cDNA_P Parameter: Timepoint (hr) Value: 6
  misc_feature: MA Experiment 20000087 PARAMETER Experiment Name: At_100uM_ABA_Mutants_cDNA_P Parameter: Tissue Value: Aerial
  misc_feature: MA Experiment 20000087 PARAMETER Experiment Name: At_100uM_ABA_Mutants_cDNA_P Parameter: Treatment Value: 100uM ABA vs. No Treatment
  misc_feature: MA Experiment ID: 20000090 Result: Down-regulated in Transcription
  misc_feature: MA Experiment ID: 20000117 Result: Down-regulated in Transcription
  misc_feature: MA Experiment 20000117 PARAMETER Experiment Name: At_100uM_ABA_Mutants_cDNA_P Parameter: Plant Line Value: Columbia
  misc_feature: MA Experiment 20000117 PARAMETER Experiment Name: At_100uM_ABA_Mutants_cDNA_P Parameter: Timepoint (hr) Value: 6
  misc_feature: MA Experiment 20000117 PARAMETER Experiment Name: At_100uM_ABA_Mutants_cDNA_P Parameter: Tissue Value: Aerial
  misc_feature: MA Experiment 20000117 PARAMETER Experiment Name: At_100uM_ABA_Mutants_cDNA_P Parameter: Treatment Value: 100uM ABA vs. No Treatment
  misc_feature: MA Experiment ID: 20000184 Result: Up-regulated in Transcription
  misc_feature: MA Experiment 20000184 PARAMETER Experiment Name: At_Shoots__P Parameter: Age (day) Value: 7
  misc_feature: MA Experiment 20000184 PARAMETER Experiment Name: At_Shoots__P Parameter: Tissue Value: Shoots vs. Whole Plant
  misc_feature: MA Experiment ID: 20000185 Result: Down-regulated in Transcription
  misc_feature: MA Experiment 20000185 PARAMETER Experiment Name: At_Roots__P Parameter: Age (day) Value: 7 vs. 21
  misc_feature: MA Experiment 20000185 PARAMETER Experiment Name: At_Roots__P Parameter: Organism Value: A. thaliana
  misc_feature: MA Experiment 20000185 PARAMETER Experiment Name: At_Roots__P Parameter: Tissue Value: Roots vs. Whole Plant
  misc_feature: MA Experiment ID: 20000224 Result: Down-regulated in Transcription
  misc_feature: MA Experiment ID: 20000286 Result: Down-regulated in Transcription
  misc_feature: MA Experiment 20000286 PARAMETER Experiment Name: At_Open_Flower_P Parameter: Age (day) Value: 21
  misc_feature: MA Experiment 20000286 PARAMETER Experiment Name: At_Open_Flower_P Parameter: Plant Line Value: WS
  misc_feature: MA Experiment 20000286 PARAMETER Experiment Name: At_Open_Flower_P Parameter: Tissue Value: Half Open vs. Whole Plant
  misc_feature: MA Experiment ID: 20000437 Result: Down-regulated in Transcription
  misc_feature: MA Experiment 20000437 PARAMETER Experiment Name: At_Drought_P Parameter: Age (day) Value: 8
  misc_feature: MA Experiment 20000437 PARAMETER Experiment Name: At_Drought_P Parameter: Organism Value: A. thaliana
  misc_feature: MA Experiment 20000437 PARAMETER Experiment Name: At_Drought_P Parameter: Plant Line Value: WS
  misc_feature: MA Experiment 20000437 PARAMETER Experiment Name: At_Drought_P Parameter: Timepoint (hr) Value: 24
  misc_feature: MA Experiment 20000437 PARAMETER Experiment Name: At_Drought_P Parameter: Tissue Value: Whole Plant
  misc_feature: MA Experiment 20000437 PARAMETER Experiment Name: At_Drought_P Parameter: Treatment Value: Drought vs. No Drought
  misc_feature: MA Experiment ID: 20000438 Result: Up-regulated in Transcription
  misc_feature: MA Experiment 20000438 PARAMETER Experiment Name: At_Shoots__P Parameter: Age (day) Value: 14
  misc_feature: MA Experiment 20000438 PARAMETER Experiment Name: At_Shoots__P Parameter: Tissue Value: Shoots vs. Whole Plant
  misc_feature: MA Experiment ID: 20000439 Result: Down-regulated in Transcription
  misc_feature: MA Experiment 20000439 PARAMETER Experiment Name: At_Roots__P Parameter: Age (day) Value: 14 vs. 21
  misc_feature: MA Experiment 20000439 PARAMETER Experiment Name: At_Roots__P Parameter: Organism Value: A. thaliana
  misc_feature: MA Experiment 20000439 PARAMETER Experiment Name: At_Roots__P Parameter: Tissue Value: Roots vs. Whole Plant
  misc_feature: MA Experiment ID: 20001248 Result: Down-regulated in Transcription
  misc_feature: MA Experiment 20001248 PARAMETER Experiment Name: At_Far-red-induction_P Parameter: Age (day) Value: 7
  misc_feature: MA Experiment 20001248 PARAMETER Experiment Name: At_Far-red-induction_P Parameter: Light Value: Far-red vs. White
  misc_feature: MA Experiment 20001248 PARAMETER Experiment Name: At_Far-red-induction_P Parameter: Organism Value: A. thaliana
  misc_feature: MA Experiment 20001248 PARAMETER Experiment Name: At_Far-red-induction_P Parameter: Plant Line Value: Columbia
  misc_feature: MA Experiment 20001248 PARAMETER Experiment Name: At_Far-red-induction_P Parameter: Timepoint (hr) Value: 4
  misc_feature: MA Experiment 20001248 PARAMETER Experiment Name: At_Far-red-induction_P Parameter: Tissue Value: Whole Plant
  misc_feature: MA Experiment ID: 20001451 Result: Down-regulated in Transcription
  misc_feature: MA Experiment 20001451 PARAMETER Experiment Name: At_Far-red-induction_P Parameter: Age (day) Value: 7
  misc_feature: MA Experiment 20001451 PARAMETER Experiment Name: At_Far-red-induction_P Parameter: Light Value: Far-red vs. White
  misc_feature: MA Experiment 20001451 PARAMETER Experiment Name: At_Far-red-induction_P Parameter: Organism Value: A. thaliana
  misc_feature: MA Experiment 20001451 PARAMETER Experiment Name: At_Far-red-induction_P Parameter: Plant Line Value: Columbia
  misc_feature: MA Experiment 20001451 PARAMETER Experiment Name: At_Far-red-induction_P Parameter: Timepoint (hr) Value: 24
  misc_feature: MA Experiment 20001451 PARAMETER Experiment Name: At_Far-red-induction_P Parameter: Tissue Value: Whole Plant
  misc_feature: MA Experiment ID: 20001557 Result: Down-regulated in Transcription
  misc_feature: MA Experiment 20001557 PARAMETER Experiment Name: At_Drought_Soil_Dry_P Parameter: Age (day) Value: 27
  misc_feature: MA Experiment 20001557 PARAMETER Experiment Name: At_Drought_Soil_Dry_P Parameter: Organism Value: A. thaliana
  misc_feature: MA Experiment 20001557 PARAMETER Experiment Name: At_Drought_Soil_Dry_P Parameter: Plant Line Value: WS
  misc_feature: MA Experiment 20001557 PARAMETER Experiment Name: At_Drought_Soil_Dry_P Parameter: Post Timepoint (hr) Value: 3
  misc_feature: MA Experiment 20001557 PARAMETER Experiment Name: At_Drought_Soil_Dry_P Parameter: Post-Treatment Value: Re-Water vs. No Drought
  misc_feature: MA Experiment 20001557 PARAMETER Experiment Name: At_Drought_Soil_Dry_P Parameter: Timepoint (day) Value: 13
  misc_feature: MA Experiment 20001557 PARAMETER Experiment Name: At_Drought_Soil_Dry_P Parameter: Treatment Value: Drought vs. No Drought
  misc_feature: MA Experiment ID: 20001904 Result: Down-regulated in Transcription
  misc_feature: MA Experiment 20001904 PARAMETER Experiment Name: At_Drought_Reproduction_P Parameter: Age (day) Value: 37
  misc_feature: MA Experiment 20001904 PARAMETER Experiment Name: At_Drought_Reproduction_P Parameter: Organism Value: A. thaliana
  misc_feature: MA Experiment 20001904 PARAMETER Experiment Name: At_Drought_Reproduction_P Parameter: Plant Line Value: WS
  misc_feature: MA Experiment 20001904 PARAMETER Experiment Name: At_Drought_Reproduction_P Parameter: Timepoint (day) Value: 7
  misc_feature: MA Experiment 20001904 PARAMETER Experiment Name: At_Drought_Reproduction_P Parameter: Tissue Value: Rosettes
  misc_feature: MA Experiment 20001904 PARAMETER Experiment Name: At_Drought_Reproduction_P Parameter: Treatment Value: Drought vs. No Drought
  misc_feature: MA Experiment ID: 20001908 Result: Down-regulated in Transcription
  misc_feature: MA Experiment 20001908 PARAMETER Experiment Name: At_Drought_Reproduction_P Parameter: Age (day) Value: 40
  misc_feature: MA Experiment 20001908 PARAMETER Experiment Name: At_Drought_Reproduction_P Parameter: Organism Value: A. thaliana
  misc_feature: MA Experiment 20001908 PARAMETER Experiment Name: At_Drought_Reproduction_P Parameter: Plant Line Value: WS
  misc_feature: MA Experiment 20001908 PARAMETER Experiment Name: At_Drought_Reproduction_P Parameter: Timepoint (day) Value: 10
  misc_feature: MA Experiment 20001908 PARAMETER Experiment Name: At_Drought_Reproduction_P Parameter: Tissue Value: Siliques
  misc_feature: MA Experiment 20001908 PARAMETER Experiment Name: At_Drought_Reproduction_P Parameter: Treatment Value: Drought vs. No Drought
atctccacaatccccaaaattctttcaacacttgctctccattaatcttttagataataaacctaattgtttctgttttgtttttgtttctgtgagattcttccgaggcttgaagctcaatagctatggcttctctttcagtctcttcctcttcaaccatcatcgattcaagagctcctccttctcgactagcctccgcctccgcctcttctccgtcgtgcatttcacttcccacacttccgattcagtctcatacccgtgccgctaaagccactgcttactgtcggaagattgtgaggaacgttgtgacgagagctactactgaagttggtgaagctcctgccactactaccgaagctgagactactgagttacctgaaatcgtcaagactgctcaagaagcttgggagaaagtggatgacaagtacgctattggttctcttgcctttgctagtgtagtggctctttggggttctgctggaatgatttcgccaatcgataggcttccattggttcctggtgttcttgaacttgtaggcatcggttacacaggatggttcacttacaagaacctggtcttcaaaccagacagggaggctttgtttgagaaggtcaagagcacatacaaagacatattagggagcagctgaatcaaaggaggaagaagaagaagaagagcctttttgaggccattcatgaattggaatgaaggatatcaaaagaatctaacacaaaggccacgtccttccttcaatctttccttcttgtaactaaataattttcatcctttctctctctctgtctctggtcttttttagctcaaagtatcatccatttatgtcaaagtgttgtaaattcctcaagactatatatgagatgttttgtttcattttcc

SEQ ID NO: 36266 - protein, 174 aa, Arabidopsis thaliana
  peptide (1)..(174): Ceres Seq. ID no. 12334167
  misc_feature (22)..(173): Homolog of NCBI NO: 38175474 NR Description: unknown protein [Oryza sativa (japonica
  misc_feature (17)..(172): Homolog of NCBI NO: 34909746 NR Description: contains ESTs
  misc_feature (80)..(172): Homolog of NCBI NO: 21554231 NR Description: unknown [Arabidopsis thaliana]
  misc_feature (3)..(173): Homolog of NCBI NO: 18411555 NR Description: expressed protein
  misc_feature (3)..(173): Homolog of NCBI NO: 687677 NR Description: unknown
  misc_feature (80)..(172): Homolog of NCBI NO: 18403896 NR Description: expressed protein
  misc_feature (1)..(171): Homolog of NCBI NO: 37536446 NR Description: hypothetical protein [Oryza sativa (japonica
  misc_feature (27)..(174): Homolog of NCBI NO: 34393236 NR Description: unknown protein [Oryza sativa (japonica
  misc_feature (1)..(174): Homolog of NCBI NO: 18407178 NR Description: expressed protein
  misc_feature (1)..(174): Homolog of NCBI NO: 21555057 NR Description: unknown [Arabidopsis thaliana]
MASLSVSSSSTIIDSRAPPSRLASASASSPSCISLPTLPIQSHTRAAKATAYCRKIVRNVVTRATTEVGEAPATTTEAETTELPEIVKTAQEAWEKVDDKYAIGSLAFASVVALWGSAGMISPIDRLPLVPGVLELVGIGYTGWFTYKNLVFKPDREALFEKVKSTYKDILGSS

SEQ ID NO: 36267 - protein, 88 aa, Arabidopsis thaliana
  peptide (1)..(88): Ceres Seq. ID no. 12334168
SPQSPKFFQHLLSINLLDNKPNCFCFVFVSVRFFRGLKLNSYGFSFSLFLFNHHRFKSSSFSTSLRLRLFSVVHFTSHTSDSVSYPCR

SEQ ID NO: 36268 - DNA, 876 bp, Arabidopsis thaliana
  misc_feature (1)..(876): Ceres Seq. ID no. 12332877
  misc_feature: MA Experiment ID: 108488 Result: Down-regulated in Transcription
  misc_feature: MA Experiment ID: 20000068 Result: Up-regulated in Transcription
  misc_feature: MA Experiment ID: 20000070 Result: Up-regulated in Transcription
  misc_feature: MA Experiment 20000070 PARAMETER Experiment Name: At_100uM_ABA_Mutants_cDNA_P Parameter: Plant Line Value: CS24
  misc_feature: MA Experiment 20000070 PARAMETER Experiment Name: At_100uM_ABA_Mutants_cDNA_P Parameter: Timepoint (hr) Value: 6
  misc_feature: MA Experiment 20000070 PARAMETER Experiment Name: At_100uM_ABA_Mutants_cDNA_P Parameter: Tissue Value: Aerial
  misc_feature: MA Experiment 20000070 PARAMETER Experiment Name: At_100uM_ABA_Mutants_cDNA_P Parameter: Treatment Value: 100uM ABA vs. No Treatment
  misc_feature: MA Experiment ID: 20000111 Result: Up-regulated in Transcription
  misc_feature: MA Experiment 20000111 PARAMETER Experiment Name: At_42deg_Heat_cDNA_P Parameter: Temperature (deg C) Value: 42 vs. 22
  misc_feature: MA Experiment 20000111 PARAMETER Experiment Name: At_42deg_Heat_cDNA_P Parameter: Timepoint (hr) Value: 6
  misc_feature: MA Experiment 20000111 PARAMETER Experiment Name: At_42deg_Heat_cDNA_P Parameter: Tissue Value: Aerial
  misc_feature: MA Experiment ID: 20000112 Result: Up-regulated in Transcription
  misc_feature: MA Experiment 20000112 PARAMETER Experiment Name: At_42deg_Heat_cDNA_P Parameter: Temperature (deg C) Value: 42 vs. 22
  misc_feature: MA Experiment 20000112 PARAMETER Experiment Name: At_42deg_Heat_cDNA_P Parameter: Timepoint (hr) Value: 2
  misc_feature: MA Experiment 20000112 PARAMETER Experiment Name: At_42deg_Heat_cDNA_P Parameter: Tissue Value: Aerial
  misc_feature: MA Experiment ID: 20000113 Result: Up-regulated in Transcription
  misc_feature: MA Experiment 20000113 PARAMETER Experiment Name: At_42deg_Heat_cDNA_P Parameter: Temperature (deg C) Value: 42 vs. 22
  misc_feature: MA Experiment 20000113 PARAMETER Experiment Name: At_42deg_Heat_cDNA_P Parameter: Timepoint (hr) Value: 8
  misc_feature: MA Experiment 20000113 PARAMETER Experiment Name: At_42deg_Heat_cDNA_P Parameter: Tissue Value: Aerial
  misc_feature: MA Experiment ID: 20000117 Result: Up-regulated in Transcription
  misc_feature: MA Experiment 20000117 PARAMETER Experiment Name: At_100uM_ABA_Mutants_cDNA_P Parameter: Plant Line Value: Columbia
  misc_feature: MA Experiment 20000117 PARAMETER Experiment Name: At_100uM_ABA_Mutants_cDNA_P Parameter: Timepoint (hr) Value: 6
  misc_feature: MA Experiment 20000117 PARAMETER Experiment Name: At_100uM_ABA_Mutants_cDNA_P Parameter: Tissue Value: Aerial
  misc_feature: MA Experiment 20000117 PARAMETER Experiment Name: At_100uM_ABA_Mutants_cDNA_P Parameter: Treatment Value: 100uM ABA vs. No Treatment
  misc_feature: MA Experiment ID: 20000185 Result: Down-regulated in Transcription
  misc_feature: MA Experiment 20000185 PARAMETER Experiment Name: At_Roots__P Parameter: Age (day) Value: 7 vs. 21
  misc_feature: MA Experiment 20000185 PARAMETER Experiment Name: At_Roots__P Parameter: Organism Value: A. thaliana
  misc_feature: MA Experiment 20000185 PARAMETER Experiment Name: At_Roots__P Parameter: Tissue Value: Roots vs. Whole Plant
  misc_feature: MA Experiment ID: 20000224 Result: Down-regulated in Transcription
  misc_feature: MA Experiment ID: 20000438 Result: Down-regulated in Transcription
  misc_feature: MA Experiment 20000438 PARAMETER Experiment Name: At_Shoots__P Parameter: Age (day) Value: 14
  misc_feature: MA Experiment 20000438 PARAMETER Experiment Name: At_Shoots__P Parameter: Tissue Value: Shoots vs. Whole Plant
  misc_feature: MA Experiment ID: 20000527 Result: Down-regulated in Transcription
  misc_feature: MA Experiment 20000527 PARAMETER Experiment Name: At_10percent_PEG_P Parameter: Age (day) Value: 20
  misc_feature: MA Experiment 20000527 PARAMETER Experiment Name: At_10percent_PEG_P Parameter: Organism Value: A. thaliana
  misc_feature: MA Experiment 20000527 PARAMETER Experiment Name: At_10percent_PEG_P Parameter: Plant Line Value: WS
  misc_feature: MA Experiment 20000527 PARAMETER Experiment Name: At_10percent_PEG_P Parameter: Timepoint (day) Value: 20
  misc_feature: MA Experiment 20000527 PARAMETER Experiment Name: At_10percent_PEG_P Parameter: Tissue Value: Whole Plant
  misc_feature: MA Experiment 20000527 PARAMETER Experiment Name: At_10percent_PEG_P Parameter: Treatment Value: 10percent PEG vs. No Treatment
  misc_feature: MA Experiment ID: 20001555 Result: Up-regulated in Transcription
  misc_feature: MA Experiment 20001555 PARAMETER Experiment Name: At_Drought_Soil_Dry_P Parameter: Age (day) Value: 24
  misc_feature: MA Experiment 20001555 PARAMETER Experiment Name: At_Drought_Soil_Dry_P Parameter: Organism Value: A. thaliana
  misc_feature: MA Experiment 20001555 PARAMETER Experiment Name: At_Drought_Soil_Dry_P Parameter: Plant Line Value: WS
  misc_feature: MA Experiment 20001555 PARAMETER Experiment Name: At_Drought_Soil_Dry_P Parameter: Post Timepoint (hr) Value: None
  misc_feature: MA Experiment 20001555 PARAMETER Experiment Name: At_Drought_Soil_Dry_P Parameter: Post-Treatment Value: None
  misc_feature: MA Experiment 20001555 PARAMETER Experiment Name: At_Drought_Soil_Dry_P Parameter: Timepoint (day) Value: 10
  misc_feature: MA Experiment 20001555 PARAMETER Experiment Name: At_Drought_Soil_Dry_P Parameter: Treatment Value: Drought vs. No Drought
  misc_feature: MA Experiment ID: 20001904 Result: Up-regulated in Transcription
  misc_feature: MA Experiment 20001904 PARAMETER Experiment Name: At_Drought_Reproduction_P Parameter: Age (day) Value: 37
  misc_feature: MA Experiment 20001904 PARAMETER Experiment Name: At_Drought_Reproduction_P Parameter: Organism Value: A. thaliana
  misc_feature: MA Experiment 20001904 PARAMETER Experiment Name: At_Drought_Reproduction_P Parameter: Plant Line Value: WS
  misc_feature: MA Experiment 20001904 PARAMETER Experiment Name: At_Drought_Reproduction_P Parameter: Timepoint (day) Value: 7
  misc_feature: MA Experiment 20001904 PARAMETER Experiment Name: At_Drought_Reproduction_P Parameter: Tissue Value: Rosettes
  misc_feature: MA Experiment 20001904 PARAMETER Experiment Name: At_Drought_Reproduction_P Parameter: Treatment Value: Drought vs. No Drought
  misc_feature: MA Experiment ID: 20001911 Result: Up-regulated in Transcription
  misc_feature: MA Experiment 20001911 PARAMETER Experiment Name: At_Drought_Reproduction_P Parameter: Age (day) Value: 40
  misc_feature: MA Experiment 20001911 PARAMETER Experiment Name: At_Drought_Reproduction_P Parameter: Organism Value: A. thaliana
  misc_feature: MA Experiment 20001911 PARAMETER Experiment Name: At_Drought_Reproduction_P Parameter: Plant Line Value: WS
  misc_feature: MA Experiment 20001911 PARAMETER Experiment Name: At_Drought_Reproduction_P Parameter: Timepoint (day) Value: 10
  misc_feature: MA Experiment 20001911 PARAMETER Experiment Name: At_Drought_Reproduction_P Parameter: Tissue Value: Flowers
  misc_feature: MA Experiment 20001911 PARAMETER Experiment Name: At_Drought_Reproduction_P Parameter: Treatment Value: Drought vs. No Drought
atcttagtaaaatagtggagagaagaatattcttctggataccttttaatattccccaaaacttctgaatcttcttctcaatttttctcgacattttctcatcgaaagctctcttcctttccctttttggcgctcaatacaatcatgacgttagagagttacgccggcgatgttcacacggtaccacaatcggagaactcgatggaggagagaggcggcggtgagcttttcgtgccacctcttaacttcgctatggtcgataatggaattttccgttctggttttcctgaacccgtcagtttcagctttctccagtctttgcgtctcaaatccatcatatatttgtgtcctgaggcatatccagaggtgaatagagagtttgcaaaatcaaatgggatccaagtttttcaatttggaattgaaagatgcaaggaaccatttgttaatatccctgacgaggtaatccgagaagccttacaagtacttctagatacagagaatcatcctgtcttgattcattgcaaaagtggaaagcatcggacgggatgtcttgtaggttgtgtgaggaagattcaaagatggtgtttgtcttctatcttcgacgagtaccaaagattcgcagctgcgaaagctagaatctcagaccagagattcatggagctctttgacatctccaatctaaagcatacaccactttccttctcatgctccaagaggtatactaatactattgattactgaagaaaaaaatgtataactttgtgttgaatgcaacttgtagttttgaagctagatgaaaatgggagattttgatctttcaataaaagtccgtttattccaaatcaaataaataaaaattggatcggatggttgtag

SEQ ID NO: 36269 - protein, 198 aa, Arabidopsis thaliana
  peptide (1)..(198): Ceres Seq. ID no. 12332878
  misc_feature (29)..(191): Pfam Name: Tyrosine phosphatase family Pfam Description: Tyrosine phosphatase family
  misc_feature (30)..(180): Homolog of NCBI NO: 6324296 NR Description: Synthetic interaction with Whi2; Siw14p
  misc_feature (20)..(180): Homolog of NCBI NO: 15237359 NR Description: putative protein
  misc_feature (20)..(180): Homolog of NCBI NO: 21553927 NR Description: unknown [Arabidopsis thaliana]
  misc_feature (26)..(185): Homolog of NCBI NO: 15232985 NR Description: unknown protein; protein id: At3g02800.1
  misc_feature (14)..(96): Homolog of NCBI NO: 30102538 NR Description: At2g32960 [Arabidopsis thaliana]
  misc_feature (91)..(191): Homolog of NCBI NO: 30102538 NR Description: At2g32960 [Arabidopsis thaliana]
  misc_feature (14)..(191): Homolog of NCBI NO: 15225761 NR Description: unknown protein; protein id: At2g32960.1
  misc_feature (1)..(191): Homolog of NCBI NO: 15220383 NR Description: unkown protein; protein id: At1g05000.1
  misc_feature (1)..(194): Homolog of NCBI NO: 7487406 NR Description: hypothetical protein T24M8.4 - Arabidopsis
  misc_feature (1)..(198): Homolog of NCBI NO: 18412419 NR Description: putative protein
MTLESYAGDVHTVPQSENSMEERGGGELFVPPLNFAMVDNGIFRSGFPEPVSFSFLQSLRLKSIIYLCPEAYPEVNREFAKSNGIQVFQFGIERCKEPFVNIPDEVIREALQVLLDTENHPVLIHCKSGKHRTGCLVGCVRKIQRWCLSSIFDEYQRFAAAKARISDQRFMELFDISNLKHTPLSFSCSKRYTNTIDY

SEQ ID NO: 36270 - protein, 179 aa, Arabidopsis thaliana
  peptide (1)..(179): Ceres Seq. ID no. 12332879
  misc_feature (10)..(172): Pfam Name: Tyrosine phosphatase family Pfam Description: Tyrosine phosphatase family
  misc_feature (11)..(161): Homolog of NCBI NO: 6324296 NR Description: Synthetic interaction with Whi2; Siw14p
  misc_feature (1)..(161): Homolog of NCBI NO: 15237359 NR Description: putative protein
  misc_feature (1)..(161): Homolog of NCBI NO: 21553927 NR Description: unknown [Arabidopsis thaliana]
  misc_feature (7)..(166): Homolog of NCBI NO: 15232985 NR Description: unknown protein; protein id: At3g02800.1
  misc_feature (1)..(77): Homolog of NCBI NO: 30102538 NR Description: At2g32960 [Arabidopsis thaliana]
  misc_feature (72)..(172): Homolog of NCBI NO: 30102538 NR Description: At2g32960 [Arabidopsis thaliana]
  misc_feature (1)..(172): Homolog of NCBI NO: 15225761 NR Description: unknown protein; protein id: At2g32960.1
  misc_feature (1)..(172): Homolog of NCBI NO: 15220383 NR Description: unkown protein; protein id: At1g05000.1
  misc_feature (1)..(175): Homolog of NCBI NO: 7487406 NR Description: hypothetical protein T24M8.4 - Arabidopsis
  misc_feature (1)..(179): Homolog of NCBI NO: 18412419 NR Description: putative protein
MEERGGGELFVPPLNFAMVDNGIFRSGFPEPVSFSFLQSLRLKSIIYLCPEAYPEVNREFAKSNGIQVFQFGIERCKEPFVNIPDEVIREALQVLLDTENHPVLIHCKSGKHRTGCLVGCVRKIQRWCLSSIFDEYQRFAAAKARISDQRFMELFDISNLKHTPLSFSCSKRYTNTIDY

SEQ ID NO: 36271 - protein, 162 aa, Arabidopsis thaliana
  peptide (1)..(162): Ceres Seq. ID no. 12332880
  misc_feature (1)..(155): Pfam Name: Tyrosine phosphatase family Pfam Description: Tyrosine phosphatase family
  misc_feature (1)..(144): Homolog of NCBI NO: 6324296 NR Description: Synthetic interaction with Whi2; Siw14p
  misc_feature (1)..(144): Homolog of NCBI NO: 15237359 NR Description: putative protein
  misc_feature (1)..(144): Homolog of NCBI NO: 21553927 NR Description: unknown [Arabidopsis thaliana]
  misc_feature (1)..(149): Homolog of NCBI NO: 15232985 NR Description: unknown protein; protein id: At3g02800.1
  misc_feature (1)..(60): Homolog of NCBI NO: 30102538 NR Description: At2g32960 [Arabidopsis thaliana]
  misc_feature (55)..(155): Homolog of NCBI NO: 30102538 NR Description: At2g32960 [Arabidopsis thaliana]
  misc_feature (1)..(155): Homolog of NCBI NO: 15225761 NR Description: unknown protein; protein id: At2g32960.1
  misc_feature (1)..(155): Homolog of NCBI NO: 15220383 NR Description: unkown protein; protein id: At1g05000.1
  misc_feature (1)..(158): Homolog of NCBI NO: 7487406 NR Description: hypothetical protein T24M8.4 - Arabidopsis
  misc_feature (1)..(162): Homolog of NCBI NO: 18412419 NR Description: putative protein
MVDNGIFRSGFPEPVSFSFLQSLRLKSIIYLCPEAYPEVNREFAKSNGIQVFQFGIERCKEPFVNIPDEVIREALQVLLDTENHPVLIHCKSGKHRTGCLVGCVRKIQRWCLSSIFDEYQRFAAAKARISDQRFMELFDISNLKHTPLSFSCSKRYTNTIDY

SEQ ID NO: 36272 - DNA, 1420 bp, Arabidopsis thaliana
  misc_feature (1)..(1420): Ceres Seq. ID no. 12580277
  misc_feature: MA Experiment ID: 20000179 Result: Up-regulated in Transcription
  misc_feature: MA Experiment 20000179 PARAMETER Experiment Name: At_Germinating_Seeds_P Parameter: Age (hr) Value: 6 vs. 0
  misc_feature: MA Experiment 20000179 PARAMETER Experiment Name: At_Germinating_Seeds_P Parameter: Tissue Value: Germinating Seeds
  misc_feature: MA Experiment ID: 20000180 Result: Up-regulated in Transcription
  misc_feature: MA Experiment 20000180 PARAMETER Experiment Name: At_Germinating_Seeds_P Parameter: Age (hr) Value: 24 vs. 0
  misc_feature: MA Experiment 20000180 PARAMETER Experiment Name: At_Germinating_Seeds_P Parameter: Tissue Value: Germinating Seeds
  misc_feature: MA Experiment ID: 20001905 Result: Down-regulated in Transcription
  misc_feature: MA Experiment 20001905 PARAMETER Experiment Name: At_Drought_Reproduction_P Parameter: Age (day) Value: 40
  misc_feature: MA Experiment 20001905 PARAMETER Experiment Name: At_Drought_Reproduction_P Parameter: Organism Value: A. thaliana
  misc_feature: MA Experiment 20001905 PARAMETER Experiment Name: At_Drought_Reproduction_P Parameter: Plant Line Value: WS
  misc_feature: MA Experiment 20001905 PARAMETER Experiment Name: At_Drought_Reproduction_P Parameter: Timepoint (day) Value: 10
  misc_feature: MA Experiment 20001905 PARAMETER Experiment Name: At_Drought_Reproduction_P Parameter: Tissue Value: Rosettes
  misc_feature: MA Experiment 20001905 PARAMETER Experiment Name: At_Drought_Reproduction_P Parameter: Treatment Value: Drought vs. No Drought
acccgcttagatcgatgtgtgtgctctgtgattgactgattttctcagagggataatcagtgacacatcgagtcgaagaagaacatacatttctactgaatcagatctgatctgctttgtcagtttttaaactgttctgatctaattgagatttctcaattccactcaaaatcctttaaagcttgtctctttttggtatctctgaatcaatttggggaaatcaagaggagaagtgacaatggatgcgtttagaagacaagcgagtaagcttagagaccaagtcgcaaagcagcaactggctgtgataaagcaattcagtgggactggttatgaaagctcagatgtaatggtgattgatgagcttgaaatgcaaaggcatcatcaactcgataaactttaccgctctactcgttctgcaaaggagttccagagagatattgttaaagcagctgaggcatttaccacgatcgggctcagacacattgaagcaggaaccaagttgtctgaagactgttgtaggtatgggaacgaaaatagtcagaacattgatgagaatatactggccaaggctgcagctatatacggtgatgcacggaaacatgtagacaaagaacaagaagacttcaacaagcttttggcttctcaggttttggatcctctaagagctatggttgccggttctcctcttgaagatgctcgtcatcttgctcaacgttacagccgcatgagacaagaagcagagacacatgcaacggaagtctctagacggcaagcacgtgtaagagaagctccgattccagaaaacgtagcaaagcttcaactagcggaagcaaaaatgcaagagctaaaagcaaatatggcagtccttggtaaagaagcaactgctgcattagccgctgttgaatcacagcaacatagactcactttccagaggcttgtggctatggttgaaggggagaagaattatcacttaagaatagcagccatcctcagtgacattgaagccgacatggtaaccgagaaacaacacaaagaatctgctcctcctgcgattccaacagagaacggctcagagaaaacgtcatactttcttgctgaagtgattcatccattttccgctgcttcagagaaagagttagacttggacaaaggagattacatcgttgtccgaaaggtgagccaaaccggttgggctgaaggagaatgcaaaggcaaagctggttggtttcctatggcttacattgagaagcgacagagacttcccactaccaactttgctgctgaagtttactgagtctcttcttcaaagatttcattttttcttacatttgtgtctgaaaactttgtttcagttatgtcctgtccccaacaaactactactcttgttcatatttgttgatccaaaatagagtttacctcc

SEQ ID NO: 36273 - protein, 351 aa, Arabidopsis thaliana
  peptide (1)..(351): Ceres Seq. ID no. 12580278
  misc_feature (284)..(338): Pfam Name: SH3 domain Pfam Description: SH3 domain
  misc_feature (284)..(338): Pfam Name: SH3 domain Pfam Description: SH3 domain
  misc_feature (284)..(338): Pfam Name: SH3 domain Pfam Description: SH3 domain
  misc_feature (284)..(338): Pfam Name: SH3 domain Pfam Description: SH3 domain
  misc_feature (1)..(278): Homolog of NCBI NO: 18418491 NR Description: putative protein
  misc_feature (278)..(344): Homolog of NCBI NO: 15221714 NR Description: unknown protein
  misc_feature (1)..(273): Homolog of NCBI NO: 15221714 NR Description: unknown protein
  misc_feature (260)..(344): Homolog of NCBI NO: 34902022 NR Description: unknown protein [Oryza sativa (japonica
  misc_feature (1)..(266): Homolog of NCBI NO: 34902022 NR Description: unknown protein [Oryza sativa (japonica
  misc_feature (1)..(278): Homolog of NCBI NO: 18418491 NR Description: putative protein
  misc_feature (1)..(273): Homolog of NCBI NO: 15221714 NR Description: unknown protein
  misc_feature (1)..(266): Homolog of NCBI NO: 34902022 NR Description: unknown protein [Oryza sativa (japonica
  misc_feature (260)..(344): Homolog of NCBI NO: 34902022 NR Description: unknown protein [Oryza sativa (japonica
  misc_feature (1)..(273): Homolog of NCBI NO: 15221714 NR Description: unknown protein
  misc_feature (278)..(344): Homolog of NCBI NO: 15221714 NR Description: unknown protein
  misc_feature (1)..(278): Homolog of NCBI NO: 18418491 NR Description: putative protein
  misc_feature (1)..(351): Homolog of NCBI NO: 22328762 NR Description: putative protein
  misc_feature (1)..(351): Homolog of NCBI NO: 21928139 NR Description: AT4g18060/F15J5_30 [Arabidopsis thaliana]
  misc_feature (1)..(351): Homolog of NCBI NO: 16974680 NR Description: SH3 domain-containing protein 3 [Arabidopsis
  misc_feature (1)..(243): Homolog of NCBI NO: 7485521 NR Description: hypothetical protein F15J5.30 - Arabidopsis
  misc_feature (1)..(342): Homolog of NCBI NO: 22093679 NR Description: putative SH3(Src homology) domain-containing
  misc_feature (1)..(351): Homolog of NCBI NO: 22328762 NR Description: putative protein
  misc_feature (1)..(351): Homolog of NCBI NO: 21928139 NR Description: AT4g18060/F15J5_30 [Arabidopsis thaliana]
  misc_feature (1)..(351): Homolog of NCBI NO: 16974680 NR Description: SH3 domain-containing protein 3 [Arabidopsis
  misc_feature (1)..(243): Homolog of NCBI NO: 7485521 NR Description: hypothetical protein F15J5.30 - Arabidopsis
  misc_feature (1)..(342): Homolog of NCBI NO: 22093679 NR Description: putative SH3(Src homology) domain-containing
  misc_feature (1)..(266): Homolog of NCBI NO: 34902022 NR Description: unknown protein [Oryza sativa (japonica
  misc_feature (260)..(344): Homolog of NCBI NO: 34902022 NR Description: unknown protein [Oryza sativa (japonica
  misc_feature (1)..(273): Homolog of NCBI NO: 15221714 NR Description: unknown protein
  misc_feature (278)..(344): Homolog of NCBI NO: 15221714 NR Description: unknown protein
  misc_feature (1)..(278): Homolog of NCBI NO: 18418491 NR Description: putative protein
  misc_feature (1)..(351): Homolog of NCBI NO: 22328762 NR Description: putative protein
  misc_feature (1)..(351): Homolog of NCBI NO: 21928139 NR Description: AT4g18060/F15J5_30 [Arabidopsis thaliana]
  misc_feature (1)..(351): Homolog of NCBI NO: 16974680 NR Description: SH3 domain-containing protein 3 [Arabidopsis
  misc_feature (1)..(243): Homolog of NCBI NO: 7485521 NR Description: hypothetical protein F15J5.30 - Arabidopsis
  misc_feature (1)..(342): Homolog of NCBI NO: 22093679 NR Description: putative SH3(Src homology) domain-containing
  misc_feature (1)..(266): Homolog of NCBI NO: 34902022 NR Description: unknown protein [Oryza sativa (japonica
  misc_feature (260)..(344): Homolog of NCBI NO: 34902022 NR Description: unknown protein [Oryza sativa (japonica
  misc_feature (278)..(344): Homolog of NCBI NO: 15221714 NR Description: unknown protein
  misc_feature (1)..(342): Homolog of NCBI NO: 22093679 NR Description: putative SH3(Src homology) domain-containing
  misc_feature (1)..(243): Homolog of NCBI NO: 7485521 NR Description: hypothetical protein F15J5.30 - Arabidopsis
  misc_feature (1)..(351): Homolog of NCBI NO: 16974680 NR Description: SH3 domain-containing protein 3 [Arabidopsis
  misc_feature (1)..(351): Homolog of NCBI NO: 21928139 NR Description: AT4g18060/F15J5_30 [Arabidopsis thaliana]
  misc_feature (1)..(351): Homolog of NCBI NO: 22328762 NR Description: putative protein
MDAFRRQASKLRDQVAKQQLAVIKQFSGTGYESSDVMVIDELEMQRHHQLDKLYRSTRSAKEFQRDIVKAAEAFTTIGLRHIEAGTKLSEDCCRYGNENSQNIDENILAKAAAIYGDARKHVDKEQEDFNKLLASQVLDPLRAMVAGSPLEDARHLAQRYSRMRQEAETHATEVSRRQARVREAPIPENVAKLQLAEAKMQELKANMAVLGKEATAALAAVESQQHRLTFQRLVAMVEGEKNYHLRIAAILSDIEADMVTEKQHKESAPPAIPTENGSEKTSYFLAEVIHPFSAASEKELDLDKGDYIVVRKVSQTGWAEGECKGKAGWFPMAYIEKRQRLPTTNFAAEVY

SEQ ID NO: 36274 - protein, 315 aa, Arabidopsis thaliana
  peptide (1)..(315): Ceres Seq. ID no. 12580279
  misc_feature (248)..(302): Pfam Name: SH3 domain Pfam Description: SH3 domain
  misc_feature (248)..(302): Pfam Name: SH3 domain Pfam Description: SH3 domain
  misc_feature (248)..(302): Pfam Name: SH3 domain Pfam Description: SH3 domain
  misc_feature (248)..(302): Pfam Name: SH3 domain Pfam Description: SH3 domain
  misc_feature (1)..(242): Homolog of NCBI NO: 18418491 NR Description: putative protein
  misc_feature (242)..(308): Homolog of NCBI NO: 15221714 NR Description: unknown protein
  misc_feature (1)..(237): Homolog of NCBI NO: 15221714 NR Description: unknown protein
  misc_feature (224)..(308): Homolog of NCBI NO: 34902022 NR Description: unknown protein [Oryza sativa (japonica
  misc_feature (1)..(230): Homolog of NCBI NO: 34902022 NR Description: unknown protein [Oryza sativa (japonica
  misc_feature (1)..(242): Homolog of NCBI NO: 18418491 NR Description: putative protein
  misc_feature (1)..(237): Homolog of NCBI NO: 15221714 NR Description: unknown protein
  misc_feature (1)..(230): Homolog of NCBI NO: 34902022 NR Description: unknown protein [Oryza sativa (japonica
  misc_feature (224)..(308): Homolog of NCBI NO: 34902022 NR Description: unknown protein [Oryza sativa (japonica
  misc_feature (1)..(237): Homolog of NCBI NO: 15221714 NR Description: unknown protein
  misc_feature (242)..(308): Homolog of NCBI NO: 15221714 NR Description: unknown protein
  misc_feature (1)..(242): Homolog of NCBI NO: 18418491 NR Description: putative protein
  misc_feature (1)..(315): Homolog of NCBI NO: 22328762 NR Description: putative protein
  misc_feature (1)..(315): Homolog of NCBI NO: 21928139 NR Description: AT4g18060/F15J5_30 [Arabidopsis thaliana]
  misc_feature (1)..(315): Homolog of NCBI NO: 16974680 NR Description: SH3 domain-containing protein 3 [Arabidopsis
  misc_feature (1)..(207): Homolog of NCBI NO: 7485521 NR Description: hypothetical protein F15J5.30 - Arabidopsis
  misc_feature (1)..(306): Homolog of NCBI NO: 22093679 NR Description: putative SH3(Src homology) domain-containing
  misc_feature (1)..(315): Homolog of NCBI NO: 22328762 NR Description: putative protein
  misc_feature (1)..(315): Homolog of NCBI NO: 21928139 NR Description: AT4g18060/F15J5_30 [Arabidopsis thaliana]
  misc_feature (1)..(315): Homolog of NCBI NO: 16974680 NR Description: SH3 domain-containing protein 3 [Arabidopsis
  misc_feature (1)..(207): Homolog of NCBI NO: 7485521 NR Description: hypothetical protein F15J5.30 - Arabidopsis
  misc_feature (1)..(306): Homolog of NCBI NO: 22093679 NR Description: putative SH3(Src homology) domain-containing
  misc_feature (1)..(230): Homolog of NCBI NO: 34902022 NR Description: unknown protein [Oryza sativa (japonica
  misc_feature (224)..(308): Homolog of NCBI NO: 34902022 NR Description: unknown protein [Oryza sativa (japonica
  misc_feature (1)..(237): Homolog of NCBI NO: 15221714 NR Description: unknown protein
  misc_feature (242)..(308): Homolog of NCBI NO: 15221714 NR Description: unknown protein
  misc_feature (1)..(242): Homolog of NCBI NO: 18418491 NR Description: putative protein
  misc_feature (1)..(315): Homolog of NCBI NO: 22328762 NR Description: putative protein
  misc_feature (1)..(315): Homolog of NCBI NO: 21928139 NR Description: AT4g18060/F15J5_30 [Arabidopsis thaliana]
  misc_feature (1)..(315): Homolog of NCBI NO: 16974680 NR Description: SH3 domain-containing protein 3 [Arabidopsis
  misc_feature (1)..(207): Homolog of NCBI NO: 7485521 NR Description: hypothetical protein F15J5.30 - Arabidopsis
  misc_feature (1)..(306): Homolog of NCBI NO: 22093679 NR Description: putative SH3(Src homology) domain-containing
  misc_feature (1)..(230): Homolog of NCBI NO: 34902022 NR Description: unknown protein [Oryza sativa (japonica
  misc_feature (224)..(308): Homolog of NCBI NO: 34902022 NR Description: unknown protein [Oryza sativa (japonica
  misc_feature (242)..(308): Homolog of NCBI NO: 15221714 NR Description: unknown protein
  misc_feature (1)..(306): Homolog of NCBI NO: 22093679 NR Description: putative SH3(Src homology) domain-containing
  misc_feature (1)..(207): Homolog of NCBI NO: 7485521 NR Description: hypothetical protein F15J5.30 - Arabidopsis
  misc_feature (1)..(315): Homolog of NCBI NO: 16974680 NR Description: SH3 domain-containing protein 3 [Arabidopsis
  misc_feature (1)..(315): Homolog of NCBI NO: 21928139 NR Description: AT4g18060/F15J5_30 [Arabidopsis thaliana]
  misc_feature (1)..(315): Homolog of NCBI NO: 22328762 NR Description: putative protein
MVIDELEMQRHHQLDKLYRSTRSAKEFQRDIVKAAEAFTTIGLRHIEAGTKLSEDCCRYGNENSQNIDENILAKAAAIYGDARKHVDKEQEDFNKLLASQVLDPLRAMVAGSPLEDARHLAQRYSRMRQEAETHATEVSRRQARVREAPIPENVAKLQLAEAKMQELKANMAVLGKEATAALAAVESQQHRLTFQRLVAMVEGEKNYHLRIAAILSDIEADMVTEKQHKESAPPAIPTENGSEKTSYFLAEVIHPFSAASEKELDLDKGDYIVVRKVSQTGWAEGECKGKAGWFPMAYIEKRQRLPTTNFAAEVY

SEQ ID NO: 36275 - protein, 308 aa, Arabidopsis thaliana
  peptide (1)..(308): Ceres Seq. ID no. 12580280
  misc_feature (241)..(295): Pfam Name: SH3 domain Pfam Description: SH3 domain
  misc_feature (241)..(295): Pfam Name: SH3 domain Pfam Description: SH3 domain
  misc_feature (241)..(295): Pfam Name: SH3 domain Pfam Description: SH3 domain
  misc_feature (241)..(295): Pfam Name: SH3 domain Pfam Description: SH3 domain
  misc_feature (1)..(235): Homolog of NCBI NO: 18418491 NR Description: putative protein
  misc_feature (235)..(301): Homolog of NCBI NO: 15221714 NR Description: unknown protein
  misc_feature (1)..(230): Homolog of NCBI NO: 15221714 NR Description: unknown protein
  misc_feature (217)..(301): Homolog of NCBI NO: 34902022 NR Description: unknown protein [Oryza sativa (japonica
  misc_feature (1)..(223): Homolog of NCBI NO: 34902022 NR Description: unknown protein [Oryza sativa (japonica
  misc_feature (1)..(235): Homolog of NCBI NO: 18418491 NR Description: putative protein
  misc_feature (1)..(230): Homolog of NCBI NO: 15221714 NR Description: unknown protein
  misc_feature (1)..(223): Homolog of NCBI NO: 34902022 NR Description: unknown protein [Oryza sativa (japonica
  misc_feature (217)..(301): Homolog of NCBI NO: 34902022 NR Description: unknown protein [Oryza sativa (japonica
  misc_feature (1)..(230): Homolog of NCBI NO: 15221714 NR Description: unknown protein
  misc_feature (235)..(301): Homolog of NCBI NO: 15221714 NR Description: unknown protein
  misc_feature (1)..(235): Homolog of NCBI NO: 18418491 NR Description: putative protein
  misc_feature (1)..(308): Homolog of NCBI NO: 22328762 NR Description: putative protein
  misc_feature (1)..(308): Homolog of NCBI NO: 21928139 NR Description: AT4g18060/F15J5_30 [Arabidopsis thaliana]
  misc_feature (1)..(308): Homolog of NCBI NO: 16974680 NR Description: SH3 domain-containing protein 3 [Arabidopsis
  misc_feature (1)..(200): Homolog of NCBI NO: 7485521 NR Description: hypothetical protein F15J5.30 - Arabidopsis
  misc_feature (1)..(299): Homolog of NCBI NO: 22093679 NR Description: putative SH3(Src homology) domain-containing
  misc_feature (1)..(308): Homolog of NCBI NO: 22328762 NR Description: putative protein
  misc_feature (1)..(308): Homolog of NCBI NO: 21928139 NR Description: AT4g18060/F15J5_30 [Arabidopsis thaliana]
  misc_feature (1)..(308): Homolog of NCBI NO: 16974680 NR Description: SH3 domain-containing protein 3 [Arabidopsis
  misc_feature (1)..(200): Homolog of NCBI NO: 7485521 NR Description: hypothetical protein F15J5.30 - Arabidopsis
  misc_feature (1)..(299): Homolog of NCBI NO: 22093679 NR Description: putative SH3(Src homology) domain-containing
  misc_feature (1)..(223): Homolog of NCBI NO: 34902022 NR Description: unknown protein [Oryza sativa (japonica
  misc_feature (217)..(301): Homolog of NCBI NO: 34902022 NR Description: unknown protein [Oryza sativa (japonica
  misc_feature (1)..(230): Homolog of NCBI NO: 15221714 NR Description: unknown protein
  misc_feature (235)..(301): Homolog of NCBI NO: 15221714 NR Description: unknown protein
  misc_feature (1)..(235): Homolog of NCBI NO: 18418491 NR Description: putative protein
  misc_feature (1)..(308): Homolog of NCBI NO: 22328762 NR Description: putative protein
  misc_feature (1)..(308): Homolog of NCBI NO: 21928139 NR Description: AT4g18060/F15J5_30 [Arabidopsis thaliana]
  misc_feature (1)..(308): Homolog of NCBI NO: 16974680 NR Description: SH3 domain-containing protein 3 [Arabidopsis
  misc_feature (1)..(200): Homolog of NCBI NO: 7485521 NR Description: hypothetical protein F15J5.30 - Arabidopsis
  misc_feature (1)..(299): Homolog of NCBI NO: 22093679 NR Description: putative SH3(Src homology) domain-containing
  misc_feature (1)..(223): Homolog of NCBI NO: 34902022 NR Description: unknown protein [Oryza sativa (japonica
  misc_feature (217)..(301): Homolog of NCBI NO: 34902022 NR Description: unknown protein [Oryza sativa (japonica
  misc_feature (235)..(301): Homolog of NCBI NO: 15221714 NR Description: unknown protein
  misc_feature (1)..(299): Homolog of NCBI NO: 22093679 NR Description: putative SH3(Src homology) domain-containing
  misc_feature (1)..(200): Homolog of NCBI NO: 7485521 NR Description: hypothetical protein F15J5.30 - Arabidopsis
  misc_feature (1)..(308): Homolog of NCBI NO: 16974680 NR Description: SH3 domain-containing protein 3 [Arabidopsis
  misc_feature (1)..(308): Homolog of NCBI NO: 21928139 NR Description: AT4g18060/F15J5_30 [Arabidopsis thaliana]
  misc_feature (1)..(308): Homolog of NCBI NO: 22328762 NR Description: putative protein
MQRHHQLDKLYRSTRSAKEFQRDIVKAAEAFTTIGLRHIEAGTKLSEDCCRYGNENSQNIDENILAKAAAIYGDARKHVDKEQEDFNKLLASQVLDPLRAMVAGSPLEDARHLAQRYSRMRQEAETHATEVSRRQARVREAPIPENVAKLQLAEAKMQELKANMAVLGKEATAALAAVESQQHRLTFQRLVAMVEGEKNYHLRIAAILSDIEADMVTEKQHKESAPPAIPTENGSEKTSYFLAEVIHPFSAASEKELDLDKGDYIVVRKVSQTGWAEGECKGKAGWFPMAYIEKRQRLPTTNFAAEVY

SEQ ID NO: 36276 - DNA, 1129 bp, Arabidopsis thaliana
  misc_feature (1)..(1129): Ceres Seq. ID no. 12337799
  misc_feature: MA Experiment ID: 108434 Result: Up-regulated in Transcription
  misc_feature: MA Experiment 108434 PARAMETER Experiment Name: At_Root_Tips_cDNA_P Parameter: Tissue Value: Root Tips
  misc_feature: MA Experiment ID: 108461 Result: Down-regulated in Transcription
  misc_feature: MA Experiment 108461 PARAMETER Experiment Name: At_Germinating_Seeds_cDNA_P Parameter: Age (day) Value: 1 vs. 0
  misc_feature: MA Experiment 108461 PARAMETER Experiment Name: At_Germinating_Seeds_cDNA_P Parameter: Tissue Value: Germinating Seeds
  misc_feature: MA Experiment ID: 108462 Result: Down-regulated in Transcription
  misc_feature: MA Experiment 108462 PARAMETER Experiment Name: At_Germinating_Seeds_cDNA_P Parameter: Age (day) Value: 2 vs. 0
  misc_feature: MA Experiment 108462 PARAMETER Experiment Name: At_Germinating_Seeds_cDNA_P Parameter: Tissue Value: Germinating Seeds
  misc_feature: MA Experiment ID: 108463 Result: Down-regulated in Transcription
  misc_feature: MA Experiment 108463 PARAMETER Experiment Name: At_Germinating_Seeds_cDNA_P Parameter: Age (day) Value: 3 vs. 0
  misc_feature: MA Experiment 108463 PARAMETER Experiment Name: At_Germinating_Seeds_cDNA_P Parameter: Tissue Value: Germinating Seeds
  misc_feature: MA Experiment ID: 108464 Result: Down-regulated in Transcription
  misc_feature: MA Experiment 108464 PARAMETER Experiment Name: At_Germinating_Seeds_cDNA_P Parameter: Age (day) Value: 4 vs. 0
  misc_feature: MA Experiment 108464 PARAMETER Experiment Name: At_Germinating_Seeds_cDNA_P Parameter: Tissue Value: Germinating Seeds
  misc_feature: MA Experiment ID: 20000179 Result: Down-regulated in Transcription
  misc_feature: MA Experiment 20000179 PARAMETER Experiment Name: At_Germinating_Seeds_P Parameter: Age (hr) Value: 6 vs. 0
  misc_feature: MA Experiment 20000179 PARAMETER Experiment Name: At_Germinating_Seeds_P Parameter: Tissue Value: Germinating Seeds
  misc_feature: MA Experiment ID: 20000180 Result: Down-regulated in Transcription
  misc_feature: MA Experiment 20000180 PARAMETER Experiment Name: At_Germinating_Seeds_P Parameter: Age (hr) Value: 24 vs. 0
  misc_feature: MA Experiment 20000180 PARAMETER Experiment Name: At_Germinating_Seeds_P Parameter: Tissue Value: Germinating Seeds
aaaagttgcttgctttcttcttcttctccgattcgagcttccttcctctcagcaaaaccttcaagtaaagagtggtgaatcggaaaatgtcgcagtcttccgtcgatataccgccaaaaggtgggtttagcttcgatctgtgcaaaaggaatgatatgctgacacagaagggtcttaaagcgccgtcgtttctcaagactggaacgactatcgttggattgatatttaaggatggtgtaatacttggggctgatacacgggcaactgaagggcctattgtggctgataagaactgtgagaagattcactacatggcaccaaacatttactgttgtggtgcaggaaccgctgctgacactgaagcagtaactgatatggtcagctcacagctgcggttgcatagataccagactggccgagattctcgagtcgttactgcattgacccttctcaaaaaacatcttttcagctaccaaggccatgtctcagctgctcttgtgcttggtggagttgatattaccgggcctcatcttcacacgatatacccacacggttctactgacactctaccatttgctacaatgggttctggttcccttgctgtcatgtcagtgtttgaagcaaagtataaagaaggtctaactagagatgaaggaatcaagttggttgctgaagccatatgctctggtatattcaacgaccttggtagtggtagcaatgtggatatctgtgtgatcactaaggggcacaaggaatacttgaggaattacatggaaccaaacccaagaacctatgttagcagcaaaggctattcattcaccaagaaaaccgaggttctactcaccaaaattacaccattattggagcgagtcgaaattgtagaagtggctggtgaagctatggaggaatgaatctcgtgtgagagacagatactaagagtgaaaccattgttctacctcacatgacagtcatgtttacattttctactttgttcaatatgaacgactaaaatcgaatcgtagttgcctccatttcgtctttaaatttggcttgaacttgtgattaatgattatggatgattcggttttgaaatttagctctcacataattttcaaaagagctctttctt

SEQ ID NO: 36277 - protein, 274 aa, Arabidopsis thaliana
  peptide (1)..(274): Ceres Seq. ID no. 12337800
  misc_feature (36)..(217): Pfam Name: Proteasome A-type and B-type Pfam Description: Proteasome A-type and B-type
  misc_feature (10)..(265): Homolog of NCBI NO: 2582506 NR Description: 20S proteasome beta2 subunit [Drosophila
  misc_feature (10)..(265): Homolog of NCBI NO: 24664391 NR Description: Proteasome beta2 subunit CG3329-PA
  misc_feature (57)..(274): Homolog of NCBI NO: 2511576 NR Description: multicatalytic endopeptidase [Arabidopsis
  misc_feature (5)..(274): Homolog of NCBI NO: 8671504 NR Description: beta 2 subunit of 20S proteasome
  misc_feature (1)..(248): Homolog of NCBI NO: 30688785 NR Description: 20S proteasome beta subunit B (PBB1) [Arabidopsis
  misc_feature (1)..(274): Homolog of NCBI NO: 2511578 NR Description: multicatalytic endopeptidase [Arabidopsis
  misc_feature (1)..(274): Homolog of NCBI NO: 18405364 NR Description: 20S proteasome beta subunit B (PBB1)
  misc_feature (1)..(274): Homolog of NCBI NO: 21593337 NR Description: 20S proteasome beta subunit PBB2 [Arabidopsis
  misc_feature (1)..(274): Homolog of NCBI NO: 15237451 NR Description: 20S proteasome beta subunit B (PBB2)
  misc_feature (1)..(274): Homolog of NCBI NO: 20260224 NR Description: 20S proteasome beta subunit PBB2 [Arabidopsis
MSQSSVDIPPKGGFSFDLCKRNDMLTQKGLKAPSFLKTGTTIVGLIFKDGVILGADTRATEGPIVADKNCEKIHYMAPNIYCCGAGTAADTEAVTDMVSSQLRLHRYQTGRDSRVVTALTLLKKHLFSYQGHVSAALVLGGVDITGPHLHTIYPHGSTDTLPFATMGSGSLAVMSVFEAKYKEGLTRDEGIKLVAEAICSGIFNDLGSGSNVDICVITKGHKEYLRNYMEPNPRTYVSSKGYSFTKKTEVLLTKITPLLERVEIVEVAGEAMEE

SEQ ID NO: 36278 - protein, 251 aa, Arabidopsis thaliana
  peptide (1)..(251): Ceres Seq. ID no. 12337801
  misc_feature (13)..(194): Pfam Name: Proteasome A-type and B-type Pfam Description: Proteasome A-type and B-type
  misc_feature (1)..(242): Homolog of NCBI NO: 2582506 NR Description: 20S proteasome beta2 subunit [Drosophila
  misc_feature (1)..(242): Homolog of NCBI NO: 24664391 NR Description: Proteasome beta2 subunit CG3329-PA
  misc_feature (34)..(251): Homolog of NCBI NO: 2511576 NR Description: multicatalytic endopeptidase [Arabidopsis
  misc_feature (1)..(251): Homolog of NCBI NO: 8671504 NR Description: beta 2 subunit of 20S proteasome
  misc_feature (1)..(225): Homolog of NCBI NO: 30688785 NR Description: 20S proteasome beta subunit B (PBB1) [Arabidopsis
  misc_feature (1)..(251): Homolog of NCBI NO: 2511578 NR Description: multicatalytic endopeptidase [Arabidopsis
  misc_feature (1)..(251): Homolog of NCBI NO: 18405364 NR Description: 20S proteasome beta subunit B (PBB1)
  misc_feature (1)..(251): Homolog of NCBI NO: 21593337 NR Description: 20S proteasome beta subunit PBB2 [Arabidopsis
  misc_feature (1)..(251): Homolog of NCBI NO: 15237451 NR Description: 20S proteasome beta subunit B (PBB2)
  misc_feature (1)..(251): Homolog of NCBI NO: 20260224 NR Description: 20S proteasome beta subunit PBB2 [Arabidopsis
MLTQKGLKAPSFLKTGTTIVGLIFKDGVILGADTRATEGPIVADKNCEKIHYMAPNIYCCGAGTAADTEAVTDMVSSQLRLHRYQTGRDSRVVTALTLLKKHLFSYQGHVSAALVLGGVDITGPHLHTIYPHGSTDTLPFATMGSGSLAVMSVFEAKYKEGLTRDEGIKLVAEAICSGIFNDLGSGSNVDICVITKGHKEYLRNYMEPNPRTYVSSKGYSFTKKTEVLLTKITPLLERVEIVEVAGEAMEE

SEQ ID NO: 36279 - protein, 199 aa, Arabidopsis thaliana
  peptide (1)..(199): Ceres Seq. ID no. 12337802
  misc_feature (1)..(142): Pfam Name: Proteasome A-type and B-type Pfam Description: Proteasome A-type and B-type
  misc_feature (1)..(190): Homolog of NCBI NO: 2582506 NR Description: 20S proteasome beta2 subunit [Drosophila
  misc_feature (1)..(190): Homolog of NCBI NO: 24664391 NR Description: Proteasome beta2 subunit CG3329-PA
  misc_feature (1)..(199): Homolog of NCBI NO: 2511576 NR Description: multicatalytic endopeptidase [Arabidopsis
  misc_feature (1)..(199): Homolog of NCBI NO: 8671504 NR Description: beta 2 subunit of 20S proteasome
  misc_feature (1)..(173): Homolog of NCBI NO: 30688785 NR Description: 20S proteasome beta subunit B (PBB1) [Arabidopsis
  misc_feature (1)..(199): Homolog of NCBI NO: 2511578 NR Description: multicatalytic endopeptidase [Arabidopsis
  misc_feature (1)..(199): Homolog of NCBI NO: 18405364 NR Description: 20S proteasome beta subunit B (PBB1)
  misc_feature (1)..(199): Homolog of NCBI NO: 21593337 NR Description: 20S proteasome beta subunit PBB2 [Arabidopsis
  misc_feature (1)..(199): Homolog of NCBI NO: 15237451 NR Description: 20S proteasome beta subunit B (PBB2)
  misc_feature (1)..(199): Homolog of NCBI NO: 20260224 NR Description: 20S proteasome beta subunit PBB2 [Arabidopsis
MAPNIYCCGAGTAADTEAVTDMVSSQLRLHRYQTGRDSRVVTALTLLKKHLFSYQGHVSAALVLGGVDITGPHLHTIYPHGSTDTLPFATMGSGSLAVMSVFEAKYKEGLTRDEGIKLVAEAICSGIFNDLGSGSNVDICVITKGHKEYLRNYMEPNPRTYVSSKGYSFTKKTEVLLTKITPLLERVEIVEVAGEAMEE

SEQ ID NO: 36280 - DNA, 847 bp, Arabidopsis thaliana
  misc_feature (1)..(847): Ceres Seq. ID no. 12672940
  misc_feature: MA Experiment ID: 108434 Result: Up-regulated in Transcription
  misc_feature: MA Experiment 108434 PARAMETER Experiment Name: At_Root_Tips_cDNA_P Parameter: Tissue Value: Root Tips
  misc_feature: MA Experiment ID: 108577 Result: Down-regulated in Transcription
  misc_feature: MA Experiment 108577 PARAMETER Experiment Name: At_42deg_Heat_cDNA_P Parameter: Temperature (deg C) Value: 42 vs. 22
  misc_feature: MA Experiment 108577 PARAMETER Experiment Name: At_42deg_Heat_cDNA_P Parameter: Timepoint (hr) Value: 6
  misc_feature: MA Experiment 108577 PARAMETER Experiment Name: At_42deg_Heat_cDNA_P Parameter: Tissue Value: Aerial
  misc_feature: MA Experiment ID: 20000113 Result: Down-regulated in Transcription
  misc_feature: MA Experiment 20000113 PARAMETER Experiment Name: At_42deg_Heat_cDNA_P Parameter: Temperature (deg C) Value: 42 vs. 22
  misc_feature: MA Experiment 20000113 PARAMETER Experiment Name: At_42deg_Heat_cDNA_P Parameter: Timepoint (hr) Value: 8
  misc_feature: MA Experiment 20000113 PARAMETER Experiment Name: At_42deg_Heat_cDNA_P Parameter: Tissue Value: Aerial
aatttattctcaaaccttatgagtgagatctctcttaatcattctctctttcttctctcctctgtgatgtgaggtttcgaagatccttctctgattcctcatcaaactcagatcagtagcggacccaaataggatcaaagcaaacgaggtttcaatttagagttttttaaagctcaaatctcggttgcttcggttgaacttcttgatacactgtctcgttttgagttcttgttaggtcattcctttagagagatatatggcagaggtgaaggatcaattagagattaagttccggcttaacgatggttctgatatcggtcctaaattgtttcctgatgctactaccgttgctacattgaaagaaaccgttgttgctcagtggccaagagataaggagaacgggccaaagacagtgaaagatgttaaactgataagcgcgggtagaatattggagaacaacaaaacggttggagattgcaggagtcccgtcggcaatttctcaggtgctgtcaccacaatgcatgttataattcaacatcaagttactgaaaaagaaaagaagaagaagaagcctaaaggtgatctgaaacagaacaaatgtgtctgtttatgttttggagctcgttgttaacaattgtgcaagacaagtagagagagttaaaaaagcttgggagattcacattctgttcttgagccttcttcaataccttttgctcttgttccttgtaattcttttttctgacatgacatgacatgattggctttttgatcgcttgaggtttggtttctattgtatttcggattcgcaacaccgtggaaattattaggtaacaaacaaatttgcacg

SEQ ID NO: 36281 - protein, 124 aa, Arabidopsis thaliana
  peptide (1)..(124): Ceres Seq. ID no. 12672941
  misc_feature (8)..(93): Pfam Name: Ubiquitin family Pfam Description: Ubiquitin family
  misc_feature (1)..(100): Homolog of NCBI NO: 25402954 NR Description: protein F2E2.12 [imported] - Arabidopsis thaliana
  misc_feature (5)..(117): Homolog of NCBI NO: 15234839 NR Description: expressed protein
  misc_feature (2)..(117): Homolog of NCBI NO: 38347220 NR Description: OSJNBa0055C08.14 [Oryza sativa (japonica
  misc_feature (5)..(117): Homolog of NCBI NO: 15218145 NR Description: expressed protein
  misc_feature (1)..(117): Homolog of NCBI NO: 15219188 NR Description: expressed protein; protein id: At1g22050.1
  misc_feature (4)..(117): Homolog of NCBI NO: 4097587 NR Description: NTGP5 [Nicotiana tabacum]
  misc_feature (5)..(117): Homolog of NCBI NO: 21592966 NR Description: ubiquitin-fusion protein, putative [Arabidopsis
  misc_feature (1)..(117): Homolog of NCBI NO: 15232032 NR Description: expressed protein; protein id: At3g01050.1
  misc_feature (1)..(99): Homolog of NCBI NO: 11358132 NR Description: hypothetical protein T20K14_70 - Arabidopsis
  misc_feature (1)..(124): Homolog of NCBI NO: 18417680 NR Description: expressed protein
MAEVKDQLEIKFRLNDGSDIGPKLFPDATTVATLKETVVAQWPRDKENGPKTVKDVKLISAGRILENNKTVGDCRSPVGNFSGAVTTMHVIIQHQVTEKEKKKKKPKGDLKQNKCVCLCFGARC

SEQ ID NO: 36282 - DNA, 895 bp, Arabidopsis thaliana
  misc_feature (1)..(895): Ceres Seq. ID no. 12325422
  misc_feature: MA Experiment ID: 108488 Result: Down-regulated in Transcription
  misc_feature: MA Experiment ID: 108595 Result: Down-regulated in Transcription
  misc_feature: MA Experiment 108595 PARAMETER Experiment Name: At_Ler-pi_Ovule_cDNA_P Parameter: Plant Line Value: null
  misc_feature: MA Experiment ID: 20000224 Result: Down-regulated in Transcription
  misc_feature: MA Experiment ID: 20000315 Result: Down-regulated in Transcription
  misc_feature: MA Experiment 20000315 PARAMETER Experiment Name: At_14day_Shoots-Roots_Sub_P Parameter: Age (day) Value: 14
  misc_feature: MA Experiment 20000315 PARAMETER Experiment Name: At_14day_Shoots-Roots_Sub_P Parameter: Organism Value: A. thaliana
  misc_feature: MA Experiment 20000315 PARAMETER Experiment Name: At_14day_Shoots-Roots_Sub_P Parameter: Plant Line Value: WS
  misc_feature: MA Experiment 20000315 PARAMETER Experiment Name: At_14day_Shoots-Roots_Sub_P Parameter: Tissue Value: Shoots vs. Whole Plant
gactctctttctcatttccacctgaggaaaaaagctttttcgaatctcgcttgctttttgtcgccatgagtctctttgggttaggaagaaatcagaagactttccgacctaagaagagtgcaccttctggaagcaagggtgcacagcttcgaaagcatatagatgccaccctaggaagtgggaacttgagagaagctgtaagacttcctccgggagaggatgcaaatgaatggcttgctgtaaacactgtggatttctttaatcaggtgaatttgctatatggcacccttaccgagttctgcacacctgataactgtcctacaatgactgctggcccaaagtacgagtatagatgggcagatggtgtacagatcaagaagcccatcgaggtttctgctccaaagtatgtcgagtacttgatggattggatcgagacccaactcgatgatgagactttatttcctcaaaggcttggagcaccatttcctcagaacttcaaagatgtggtgaaaacgatctttaaacggctattccgagtttatgctcacatataccactctcatttccagaaaatcgttagcctaaaagaagaagctcatctcaacacttgcttcaaacacttcatcctctttactcatgaatttggactgatagacaagaaagaactcgcgcctctacaagagctcatagaatctatcatttcaccttattgagcaaaagaccatttctgttttttttttttttcagattaaaaaccccaataaattaacggtaagaagttttatttttaattataaatctctcttgtttgttttcaagtttttttctttcttaaacctctgtaaaatttaaacatttactatgtaaaaaagaaatcgatcttgactagttcttt

SEQ ID NO: 36283 - protein, 236 aa, Arabidopsis thaliana
  peptide (1)..(236): Ceres Seq. ID no. 12325423
  misc_feature (50)..(234): Pfam Name: Mob1/phocein family Pfam Description: Mob1/phocein family
  misc_feature (24)..(234): Homolog of NCBI NO: 27735029 NR Description: hypothetical protein LOC92597 [Homo sapiens]
  misc_feature (24)..(234): Homolog of NCBI NO: 28277885 NR Description: Similar to hypothetical protein LOC92597 [Danio
  misc_feature (44)..(233): Homolog of NCBI NO: 10800806 NR Description: hypothetical protein [Cicer arietinum]
  misc_feature (29)..(234): Homolog of NCBI NO: 37534032 NR Description: putative F-box protein family
  misc_feature (22)..(233): Homolog of NCBI NO: 19309913 NR Description: Mob1-like protein [Medicago sativa subsp. falcata]
  misc_feature (30)..(236): Homolog of NCBI NO: 15234110 NR Description: putative protein; protein id: At4g19050.1
  misc_feature (22)..(236): Homolog of NCBI NO: 26449776 NR Description: unknown protein [Arabidopsis thaliana]
  misc_feature (22)..(236): Homolog of NCBI NO: 32470654 NR Description: unknown [Solanum bulbocastanum]
  misc_feature (22)..(236): Homolog of NCBI NO: 32470635 NR Description: putative Mob1/phocein family protein [Solanum
  misc_feature (22)..(236): Homolog of NCBI NO: 15242430 NR Description: putative protein
LSFSFPPEEKSFFESRLLFVAMSLFGLGRNQKTFRPKKSAPSGSKGAQLRKHIDATLGSGNLREAVRLPPGEDANEWLAVNTVDFFNQVNLLYGTLTEFCTPDNCPTMTAGPKYEYRWADGVQIKKPIEVSAPKYVEYLMDWIETQLDDETLFPQRLGAPFPQNFKDVVKTIFKRLFRVYAHIYHSHFQKIVSLKEEAHLNTCFKHFILFTHEFGLIDKKELAPLQELIESIISPY

SEQ ID NO: 36284 - protein, 215 aa, Arabidopsis thaliana
  peptide (1)..(215): Ceres Seq. ID no. 12325424
  misc_feature (29)..(213): Pfam Name: Mob1/phocein family Pfam Description: Mob1/phocein family
  misc_feature (3)..(213): Homolog of NCBI NO: 27735029 NR Description: hypothetical protein LOC92597 [Homo sapiens]
  misc_feature (3)..(213): Homolog of NCBI NO: 28277885 NR Description: Similar to hypothetical protein LOC92597 [Danio
  misc_feature (23)..(212): Homolog of NCBI NO: 10800806 NR Description: hypothetical protein [Cicer arietinum]
  misc_feature (8)..(213): Homolog of NCBI NO: 37534032 NR Description: putative F-box protein family
  misc_feature (1)..(212): Homolog of NCBI NO: 19309913 NR Description: Mob1-like protein [Medicago sativa subsp. falcata]
  misc_feature (9)..(215): Homolog of NCBI NO: 15234110 NR Description: putative protein; protein id: At4g19050.1
  misc_feature (1)..(215): Homolog of NCBI NO: 26449776 NR Description: unknown protein [Arabidopsis thaliana]
  misc_feature (1)..(215): Homolog of NCBI NO: 32470654 NR Description: unknown [Solanum bulbocastanum]
  misc_feature (1)..(215): Homolog of NCBI NO: 32470635 NR Description: putative Mob1/phocein family protein [Solanum
  misc_feature (1)..(215): Homolog of NCBI NO: 15242430 NR Description: putative protein
MSLFGLGRNQKTFRPKKSAPSGSKGAQLRKHIDATLGSGNLREAVRLPPGEDANEWLAVNTVDFFNQVNLLYGTLTEFCTPDNCPTMTAGPKYEYRWADGVQIKKPIEVSAPKYVEYLMDWIETQLDDETLFPQRLGAPFPQNFKDVVKTIFKRLFRVYAHIYHSHFQKIVSLKEEAHLNTCFKHFILFTHEFGLIDKKELAPLQELIESIISPY

SEQ ID NO: 36285 - protein, 129 aa, Arabidopsis thaliana
  peptide (1)..(129): Ceres Seq. ID no. 12325425
  misc_feature (1)..(127): Pfam Name: Mob1/phocein family Pfam Description: Mob1/phocein family
  misc_feature (1)..(127): Homolog of NCBI NO: 27735029 NR Description: hypothetical protein LOC92597 [Homo sapiens]
  misc_feature (1)..(127): Homolog of NCBI NO: 28277885 NR Description: Similar to hypothetical protein LOC92597 [Danio
  misc_feature (1)..(126): Homolog of NCBI NO: 10800806 NR Description: hypothetical protein [Cicer arietinum]
  misc_feature (1)..(127): Homolog of NCBI NO: 37534032 NR Description: putative F-box protein family
  misc_feature (1)..(126): Homolog of NCBI NO: 19309913 NR Description: Mob1-like protein [Medicago sativa subsp. falcata]
  misc_feature (1)..(129): Homolog of NCBI NO: 15234110 NR Description: putative protein; protein id: At4g19050.1
  misc_feature (1)..(129): Homolog of NCBI NO: 26449776 NR Description: unknown protein [Arabidopsis thaliana]
  misc_feature (1)..(129): Homolog of NCBI NO: 32470654 NR Description: unknown [Solanum bulbocastanum]
  misc_feature (1)..(129): Homolog of NCBI NO: 32470635 NR Description: putative Mob1/phocein family protein [Solanum
  misc_feature (1)..(129): Homolog of NCBI NO: 15242430 NR Description: putative protein
MTAGPKYEYRWADGVQIKKPIEVSAPKYVEYLMDWIETQLDDETLFPQRLGAPFPQNFKDVVKTIFKRLFRVYAHIYHSHFQKIVSLKEEAHLNTCFKHFILFTHEFGLIDKKELAPLQELIESIISPY

SEQ ID NO: 36286 - DNA, 722 bp, Arabidopsis thaliana
  misc_feature (1)..(722): Ceres Seq. ID no. 12332383
  misc_feature: MA Experiment ID: 108433 Result: Up-regulated in Transcription
  misc_feature: MA Experiment 108433 PARAMETER Experiment Name: At_rhl_Mutant2_cDNA_P Parameter: Age (day) Value: 7
  misc_feature: MA Experiment 108433 PARAMETER Experiment Name: At_rhl_Mutant2_cDNA_P Parameter: Organism Value: A. thaliana
  misc_feature: MA Experiment 108433 PARAMETER Experiment Name: At_rhl_Mutant2_cDNA_P Parameter: Plant Line Value: rhl Mutant vs. wt landsburg
  misc_feature: MA Experiment 108433 PARAMETER Experiment Name: At_rhl_Mutant2_cDNA_P Parameter: Tissue Value: Roots
  misc_feature: MA Experiment ID: 108434 Result: Down-regulated in Transcription
  misc_feature: MA Experiment 108434 PARAMETER Experiment Name: At_Root_Tips_cDNA_P Parameter: Tissue Value: Root Tips
  misc_feature: MA Experiment ID: 108461 Result: Up-regulated in Transcription
  misc_feature: MA Experiment 108461 PARAMETER Experiment Name: At_Germinating_Seeds_cDNA_P Parameter: Age (day) Value: 1 vs. 0
  misc_feature: MA Experiment 108461 PARAMETER Experiment Name: At_Germinating_Seeds_cDNA_P Parameter: Tissue Value: Germinating Seeds
  misc_feature: MA Experiment ID: 108462 Result: Up-regulated in Transcription
  misc_feature: MA Experiment 108462 PARAMETER Experiment Name: At_Germinating_Seeds_cDNA_P Parameter: Age (day) Value: 2 vs. 0
  misc_feature: MA Experiment 108462 PARAMETER Experiment Name: At_Germinating_Seeds_cDNA_P Parameter: Tissue Value: Germinating Seeds
  misc_feature: MA Experiment ID: 108463 Result: Up-regulated in Transcription
  misc_feature: MA Experiment 108463 PARAMETER Experiment Name: At_Germinating_Seeds_cDNA_P Parameter: Age (day) Value: 3 vs. 0
  misc_feature: MA Experiment 108463 PARAMETER Experiment Name: At_Germinating_Seeds_cDNA_P Parameter: Tissue Value: Germinating Seeds
  misc_feature: MA Experiment ID: 108464 Result: Up-regulated in Transcription
  misc_feature: MA Experiment 108464 PARAMETER Experiment Name: At_Germinating_Seeds_cDNA_P Parameter: Age (day) Value: 4 vs. 0
  misc_feature: MA Experiment 108464 PARAMETER Experiment Name: At_Germinating_Seeds_cDNA_P Parameter: Tissue Value: Germinating Seeds
  misc_feature: MA Experiment ID: 108488 Result: Down-regulated in Transcription
  misc_feature: MA Experiment ID: 108576 Result: Up-regulated in Transcription
  misc_feature: MA Experiment 108576 PARAMETER Experiment Name: At_42deg_Heat_cDNA_P Parameter: Temperature (deg C) Value: 42 vs. 22
  misc_feature: MA Experiment 108576 PARAMETER Experiment Name: At_42deg_Heat_cDNA_P Parameter: Timepoint (hr) Value: 1
  misc_feature: MA Experiment 108576 PARAMETER Experiment Name: At_42deg_Heat_cDNA_P Parameter: Tissue Value: Aerial
  misc_feature: MA Experiment ID: 108668 Result: Up-regulated in Transcription
  misc_feature: MA Experiment 108668 PARAMETER Experiment Name: At_2mM_SA_cDNA_P Parameter: Plant Line Value: WS
  misc_feature: MA Experiment 108668 PARAMETER Experiment Name: At_2mM_SA_cDNA_P Parameter: Timepoint (hr) Value: 6
  misc_feature: MA Experiment 108668 PARAMETER Experiment Name: At_2mM_SA_cDNA_P Parameter: Treatment Value: 2mM SA vs. No Treatment
  misc_feature: MA Experiment ID: 20000070 Result: Up-regulated in Transcription
  misc_feature: MA Experiment 20000070 PARAMETER Experiment Name: At_100uM_ABA_Mutants_cDNA_P Parameter: Plant Line Value: CS24
  misc_feature: MA Experiment 20000070 PARAMETER Experiment Name: At_100uM_ABA_Mutants_cDNA_P Parameter: Timepoint (hr) Value: 6
  misc_feature: MA Experiment 20000070 PARAMETER Experiment Name: At_100uM_ABA_Mutants_cDNA_P Parameter: Tissue Value: Aerial
  misc_feature: MA Experiment 20000070 PARAMETER Experiment Name: At_100uM_ABA_Mutants_cDNA_P Parameter: Treatment Value: 100uM ABA vs. No Treatment
  misc_feature: MA Experiment ID: 20000093 Result: Up-regulated in Transcription
  misc_feature: MA Experiment 20000093 PARAMETER Experiment Name: At_42deg_Heat_cDNA_P Parameter: Temperature (deg C) Value: 42 vs. 22
  misc_feature: MA Experiment 20000093 PARAMETER Experiment Name: At_42deg_Heat_cDNA_P Parameter: Timepoint (hr) Value: 0.5
  misc_feature: MA Experiment 20000093 PARAMETER Experiment Name: At_42deg_Heat_cDNA_P Parameter: Tissue Value: Aerial
  misc_feature: MA Experiment ID: 20000111 Result: Up-regulated in Transcription
  misc_feature: MA Experiment 20000111 PARAMETER Experiment Name: At_42deg_Heat_cDNA_P Parameter: Temperature (deg C) Value: 42 vs. 22
  misc_feature: MA Experiment 20000111 PARAMETER Experiment Name: At_42deg_Heat_cDNA_P Parameter: Timepoint (hr) Value: 6
  misc_feature: MA Experiment 20000111 PARAMETER Experiment Name: At_42deg_Heat_cDNA_P Parameter: Tissue Value: Aerial
  misc_feature: MA Experiment ID: 20000113 Result: Up-regulated in Transcription
  misc_feature: MA Experiment 20000113 PARAMETER Experiment Name: At_42deg_Heat_cDNA_P Parameter: Temperature (deg C) Value: 42 vs. 22
  misc_feature: MA Experiment 20000113 PARAMETER Experiment Name: At_42deg_Heat_cDNA_P Parameter: Timepoint (hr) Value: 8
  misc_feature: MA Experiment 20000113 PARAMETER Experiment Name: At_42deg_Heat_cDNA_P Parameter: Tissue Value: Aerial
  misc_feature: MA Experiment ID: 20000117 Result: Up-regulated in Transcription
  misc_feature: MA Experiment 20000117 PARAMETER Experiment Name: At_100uM_ABA_Mutants_cDNA_P Parameter: Plant Line Value: Columbia
  misc_feature: MA Experiment 20000117 PARAMETER Experiment Name: At_100uM_ABA_Mutants_cDNA_P Parameter: Timepoint (hr) Value: 6
  misc_feature: MA Experiment 20000117 PARAMETER Experiment Name: At_100uM_ABA_Mutants_cDNA_P Parameter: Tissue Value: Aerial
  misc_feature: MA Experiment 20000117 PARAMETER Experiment Name: At_100uM_ABA_Mutants_cDNA_P Parameter: Treatment Value: 100uM ABA vs. No Treatment
  misc_feature: MA Experiment ID: 20000171 Result: Up-regulated in Transcription
  misc_feature: MA Experiment 20000171 PARAMETER Experiment Name: At_42deg_Heat_P Parameter: Age (day) Value: 14
  misc_feature: MA Experiment 20000171 PARAMETER Experiment Name: At_42deg_Heat_P Parameter: Organism Value: A. thaliana
  misc_feature: MA Experiment 20000171 PARAMETER Experiment Name: At_42deg_Heat_P Parameter: Plant Line Value: WS
  misc_feature: MA Experiment 20000171 PARAMETER Experiment Name: At_42deg_Heat_P Parameter: Temperature (deg C) Value: 42 vs. 22
  misc_feature: MA Experiment 20000171 PARAMETER Experiment Name: At_42deg_Heat_P Parameter: Timepoint (hr) Value: 1
  misc_feature: MA Experiment 20000171 PARAMETER Experiment Name: At_42deg_Heat_P Parameter: Tissue Value: Aerial
  misc_feature: MA Experiment ID: 20000173 Result: Up-regulated in Transcription
  misc_feature: MA Experiment 20000173 PARAMETER Experiment Name: At_42deg_Heat_P Parameter: Age (day) Value: 14
  misc_feature: MA Experiment 20000173 PARAMETER Experiment Name: At_42deg_Heat_P Parameter: Organism Value: A. thaliana
  misc_feature: MA Experiment 20000173 PARAMETER Experiment Name: At_42deg_Heat_P Parameter: Plant Line Value: WS
  misc_feature: MA Experiment 20000173 PARAMETER Experiment Name: At_42deg_Heat_P Parameter: Temperature (deg C) Value: 42 vs. 22
  misc_feature: MA Experiment 20000173 PARAMETER Experiment Name: At_42deg_Heat_P Parameter: Timepoint (hr) Value: 6
  misc_feature: MA Experiment 20000173 PARAMETER Experiment Name: At_42deg_Heat_P Parameter: Tissue Value: Aerial
  misc_feature: MA Experiment ID: 20000180 Result: Up-regulated in Transcription
  misc_feature: MA Experiment 20000180 PARAMETER Experiment Name: At_Germinating_Seeds_P Parameter: Age (hr) Value: 24 vs. 0
  misc_feature: MA Experiment 20000180 PARAMETER Experiment Name: At_Germinating_Seeds_P Parameter: Tissue Value: Germinating Seeds
  misc_feature: MA Experiment ID: 20000214 Result: Down-regulated in Transcription
  misc_feature: MA Experiment 20000214 PARAMETER Experiment Name: At_4deg_Cold_P Parameter: Timepoint (hr) Value: 6
  misc_feature: MA Experiment ID: 20000227 Result: Down-regulated in Transcription
  misc_feature: MA Experiment 20000227 PARAMETER Experiment Name: At_Root-Tips-vs-Tops_P Parameter: Tissue Value: Root Tips vs. Root Tops
  misc_feature: MA Experiment ID: 20000235 Result: Down-regulated in Transcription
  misc_feature: MA Experiment 20000235 PARAMETER Experiment Name: At_Siliques_P Parameter: Age (day) Value: 21
  misc_feature: MA Experiment 20000235 PARAMETER Experiment Name: At_Siliques_P Parameter: Organism Value: A. thaliana
  misc_feature: MA Experiment 20000235 PARAMETER Experiment Name: At_Siliques_P Parameter: Plant Line Value: WS
  misc_feature: MA Experiment 20000235 PARAMETER Experiment Name: At_Siliques_P Parameter: Tissue Value: 5-10mm Siliques vs. Whole Plant
  misc_feature: MA Experiment ID: 20000286 Result: Down-regulated in Transcription
  misc_feature: MA Experiment 20000286 PARAMETER Experiment Name: At_Open_Flower_P Parameter: Age (day) Value: 21
  misc_feature: MA Experiment 20000286 PARAMETER Experiment Name: At_Open_Flower_P Parameter: Plant Line Value: WS
  misc_feature: MA Experiment 20000286 PARAMETER Experiment Name: At_Open_Flower_P Parameter: Tissue Value: Half Open vs. Whole Plant
  misc_feature: MA Experiment ID: 20000438 Result: Down-regulated in Transcription
  misc_feature: MA Experiment 20000438 PARAMETER Experiment Name: At_Shoots__P Parameter: Age (day) Value: 14
  misc_feature: MA Experiment 20000438 PARAMETER Experiment Name: At_Shoots__P Parameter: Tissue Value: Shoots vs. Whole Plant
  misc_feature: MA Experiment ID: 20000496 Result: Up-regulated in Transcription
  misc_feature: MA Experiment 20000496 PARAMETER Experiment Name: At_Guard_Cells_P Parameter: Harvest Date Value: 7/19/2002
  misc_feature: MA Experiment 20000496 PARAMETER Experiment Name: At_Guard_Cells_P Parameter: Organism Value: Canola
  misc_feature: MA Experiment 20000496 PARAMETER Experiment Name: At_Guard_Cells_P Parameter: Tissue Value: Guard Cells vs. Leaves
  misc_feature: MA Experiment ID: 20001557 Result: Down-regulated in Transcription
  misc_feature: MA Experiment 20001557 PARAMETER Experiment Name: At_Drought_Soil_Dry_P Parameter: Age (day) Value: 27
  misc_feature: MA Experiment 20001557 PARAMETER Experiment Name: At_Drought_Soil_Dry_P Parameter: Organism Value: A. thaliana
  misc_feature: MA Experiment 20001557 PARAMETER Experiment Name: At_Drought_Soil_Dry_P Parameter: Plant Line Value: WS
  misc_feature: MA Experiment 20001557 PARAMETER Experiment Name: At_Drought_Soil_Dry_P Parameter: Post Timepoint (hr) Value: 3
  misc_feature: MA Experiment 20001557 PARAMETER Experiment Name: At_Drought_Soil_Dry_P Parameter: Post-Treatment Value: Re-Water vs. No Drought
  misc_feature: MA Experiment 20001557 PARAMETER Experiment Name: At_Drought_Soil_Dry_P Parameter: Timepoint (day) Value: 13
  misc_feature: MA Experiment 20001557 PARAMETER Experiment Name: At_Drought_Soil_Dry_P Parameter: Treatment Value: Drought vs. No Drought
  misc_feature: MA Experiment ID: 20001558 Result: Down-regulated in Transcription
  misc_feature: MA Experiment 20001558 PARAMETER Experiment Name: At_Drought_Soil_Dry_P Parameter: Age (day) Value: 27
  misc_feature: MA Experiment 20001558 PARAMETER Experiment Name: At_Drought_Soil_Dry_P Parameter: Organism Value: A. thaliana
  misc_feature: MA Experiment 20001558 PARAMETER Experiment Name: At_Drought_Soil_Dry_P Parameter: Plant Line Value: WS
  misc_feature: MA Experiment 20001558 PARAMETER Experiment Name: At_Drought_Soil_Dry_P Parameter: Post Timepoint (hr) Value: 6
  misc_feature: MA Experiment 20001558 PARAMETER Experiment Name: At_Drought_Soil_Dry_P Parameter: Post-Treatment Value: Re-Water vs. No Drought
  misc_feature: MA Experiment 20001558 PARAMETER Experiment Name: At_Drought_Soil_Dry_P Parameter: Timepoint (day) Value: 13
  misc_feature: MA Experiment 20001558 PARAMETER Experiment Name: At_Drought_Soil_Dry_P Parameter: Treatment Value: Drought vs. No Drought
aacgtcatcattctgacttttctcaaagaagagaaatcaaatcaccaagtcatcggagcgatcacagagaagaagaaaaccatggcggaagaagagaaaagcgtgatgaagcaagtgatggtggcgattgatgaaagcgaatgtagtaaacgcgctcttcaatggacgctcgtgtatctcaaagatagcctcgccgattccgacatcatcctcttcactgctcaacctcatcttgatctcagctgcgtctatgcttcctcttatggcgccgctccgattgagcttataaactcattgcaagagagtcataagaacgctggattgaatcgtcttgatgaaggaaccaaaatttgtgctgagactggggttactccaagaaaggtgttggaatttggaaatcctaaagaagcgatatgtgaagctgctgagaagcttggtgttgatatgcttgtggttggaagccatggtaaaggagcattacaaaggactttccttggaagtgttagcaattactgtgttaacaatgctaagtgcccagttcttgtggtgagaacaaaagcttgaagacctcttctcatgaaagagttcgacaaccctggcttgatgtgtgtgtgttgtaaacatattgataataatgctctgcttggttactattgtttgaagaaactttgtgagtaaacataatttattttgtttgataatgaaagagcattgccgtgttc

SEQ ID NO: 36287 - protein, 187 aa, Arabidopsis thaliana
  peptide (1)..(187): Ceres Seq. ID no. 12332384
  misc_feature (162)..(184): Homolog of NCBI NO: 30681959 NR Description: ethylene-responsive protein -related [Arabidopsis
  misc_feature (9)..(175): Homolog of NCBI NO: 30681959 NR Description: ethylene-responsive protein -related [Arabidopsis
  misc_feature (39)..(186): Homolog of NCBI NO: 25402571 NR Description: hypothetical protein [imported] - Arabidopsis
  misc_feature (20)..(184): Homolog of NCBI NO: 30694813 NR Description: expressed protein [Arabidopsis thaliana]
  misc_feature (9)..(184): Homolog of NCBI NO: 30681955 NR Description: ethylene-responsive protein -related [Arabidopsis
  misc_feature (9)..(184): Homolog of NCBI NO: 18399413 NR Description: ethylene-responsive protein, putative
  misc_feature (20)..(184): Homolog of NCBI NO: 30694811 NR Description: expressed protein [Arabidopsis thaliana]
  misc_feature (39)..(186): Homolog of NCBI NO: 30681321 NR Description: ER6 protein -related [Arabidopsis thaliana]
  misc_feature (36)..(184): Homolog of NCBI NO: 34914610 NR Description: P0520B06.18 [Oryza sativa (japonica
  misc_feature (28)..(187): Homolog of NCBI NO: 18408994 NR Description: expressed protein
NVIILTFLKEEKSNHQVIGAITEKKKTMAEEEKSVMKQVMVAIDESECSKRALQWTLVYLKDSLADSDIILFTAQPHLDLSCVYASSYGAAPIELINSLQESHKNAGLNRLDEGTKICAETGVTPRKVLEFGNPKEAICEAAEKLGVDMLVVGSHGKGALQRTFLGSVSNYCVNNAKCPVLVVRTKA

SEQ ID NO: 36288 - protein, 160 aa, Arabidopsis thaliana
  peptide (1)..(160): Ceres Seq. ID no. 12332385
  misc_feature (135)..(157): Homolog of NCBI NO: 30681959 NR Description: ethylene-responsive protein -related [Arabidopsis
  misc_feature (1)..(148): Homolog of NCBI NO: 30681959 NR Description: ethylene-responsive protein -related [Arabidopsis
  misc_feature (12)..(159): Homolog of NCBI NO: 25402571 NR Description: hypothetical protein [imported] - Arabidopsis
  misc_feature (1)..(157): Homolog of NCBI NO: 30694813 NR Description: expressed protein [Arabidopsis thaliana]
  misc_feature (1)..(157): Homolog of NCBI NO: 30681955 NR Description: ethylene-responsive protein -related [Arabidopsis
  misc_feature (1)..(157): Homolog of NCBI NO: 18399413 NR Description: ethylene-responsive protein, putative
  misc_feature (1)..(157): Homolog of NCBI NO: 30694811 NR Description: expressed protein [Arabidopsis thaliana]
  misc_feature (12)..(159): Homolog of NCBI NO: 30681321 NR Description: ER6 protein -related [Arabidopsis thaliana]
  misc_feature (9)..(157): Homolog of NCBI NO: 34914610 NR Description: P0520B06.18 [Oryza sativa (japonica
  misc_feature (1)..(160): Homolog of NCBI NO: 18408994 NR Description: expressed protein
MAEEEKSVMKQVMVAIDESECSKRALQWTLVYLKDSLADSDIILFTAQPHLDLSCVYASSYGAAPIELINSLQESHKNAGLNRLDEGTKICAETGVTPRKVLEFGNPKEAICEAAEKLGVDMLVVGSHGKGALQRTFLGSVSNYCVNNAKCPVLVVRTKA

SEQ ID NO: 36289 - protein, 152 aa, Arabidopsis thaliana
  peptide (1)..(152): Ceres Seq. ID no. 12332386
  misc_feature (127)..(149): Homolog of NCBI NO: 30681959 NR Description: ethylene-responsive protein -related [Arabidopsis
  misc_feature (1)..(140): Homolog of NCBI NO: 30681959 NR Description: ethylene-responsive protein -related [Arabidopsis
  misc_feature (4)..(151): Homolog of NCBI NO: 25402571 NR Description: hypothetical protein [imported] - Arabidopsis
  misc_feature (1)..(149): Homolog of NCBI NO: 30694813 NR Description: expressed protein [Arabidopsis thaliana]
  misc_feature (1)..(149): Homolog of NCBI NO: 30681955 NR Description: ethylene-responsive protein -related [Arabidopsis
  misc_feature (1)..(149): Homolog of NCBI NO: 18399413 NR Description: ethylene-responsive protein, putative
  misc_feature (1)..(149): Homolog of NCBI NO: 30694811 NR Description: expressed protein [Arabidopsis thaliana]
  misc_feature (4)..(151): Homolog of NCBI NO: 30681321 NR Description: ER6 protein -related [Arabidopsis thaliana]
  misc_feature (1)..(149): Homolog of NCBI NO: 34914610 NR Description: P0520B06.18 [Oryza sativa (japonica
  misc_feature (1)..(152): Homolog of NCBI NO: 18408994 NR Description: expressed protein
MKQVMVAIDESECSKRALQWTLVYLKDSLADSDIILFTAQPHLDLSCVYASSYGAAPIELINSLQESHKNAGLNRLDEGTKICAETGVTPRKVLEFGNPKEAICEAAEKLGVDMLVVGSHGKGALQRTFLGSVSNYCVNNAKCPVLVVRTKA

SEQ ID NO: 36290 - DNA, 1331 bp, Arabidopsis thaliana
  misc_feature (1)..(1331): Ceres Seq. ID no. 12330652
  misc_feature: MA Experiment ID: 108434 Result: Up-regulated in Transcription
  misc_feature: MA Experiment 108434 PARAMETER Experiment Name: At_Root_Tips_cDNA_P Parameter: Tissue Value: Root Tips
  misc_feature: MA Experiment ID: 108463 Result: Down-regulated in Transcription
  misc_feature: MA Experiment 108463 PARAMETER Experiment Name: At_Germinating_Seeds_cDNA_P Parameter: Age (day) Value: 3 vs. 0
  misc_feature: MA Experiment 108463 PARAMETER Experiment Name: At_Germinating_Seeds_cDNA_P Parameter: Tissue Value: Germinating Seeds
  misc_feature: MA Experiment ID: 108464 Result: Down-regulated in Transcription
  misc_feature: MA Experiment 108464 PARAMETER Experiment Name: At_Germinating_Seeds_cDNA_P Parameter: Age (day) Value: 4 vs. 0
  misc_feature: MA Experiment 108464 PARAMETER Experiment Name: At_Germinating_Seeds_cDNA_P Parameter: Tissue Value: Germinating Seeds
  misc_feature: MA Experiment ID: 108595 Result: Down-regulated in Transcription
  misc_feature: MA Experiment 108595 PARAMETER Experiment Name: At_Ler-pi_Ovule_cDNA_P Parameter: Plant Line Value: null
  misc_feature: MA Experiment ID: 20000224 Result: Up-regulated in Transcription
  misc_feature: MA Experiment ID: 20000227 Result: Up-regulated in Transcription
  misc_feature: MA Experiment 20000227 PARAMETER Experiment Name: At_Root-Tips-vs-Tops_P Parameter: Tissue Value: Root Tips vs. Root Tops
  misc_feature: MA Experiment ID: 20000234 Result: Up-regulated in Transcription
  misc_feature: MA Experiment 20000234 PARAMETER Experiment Name: At_Siliques_P Parameter: Age (day) Value: 21
  misc_feature: MA Experiment 20000234 PARAMETER Experiment Name: At_Siliques_P Parameter: Organism Value: A. thaliana
  misc_feature: MA Experiment 20000234 PARAMETER Experiment Name: At_Siliques_P Parameter: Plant Line Value: WS
  misc_feature: MA Experiment 20000234 PARAMETER Experiment Name: At_Siliques_P Parameter: Tissue Value: Less Than 5mm Siliques vs. Whole Plant
  misc_feature: MA Experiment ID: 20000264 Result: Up-regulated in Transcription
  misc_feature: MA Experiment 20000264 PARAMETER Experiment Name: At_Open_Flower_P Parameter: Age (day) Value: 21
  misc_feature: MA Experiment 20000264 PARAMETER Experiment Name: At_Open_Flower_P Parameter: Plant Line Value: WS
  misc_feature: MA Experiment 20000264 PARAMETER Experiment Name: At_Open_Flower_P Parameter: Tissue Value: Open Flower vs. Whole Plant
  misc_feature: MA Experiment ID: 20000265 Result: Up-regulated in Transcription
  misc_feature: MA Experiment 20000265 PARAMETER Experiment Name: At_Open_Flower_P Parameter: Age (day) Value: 21
  misc_feature: MA Experiment 20000265 PARAMETER Experiment Name: At_Open_Flower_P Parameter: Plant Line Value: WS
  misc_feature: MA Experiment 20000265 PARAMETER Experiment Name: At_Open_Flower_P Parameter: Tissue Value: Closed Flower vs. Whole Plant
  misc_feature: MA Experiment ID: 20000286 Result: Up-regulated in Transcription
  misc_feature: MA Experiment 20000286 PARAMETER Experiment Name: At_Open_Flower_P Parameter: Age (day) Value: 21
  misc_feature: MA Experiment 20000286 PARAMETER Experiment Name: At_Open_Flower_P Parameter: Plant Line Value: WS
  misc_feature: MA Experiment 20000286 PARAMETER Experiment Name: At_Open_Flower_P Parameter: Tissue Value: Half Open vs. Whole Plant
agcaccgtctccaatggcgggtttcagttctctaattcctagaacgcttctgaaacgcgccgttagtagcgcaacaagaaatctaacggcgccgttagcttctatttcagcagcaagaaatctcttcattggaggaggatgtgacgaaaattatggtgagccaggagtgttttctcattccaatggaataagaaagtacaccaccaccattggtaatactggctcactaactggtccttttcatcatcttctgggggtcaaccagacaaacaagcccgcctttttaagggtccaatctatgagctatcagtttgtcgctgattctcattcatctcctaaacgtattgtgaagaatgaggatgaggaagatttttctgattcatcaaagaagggaaacgctgaaaaccctaggaaacatcaaattggggagaacatacccaagaaggataaaataaagtttcttgtgaacactcttcttgatattgaagataataaagaggctgtttatggagctctggatgcttgggttgcttgggagcgcaatttccccattgcttccctcaaaatagtaatagctagtcttgaaaaggaacatcaatggcatcgaatggtccaggtgataaagtggatcctaagtaagggacaagggaacacgatggggacgtacggacagttgatacgggcgttagatatggatcgtagagcagaagaggctcatattatctggcgaaagaaagttgggaacgatctgcattctgtgccttggcaattatgcttacaaatgatgcgcatatatttccggaacaacatgttacaggaacttgttaagctattcaaggatctggagagttatgaccgtaagcctccggacaagcacattgtgcagaccgtggctgatgcttatgagcttttgggaatgcttgatgagaaagaacgggtagtgacgaagtatagccatcttttacttggtacaccatcggatgataaaccaagtagatcttcgaggaagaagaagaaaccagaactgaggattcctgaagcaaccacagtagatgcagcaaaagctgaattgcaagaagagctaaaagaaaatctggataatcaccaagaatcaaaagctgccactgagaaacaattcaaacatggagcgtaagttgtagtatttaatcgataaaagtgtcactgcacgagaaacatggactgtaaggatgtatttaattgagggattgttgacaatgctcacatcccttgggatttgtcgcaatggatggatatagagtttagggtttgagtgcggcactagtattactgatgataacaaaatcacattt

SEQ ID NO: 36291 - protein, 383 aa, Arabidopsis thaliana
  peptide (1)..(383): Ceres Seq. ID no. 12330653
  misc_feature (128)..(317): Homolog of NCBI NO: 34393638 NR Description: pentatricopeptide (PPR) repeat-containing
  misc_feature (165)..(317): Homolog of NCBI NO: 7486589 NR Description: hypothetical protein F7J7.130 - Arabidopsis
  misc_feature (153)..(374): Homolog of NCBI NO: 34909686 NR Description: B1131G08.1 [Oryza sativa (japonica
  misc_feature (154)..(347): Homolog of NCBI NO: 7485419 NR Description: hypothetical protein F13C5.140 - Arabidopsis
  misc_feature (99)..(317): Homolog of NCBI NO: 18415645 NR Description: putative protein
  misc_feature (93)..(317): Homolog of NCBI NO: 18415213 NR Description: putative protein; protein id: At4g18975.1
  misc_feature (5)..(158): Homolog of NCBI NO: 25406795 NR Description: hypothetical protein [imported] - Arabidopsis
  misc_feature (158)..(383): Homolog of NCBI NO: 25406795 NR Description: hypothetical protein [imported] - Arabidopsis
  misc_feature (5)..(383): Homolog of NCBI NO: 30678929 NR Description: expressed protein [Arabidopsis thaliana]
  misc_feature (5)..(383): Homolog of NCBI NO: 18390413 NR Description: expressed protein
  misc_feature (128)..(317): Homolog of NCBI NO: 34393638 NR Description: pentatricopeptide (PPR) repeat-containing
  misc_feature (165)..(317): Homolog of NCBI NO: 7486589 NR Description: hypothetical protein F7J7.130 - Arabidopsis
  misc_feature (153)..(374): Homolog of NCBI NO: 34909686 NR Description: B1131G08.1 [Oryza sativa (japonica
  misc_feature (154)..(347): Homolog of NCBI NO: 7485419 NR Description: hypothetical protein F13C5.140 - Arabidopsis
  misc_feature (99)..(317): Homolog of NCBI NO: 18415645 NR Description: putative protein
  misc_feature (93)..(317): Homolog of NCBI NO: 18415213 NR Description: putative protein; protein id: At4g18975.1
  misc_feature (5)..(158): Homolog of NCBI NO: 25406795 NR Description: hypothetical protein [imported] - Arabidopsis
  misc_feature (158)..(383): Homolog of NCBI NO: 25406795 NR Description: hypothetical protein [imported] - Arabidopsis
  misc_feature (5)..(383): Homolog of NCBI NO: 30678929 NR Description: expressed protein [Arabidopsis thaliana]
  misc_feature (5)..(383): Homolog of NCBI NO: 18390413 NR Description: expressed protein
APSPMAGFSSLIPRTLLKRAVSSATRNLTAPLASISAARNLFIGGGCDENYGEPGVFSHSNGIRKYTTTIGNTGSLTGPFHHLLGVNQTNKPAFLRVQSMSYQFVADSHSSPKRIVKNEDEEDFSDSSKKGNAENPRKHQIGENIPKKDKIKFLVNTLLDIEDNKEAVYGALDAWVAWERNFPIASLKIVIASLEKEHQWHRMVQVIKWILSKGQGNTMGTYGQLIRALDMDRRAEEAHIIWRKKVGNDLHSVPWQLCLQMMRIYFRNNMLQELVKLFKDLESYDRKPPDKHIVQTVADAYELLGMLDEKERVVTKYSHLLLGTPSDDKPSRSSRKKKKPELRIPEATTVDAAKAELQEELKENLDNHQESKAATEKQFKHGA

SEQ ID NO: 36292 - protein, 379 aa, Arabidopsis thaliana
  peptide (1)..(379): Ceres Seq. ID no. 12330654
  misc_feature (124)..(313): Homolog of NCBI NO: 34393638 NR Description: pentatricopeptide (PPR) repeat-containing
  misc_feature (161)..(313): Homolog of NCBI NO: 7486589 NR Description: hypothetical protein F7J7.130 - Arabidopsis
  misc_feature (149)..(370): Homolog of NCBI NO: 34909686 NR Description: B1131G08.1 [Oryza sativa (japonica
  misc_feature (150)..(343): Homolog of NCBI NO: 7485419 NR Description: hypothetical protein F13C5.140 - Arabidopsis
  misc_feature (95)..(313): Homolog of NCBI NO: 18415645 NR Description: putative protein
  misc_feature (89)..(313): Homolog of NCBI NO: 18415213 NR Description: putative protein; protein id: At4g18975.1
  misc_feature (1)..(154): Homolog of NCBI NO: 25406795 NR Description: hypothetical protein [imported] - Arabidopsis
  misc_feature (154)..(379): Homolog of NCBI NO: 25406795 NR Description: hypothetical protein [imported] - Arabidopsis
  misc_feature (1)..(379): Homolog of NCBI NO: 30678929 NR Description: expressed protein [Arabidopsis thaliana]
  misc_feature (1)..(379): Homolog of NCBI NO: 18390413 NR Description: expressed protein
  misc_feature (124)..(313): Homolog of NCBI NO: 34393638 NR Description: pentatricopeptide (PPR) repeat-containing
  misc_feature (161)..(313): Homolog of NCBI NO: 7486589 NR Description: hypothetical protein F7J7.130 - Arabidopsis
  misc_feature (149)..(370): Homolog of NCBI NO: 34909686 NR Description: B1131G08.1 [Oryza sativa (japonica
  misc_feature (150)..(343): Homolog of NCBI NO: 7485419 NR Description: hypothetical protein F13C5.140 - Arabidopsis
  misc_feature (95)..(313): Homolog of NCBI NO: 18415645 NR Description: putative protein
  misc_feature (89)..(313): Homolog of NCBI NO: 18415213 NR Description: putative protein; protein id: At4g18975.1
  misc_feature (1)..(154): Homolog of NCBI NO: 25406795 NR Description: hypothetical protein [imported] - Arabidopsis
  misc_feature (154)..(379): Homolog of NCBI NO: 25406795 NR Description: hypothetical protein [imported] - Arabidopsis
  misc_feature (1)..(379): Homolog of NCBI NO: 30678929 NR Description: expressed protein [Arabidopsis thaliana]
  misc_feature (1)..(379): Homolog of NCBI NO: 18390413 NR Description: expressed protein
MAGFSSLIPRTLLKRAVSSATRNLTAPLASISAARNLFIGGGCDENYGEPGVFSHSNGIRKYTTTIGNTGSLTGPFHHLLGVNQTNKPAFLRVQSMSYQFVADSHSSPKRIVKNEDEEDFSDSSKKGNAENPRKHQIGENIPKKDKIKFLVNTLLDIEDNKEAVYGALDAWVAWERNFPIASLKIVIASLEKEHQWHRMVQVIKWILSKGQGNTMGTYGQLIRALDMDRRAEEAHIIWRKKVGNDLHSVPWQLCLQMMRIYFRNNMLQELVKLFKDLESYDRKPPDKHIVQTVADAYELLGMLDEKERVVTKYSHLLLGTPSDDKPSRSSRKKKKPELRIPEATTVDAAKAELQEELKENLDNHQESKAATEKQFKHGA

SEQ ID NO: 36293 - protein, 284 aa, Arabidopsis thaliana
  peptide (1)..(284): Ceres Seq. ID no. 12330655
  misc_feature (29)..(218): Homolog of NCBI NO: 34393638 NR Description: pentatricopeptide (PPR) repeat-containing
  misc_feature (66)..(218): Homolog of NCBI NO: 7486589 NR Description: hypothetical protein F7J7.130 - Arabidopsis
  misc_feature (54)..(275): Homolog of NCBI NO: 34909686 NR Description: B1131G08.1 [Oryza sativa (japonica
  misc_feature (55)..(248): Homolog of NCBI NO: 7485419 NR Description: hypothetical protein F13C5.140 - Arabidopsis
  misc_feature (1)..(218): Homolog of NCBI NO: 18415645 NR Description: putative protein
  misc_feature (1)..(218): Homolog of NCBI NO: 18415213 NR Description: putative protein; protein id: At4g18975.1
  misc_feature (1)..(59): Homolog of NCBI NO: 25406795 NR Description: hypothetical protein [imported] - Arabidopsis
  misc_feature (59)..(284): Homolog of NCBI NO: 25406795 NR Description: hypothetical protein [imported] - Arabidopsis
  misc_feature (1)..(284): Homolog of NCBI NO: 30678929 NR Description: expressed protein [Arabidopsis thaliana]
  misc_feature (1)..(284): Homolog of NCBI NO: 18390413 NR Description: expressed protein
  misc_feature (29)..(218): Homolog of NCBI NO: 34393638 NR Description: pentatricopeptide (PPR) repeat-containing
  misc_feature (66)..(218): Homolog of NCBI NO: 7486589 NR Description: hypothetical protein F7J7.130 - Arabidopsis
  misc_feature (54)..(275): Homolog of NCBI NO: 34909686 NR Description: B1131G08.1 [Oryza sativa (japonica
  misc_feature (55)..(248): Homolog of NCBI NO: 7485419 NR Description: hypothetical protein F13C5.140 - Arabidopsis
  misc_feature (1)..(218): Homolog of NCBI NO: 18415645 NR Description: putative protein
  misc_feature (1)..(218): Homolog of NCBI NO: 18415213 NR Description: putative protein; protein id: At4g18975.1
  misc_feature (1)..(59): Homolog of NCBI NO: 25406795 NR Description: hypothetical protein [imported] - Arabidopsis
  misc_feature (59)..(284): Homolog of NCBI NO: 25406795 NR Description: hypothetical protein [imported] - Arabidopsis
  misc_feature (1)..(284): Homolog of NCBI NO: 30678929 NR Description: expressed protein [Arabidopsis thaliana]
  misc_feature (1)..(284): Homolog of NCBI NO: 18390413 NR Description: expressed protein
MSYQFVADSHSSPKRIVKNEDEEDFSDSSKKGNAENPRKHQIGENIPKKDKIKFLVNTLLDIEDNKEAVYGALDAWVAWERNFPIASLKIVIASLEKEHQWHRMVQVIKWILSKGQGNTMGTYGQLIRALDMDRRAEEAHIIWRKKVGNDLHSVPWQLCLQMMRIYFRNNMLQELVKLFKDLESYDRKPPDKHIVQTVADAYELLGMLDEKERVVTKYSHLLLGTPSDDKPSRSSRKKKKPELRIPEATTVDAAKAELQEELKENLDNHQESKAATEKQFKHGA

SEQ ID NO: 36294 - DNA, 710 bp, Arabidopsis thaliana
  misc_feature (1)..(710): Ceres Seq. ID no. 12323075
  misc_feature: MA Experiment ID: 108434 Result: Up-regulated in Transcription
  misc_feature: MA Experiment 108434 PARAMETER Experiment Name: At_Root_Tips_cDNA_P Parameter: Tissue Value: Root Tips
  misc_feature: MA Experiment ID: 108461 Result: Up-regulated in Transcription
  misc_feature: MA Experiment 108461 PARAMETER Experiment Name: At_Germinating_Seeds_cDNA_P Parameter: Age (day) Value: 1 vs. 0
  misc_feature: MA Experiment 108461 PARAMETER Experiment Name: At_Germinating_Seeds_cDNA_P Parameter: Tissue Value: Germinating Seeds
  misc_feature: MA Experiment ID: 108462 Result: Up-regulated in Transcription
  misc_feature: MA Experiment 108462 PARAMETER Experiment Name: At_Germinating_Seeds_cDNA_P Parameter: Age (day) Value: 2 vs. 0
  misc_feature: MA Experiment 108462 PARAMETER Experiment Name: At_Germinating_Seeds_cDNA_P Parameter: Tissue Value: Germinating Seeds
  misc_feature: MA Experiment ID: 108464 Result: Up-regulated in Transcription
  misc_feature: MA Experiment 108464 PARAMETER Experiment Name: At_Germinating_Seeds_cDNA_P Parameter: Age (day) Value: 4 vs. 0
  misc_feature: MA Experiment 108464 PARAMETER Experiment Name: At_Germinating_Seeds_cDNA_P Parameter: Tissue Value: Germinating Seeds
  misc_feature: MA Experiment ID: 108489 Result: Down-regulated in Transcription
  misc_feature: MA Experiment ID: 108577 Result: Down-regulated in Transcription
  misc_feature: MA Experiment 108577 PARAMETER Experiment Name: At_42deg_Heat_cDNA_P Parameter: Temperature (deg C) Value: 42 vs. 22
  misc_feature: MA Experiment 108577 PARAMETER Experiment Name: At_42deg_Heat_cDNA_P Parameter: Timepoint (hr) Value: 6
  misc_feature: MA Experiment 108577 PARAMETER Experiment Name: At_42deg_Heat_cDNA_P Parameter: Tissue Value: Aerial
  misc_feature: MA Experiment ID: 20000179 Result: Up-regulated in Transcription
  misc_feature: MA Experiment 20000179 PARAMETER Experiment Name: At_Germinating_Seeds_P Parameter: Age (hr) Value: 6 vs. 0
  misc_feature: MA Experiment 20000179 PARAMETER Experiment Name: At_Germinating_Seeds_P Parameter: Tissue Value: Germinating Seeds
  misc_feature: MA Experiment ID: 20000180 Result: Up-regulated in Transcription
  misc_feature: MA Experiment 20000180 PARAMETER Experiment Name: At_Germinating_Seeds_P Parameter: Age (hr) Value: 24 vs. 0
  misc_feature: MA Experiment 20000180 PARAMETER Experiment Name: At_Germinating_Seeds_P Parameter: Tissue Value: Germinating Seeds
  misc_feature: MA Experiment ID: 20000214 Result: Down-regulated in Transcription
  misc_feature: MA Experiment 20000214 PARAMETER Experiment Name: At_4deg_Cold_P Parameter: Timepoint (hr) Value: 6
  misc_feature: MA Experiment ID: 20000224 Result: Down-regulated in Transcription
agaccaaaaaagcggttggtgtaagatcccaaactcacagattcccaaataatagtaatactcttcctcttctcaactctcaccagtcaccagcagatcatcggagatgggcggagacggaaaagttttcaccttgtccgaggtttctcagcacagtagcgccaaggattgttggatcgtcatcgacggcaaggtttatgatgtgacaaagttcttggatgatcatcctggtggtgatgaggttatcttgacttctacagggaaagatgcgaccgatgatttcgaggatgtgggacatagttcgactgcgaaagccatgctagatgagtactatgtgggtgatattgacacagctactgtgccggttaaagctaagtttgtgcctcctacgtcgacgaaagccgtggctactcaggataagagctcggattttgttattaagctccttcagttccttgttccacttctaatcttaggcttggctttcggcattcggtactacactaagaccaaggctccttcttcttgaaagattgaattgtggcctaagtgaattgcttgtgtacgacgtggttaaactctgtctctacctctgtttgtcttgtaagacatcattatattctctattccaatcaactgatagacctttgatttttaagccatctacctttgttgtcttatatcaatcaaatccatttacaatatcactc

SEQ ID NO: 36295 - protein, 140 aa, Arabidopsis thaliana
  peptide (1)..(140): Ceres Seq. ID no. 12323076
  misc_feature (7)..(81): Pfam Name: Cytochrome b5-like Heme/Steroid binding domain Pfam Description: Cytochrome b5-like Heme/Steroid binding domain
  misc_feature (1)..(139): Homolog of NCBI NO: 12230015 NR Description: Cytochrome b5 outer mitochondrial membrane
  misc_feature (1)..(137): Homolog of NCBI NO: 1345881 NR Description: Cytochrome b5
  misc_feature (1)..(137): Homolog of NCBI NO: 14719320 NR Description: cytochrome B5 [Oryza sativa]
  misc_feature (1)..(135): Homolog of NCBI NO: 15225731 NR Description: putative cytochrome b5; protein id: At2g32720.1
  misc_feature (5)..(137): Homolog of NCBI NO: 12229735 NR Description: Cytochrome b5
  misc_feature (1)..(137): Homolog of NCBI NO: 1345925 NR Description: Cytochrome b5, seed isoform
  misc_feature (6)..(137): Homolog of NCBI NO: 2647949 NR Description: cytochrome b5 [Olea europaea]
  misc_feature (1)..(134): Homolog of NCBI NO: 1345882 NR Description: CYTOCHROME B5
  misc_feature (1)..(134): Homolog of NCBI NO: 1076621 NR Description: cytochrome b5 - common tobacco
  misc_feature (1)..(140): Homolog of NCBI NO: 15239718 NR Description: cytochrome b5 (dbj|BAA74840.1)
MGGDGKVFTLSEVSQHSSAKDCWIVIDGKVYDVTKFLDDHPGGDEVILTSTGKDATDDFEDVGHSSTAKAMLDEYYVGDIDTATVPVKAKFVPPTSTKAVATQDKSSDFVIKLLQFLVPLLILGLAFGIRYYTKTKAPSS

SEQ ID NO: 36296 - protein, 70 aa, Arabidopsis thaliana; identical to SEQ ID NO: 26075
  peptide (1)..(70): Ceres Seq. ID no. 12323077
  misc_feature (1)..(69): Homolog of NCBI NO: 12230015 NR Description: Cytochrome b5 outer mitochondrial membrane
  misc_feature (1)..(67): Homolog of NCBI NO: 1345881 NR Description: Cytochrome b5
  misc_feature (1)..(67): Homolog of NCBI NO: 14719320 NR Description: cytochrome B5 [Oryza sativa]
  misc_feature (1)..(65): Homolog of NCBI NO: 15225731 NR Description: putative cytochrome b5; protein id: At2g32720.1
  misc_feature (1)..(67): Homolog of NCBI NO: 12229735 NR Description: Cytochrome b5
  misc_feature (1)..(67): Homolog of NCBI NO: 1345925 NR Description: Cytochrome b5, seed isoform
  misc_feature (1)..(67): Homolog of NCBI NO: 2647949 NR Description: cytochrome b5 [Olea europaea]
  misc_feature (1)..(64): Homolog of NCBI NO: 1345882 NR Description: CYTOCHROME B5
  misc_feature (1)..(64): Homolog of NCBI NO: 1076621 NR Description: cytochrome b5 - common tobacco
  misc_feature (1)..(70): Homolog of NCBI NO: 15239718 NR Description: cytochrome b5 (dbj|BAA74840.1)

SEQ ID NO: 36297 - DNA, 625 bp, Arabidopsis thaliana
  misc_feature (1)..(625): Ceres Seq. ID no. 12340167
  misc_feature: MA Experiment ID: 108434 Result: Up-regulated in Transcription
  misc_feature: MA Experiment 108434 PARAMETER Experiment Name: At_Root_Tips_cDNA_P Parameter: Tissue Value: Root Tips
  misc_feature: MA Experiment ID: 108462 Result: Down-regulated in Transcription
  misc_feature: MA Experiment 108462 PARAMETER Experiment Name: At_Germinating_Seeds_cDNA_P Parameter: Age (day) Value: 2 vs. 0
  misc_feature: MA Experiment 108462 PARAMETER Experiment Name: At_Germinating_Seeds_cDNA_P Parameter: Tissue Value: Germinating Seeds
  misc_feature: MA Experiment ID: 108463 Result: Down-regulated in Transcription
  misc_feature: MA Experiment 108463 PARAMETER Experiment Name: At_Germinating_Seeds_cDNA_P Parameter: Age (day) Value: 3 vs. 0
  misc_feature: MA Experiment 108463 PARAMETER Experiment Name: At_Germinating_Seeds_cDNA_P Parameter: Tissue Value: Germinating Seeds
  misc_feature: MA Experiment ID: 108464 Result: Down-regulated in Transcription
  misc_feature: MA Experiment 108464 PARAMETER Experiment Name: At_Germinating_Seeds_cDNA_P Parameter: Age (day) Value: 4 vs. 0
  misc_feature: MA Experiment 108464 PARAMETER Experiment Name: At_Germinating_Seeds_cDNA_P Parameter: Tissue Value: Germinating Seeds
  misc_feature: MA Experiment ID: 108577 Result: Down-regulated in Transcription
  misc_feature: MA Experiment 108577 PARAMETER Experiment Name: At_42deg_Heat_cDNA_P Parameter: Temperature (deg C) Value: 42 vs. 22
  misc_feature: MA Experiment 108577 PARAMETER Experiment Name: At_42deg_Heat_cDNA_P Parameter: Timepoint (hr) Value: 6
  misc_feature: MA Experiment 108577 PARAMETER Experiment Name: At_42deg_Heat_cDNA_P Parameter: Tissue Value: Aerial
  misc_feature: MA Experiment ID: 108579 Result: Up-regulated in Transcription
  misc_feature: MA Experiment 108579 PARAMETER Experiment Name: At_4deg_Cold_cDNA_P Parameter: Temperature (deg C) Value: 4 vs. 22
  misc_feature: MA Experiment 108579 PARAMETER Experiment Name: At_4deg_Cold_cDNA_P Parameter: Timepoint (hr) Value: 6
  misc_feature: MA Experiment 108579 PARAMETER Experiment Name: At_4deg_Cold_cDNA_P Parameter: Tissue Value: Aerial
  misc_feature: MA Experiment ID: 20000087 Result: Up-regulated in Transcription
  misc_feature: MA Experiment 20000087 PARAMETER Experiment Name: At_100uM_ABA_Mutants_cDNA_P Parameter: Plant Line Value: WS
  misc_feature: MA Experiment 20000087 PARAMETER Experiment Name: At_100uM_ABA_Mutants_cDNA_P Parameter: Timepoint (hr) Value: 6
  misc_feature: MA Experiment 20000087 PARAMETER Experiment Name: At_100uM_ABA_Mutants_cDNA_P Parameter: Tissue Value: Aerial
  misc_feature: MA Experiment 20000087 PARAMETER Experiment Name: At_100uM_ABA_Mutants_cDNA_P Parameter: Treatment Value: 100uM ABA vs. No Treatment
  misc_feature: MA Experiment ID: 20000111 Result: Down-regulated in Transcription
  misc_feature: MA Experiment 20000111 PARAMETER Experiment Name: At_42deg_Heat_cDNA_P Parameter: Temperature (deg C) Value: 42 vs. 22
  misc_feature: MA Experiment 20000111 PARAMETER Experiment Name: At_42deg_Heat_cDNA_P Parameter: Timepoint (hr) Value: 6
  misc_feature: MA Experiment 20000111 PARAMETER Experiment Name: At_42deg_Heat_cDNA_P Parameter: Tissue Value: Aerial
  misc_feature: MA Experiment ID: 20000113 Result: Down-regulated in Transcription
  misc_feature: MA Experiment 20000113 PARAMETER Experiment Name: At_42deg_Heat_cDNA_P Parameter: Temperature (deg C) Value: 42 vs. 22
  misc_feature: MA Experiment 20000113 PARAMETER Experiment Name: At_42deg_Heat_cDNA_P Parameter: Timepoint (hr) Value: 8
  misc_feature: MA Experiment 20000113 PARAMETER Experiment Name: At_42deg_Heat_cDNA_P Parameter: Tissue Value: Aerial
  misc_feature: MA Experiment ID: 20000173 Result: Down-regulated in Transcription
  misc_feature: MA Experiment 20000173 PARAMETER Experiment Name: At_42deg_Heat_P Parameter: Age (day) Value: 14
  misc_feature: MA Experiment 20000173 PARAMETER Experiment Name: At_42deg_Heat_P Parameter: Organism Value: A. thaliana
  misc_feature: MA Experiment 20000173 PARAMETER Experiment Name: At_42deg_Heat_P Parameter: Plant Line Value: WS
  misc_feature: MA Experiment 20000173 PARAMETER Experiment Name: At_42deg_Heat_P Parameter: Temperature (deg C) Value: 42 vs. 22
  misc_feature: MA Experiment 20000173 PARAMETER Experiment Name: At_42deg_Heat_P Parameter: Timepoint (hr) Value: 6
  misc_feature: MA Experiment 20000173 PARAMETER Experiment Name: At_42deg_Heat_P Parameter: Tissue Value: Aerial
  misc_feature: MA Experiment ID: 20000185 Result: Up-regulated in Transcription
  misc_feature: MA Experiment 20000185 PARAMETER Experiment Name: At_Roots__P Parameter: Age (day) Value: 7 vs. 21
  misc_feature: MA Experiment 20000185 PARAMETER Experiment Name: At_Roots__P Parameter: Organism Value: A. thaliana
  misc_feature: MA Experiment 20000185 PARAMETER Experiment Name: At_Roots__P Parameter: Tissue Value: Roots vs. Whole Plant
  misc_feature: MA Experiment ID: 20000224 Result: Up-regulated in Transcription
  misc_feature: MA Experiment ID: 20000227 Result: Up-regulated in Transcription
  misc_feature: MA Experiment 20000227 PARAMETER Experiment Name: At_Root-Tips-vs-Tops_P Parameter: Tissue Value: Root Tips vs. Root Tops
  misc_feature: MA Experiment ID: 20000234 Result: Up-regulated in Transcription
  misc_feature: MA Experiment 20000234 PARAMETER Experiment Name: At_Siliques_P Parameter: Age (day) Value: 21
  misc_feature: MA Experiment 20000234 PARAMETER Experiment Name: At_Siliques_P Parameter: Organism Value: A. thaliana
  misc_feature: MA Experiment 20000234 PARAMETER Experiment Name: At_Siliques_P Parameter: Plant Line Value: WS
  misc_feature: MA Experiment 20000234 PARAMETER Experiment Name: At_Siliques_P Parameter: Tissue Value: Less Than 5mm Siliques vs. Whole Plant
  misc_feature: MA Experiment ID: 20000264 Result: Up-regulated in Transcription
  misc_feature: MA Experiment 20000264 PARAMETER Experiment Name: At_Open_Flower_P Parameter: Age (day) Value: 21
  misc_feature: MA Experiment 20000264 PARAMETER Experiment Name: At_Open_Flower_P Parameter: Plant Line Value: WS
  misc_feature: MA Experiment 20000264 PARAMETER Experiment Name: At_Open_Flower_P Parameter: Tissue Value: Open Flower vs. Whole Plant
  misc_feature: MA Experiment ID: 20000265 Result: Up-regulated in Transcription
  misc_feature: MA Experiment 20000265 PARAMETER Experiment Name: At_Open_Flower_P Parameter: Age (day) Value: 21
  misc_feature: MA Experiment 20000265 PARAMETER Experiment Name: At_Open_Flower_P Parameter: Plant Line Value: WS
  misc_feature: MA Experiment 20000265 PARAMETER Experiment Name: At_Open_Flower_P Parameter: Tissue Value: Closed Flower vs. Whole Plant
  misc_feature: MA Experiment ID: 20000286 Result: Up-regulated in Transcription
  misc_feature: MA Experiment 20000286 PARAMETER Experiment Name: At_Open_Flower_P Parameter: Age (day) Value: 21
  misc_feature: MA Experiment 20000286 PARAMETER Experiment Name: At_Open_Flower_P Parameter: Plant Line Value: WS
  misc_feature: MA Experiment 20000286 PARAMETER Experiment Name: At_Open_Flower_P Parameter: Tissue Value: Half Open vs. Whole Plant
  misc_feature: MA Experiment ID: 20000439 Result: Up-regulated in Transcription
  misc_feature: MA Experiment 20000439 PARAMETER Experiment Name: At_Roots__P Parameter: Age (day) Value: 14 vs. 21
  misc_feature: MA Experiment 20000439 PARAMETER Experiment Name: At_Roots__P Parameter: Organism Value: A. thaliana
  misc_feature: MA Experiment 20000439 PARAMETER Experiment Name: At_Roots__P Parameter: Tissue Value: Roots vs. Whole Plant
attactcactcatacgctctctcgtcaaaccaaaaaaaaaaacctaaaagaaacttcgaaatgaaaggcggcgaatccaaagctgaagcaacgagcactgatcagagactcaaaaccagaggtagaaaggctgggaagaagacgaagaaggatccaaatcaacctaagagacctccaagtgctttcttcgtcttccttgaggatttccggaaagagtttaacctagcgaatcctaataacaaatccgtcgctactgttggtaaggctgctggagctagatggaagtcaatgactgatgaagataaagctccttacgtcgccaaggctgagagcagaaagactgaatatattaagaatgtgcaacagtacaacttgaaactggctagtggaaccaatagagaagaggatgactctgacaaatctaagtctgaggtggatgaagcagtaagcgaagaggaggcagaagacgacgattgaagcatctaggtcttgctattgacttgactcagatttgagaatgtaaacttgcttaggtttatgaccaaaaactttttaaatactcttatttatgctttgtgtttgtgatatttgaacctcatttgctacatcaatgttgttttaggcc

SEQ ID NO: 36298 - protein, 158 aa, Arabidopsis thaliana
  peptide (1)..(158): Ceres Seq. ID no. 12340168
  misc_feature (55)..(124): Pfam Name: HMG (high mobility group) box Pfam Description: HMG (high mobility group) box
  misc_feature (21)..(147): Homolog of NCBI NO: 15237040 NR Description: HMG delta protein
  misc_feature (21)..(158): Homolog of NCBI NO: 13877775 NR Description: putative HMG protein [Arabidopsis thaliana]
  misc_feature (21)..(158): Homolog of NCBI NO: 11346367 NR Description: high mobility group protein HMG-gamma
  misc_feature (21)..(158): Homolog of NCBI NO: 21592453 NR Description: putative HMG protein [Arabidopsis thaliana]
  misc_feature (21)..(158): Homolog of NCBI NO: 15227862 NR Description: putative HMG protein
ITHSYALSSNQKKKPKRNFEMKGGESKAEATSTDQRLKTRGRKAGKKTKKDPNQPKRPPSAFFVFLEDFRKEFNLANPNNKSVATVGKAAGARWKSMTDEDKAPYVAKAESRKTEYIKNVQQYNLKLASGTNREEDDSDKSKSEVDEAVSEEEAEDDD

SEQ ID NO: 36299 - protein, 138 aa, Arabidopsis thaliana
  peptide (1)..(138): Ceres Seq. ID no. 12340169
  misc_feature (35)..(104): Pfam Name: HMG (high mobility group) box Pfam Description: HMG (high mobility group) box
  misc_feature (1)..(127): Homolog of NCBI NO: 15237040 NR Description: HMG delta protein
  misc_feature (1)..(138): Homolog of NCBI NO: 13877775 NR Description: putative HMG protein [Arabidopsis thaliana]
  misc_feature (1)..(138): Homolog of NCBI NO: 11346367 NR Description: high mobility group protein HMG-gamma
  misc_feature (1)..(138): Homolog of NCBI NO: 21592453 NR Description: putative HMG protein [Arabidopsis thaliana]
  misc_feature (1)..(138): Homolog of NCBI NO: 15227862 NR Description: putative HMG protein
MKGGESKAEATSTDQRLKTRGRKAGKKTKKDPNQPKRPPSAFFVFLEDFRKEFNLANPNNKSVATVGKAAGARWKSMTDEDKAPYVAKAESRKTEYIKNVQQYNLKLASGTNREEDDSDKSKSEVDEAVSEEEAEDDD

SEQ ID NO: 36300 - DNA, 1726 bp, Arabidopsis thaliana
  misc_feature (1)..(1726): Ceres Seq. ID no. 13494641
  misc_feature: MA Experiment ID: 20000182 Result: Up-regulated in Transcription
  misc_feature: MA Experiment 20000182 PARAMETER Experiment Name: At_2mM_SA_P Parameter: Age (day) Value: 14
  misc_feature: MA Experiment 20000182 PARAMETER Experiment Name: At_2mM_SA_P Parameter: Organism Value: A. thaliana
  misc_feature: MA Experiment 20000182 PARAMETER Experiment Name: At_2mM_SA_P Parameter: Plant Line Value: WS
  misc_feature: MA Experiment 20000182 PARAMETER Experiment Name: At_2mM_SA_P Parameter: Timepoint (hr) Value: 6
  misc_feature: MA Experiment 20000182 PARAMETER Experiment Name: At_2mM_SA_P Parameter: Tissue Value: Aerial
  misc_feature: MA Experiment 20000182 PARAMETER Experiment Name: At_2mM_SA_P Parameter: Treatment Value: 2mM SA vs. No Treatment
  misc_feature: MA Experiment ID: 20000234 Result: Up-regulated in Transcription
  misc_feature: MA Experiment 20000234 PARAMETER Experiment Name: At_Siliques_P Parameter: Age (day) Value: 21
  misc_feature: MA Experiment 20000234 PARAMETER Experiment Name: At_Siliques_P Parameter: Organism Value: A. thaliana
  misc_feature: MA Experiment 20000234 PARAMETER Experiment Name: At_Siliques_P Parameter: Plant Line Value: WS
  misc_feature: MA Experiment 20000234 PARAMETER Experiment Name: At_Siliques_P Parameter: Tissue Value: Less Than 5mm Siliques vs. Whole Plant
acaagaagaatattcacagagaagagagagcgataataatggcgtttaagggtttcgcgtgtttttcgattcttttgttgttgtctctattcgtttcctctatacgaagcgaggagacgaaggaatttgtcttgactctcgatcactctaacttcaccgaaaccatctccaagcacgatttcatcgtcgtcgagttctacgccccttggtgtggtcactgccagaagcttgctcctgagtacgagaaggctgcatcagagttgagtagtcataaccctcctcttgctctcgccaagatcgatgctagtgaagaagcaaacaaagaatttgctaatgagtacaagattcagggtttccccactcttaagattttgagaaatggagggaagtcggttcaagattacaacggacctcgtgaagctgagggtattgtcacttatttgaagaagcaaagtggtcctgcttctgttgaaattaagtcagctgattctgccactgaggttgttggtgaaaagaatgttgttgctgttggagtgttccctaaattatccggggatgagtttgattctttcatggcccttgctgagaaattgcgtgctgactatgatttcgcacacactttggatgctaagtttcttcctcgtggagagtctgtggaaggacctgcagtgaggctgttcaagccttttgatgaattgtttgttgactccaaggacttcaatggggaagctctagagaaatttgtcaaagaatcaagtatcccacttgtcaccgtctttgacagtgatccaaacaaccacccttatgttgccaaattctttgaaagccctgccactaaggcgatgatgttcgttaacttcactggagcaacagctgaagctctaaaatcaaagtaccgtgaagtagctacatccaacaaagatcaaagtcttgccttccttgttggtgatgcagagagcagccaaggcgctttccagtactttggactcgaagagagccaagttcccctcatcatcatccagaccccagataacaagaagtatttgaaagtcaacgttgaggttgaccagattgaatcatggttcaaggacttccaggacggaaaagttgctgtccacaaaaaatcccaacctattccagctgagaacaacgaacctgtgaaggttgttgttgccgagagccttgacgacatagttttcaagtctggaaagaatgtcttgattgagttctatgcaccatggtgtggacattgtcaaaaacttgctccaatcttggacgaagtggctttgtcattccagaacgacccaagtgtgatcatagcaaaattggacgcaaccgcaaatgatatcccaagtgataccttcgatgtgaaaggattcccgaccatttacttcaggtcagcgagcggaaatgttgtagtgtacgaaggagacaggacaaaggaagacttcataaacttcgttgagaagaacagtgagaagaagccaacttctcatggagaagagtctaccaagagtgaggaacctaagaagaccgaggaaacggccgcaaaggacgagctgtagaaatctcatgagttttgtttcggaatttgagtaggagcgtttctcttcttcaccatatccaacagaatcttcttttttctttagcagttttacagttttatcttttttgctctcttgttcgaacccaaaattatccccattaataaaaagttaaacctaat

SEQ ID NO: 36301 - protein, 520 aa, Arabidopsis thaliana
  peptide (1)..(520): Ceres Seq. ID no. 13494642
  misc_feature (40)..(369): Pfam Name: Calsequestrin Pfam Description: Calsequestrin
  misc_feature (22)..(520): Homolog of NCBI NO: 12056115 NR Description: protein disulfide isomerase [Triticum turgidum
  misc_feature (19)..(520): Homolog of NCBI NO: 13925728 NR Description: protein disulfide isomerase 3 precursor [Triticum
  misc_feature (13)..(520): Homolog of NCBI NO: 1709619 NR Description: Protein disulfide isomerase precursor (PDI)
  misc_feature (14)..(493): Homolog of NCBI NO: 11133775 NR Description: Protein disulfide isomerase precursor (PDI)
  misc_feature (20)..(515): Homolog of NCBI NO: 11133818 NR Description: Protein disulfide isomerase precursor (PDI)
  misc_feature (16)..(520): Homolog of NCBI NO: 99992 NR Description: protein disulfide-isomerase (EC 5.3.4.1)
  misc_feature (16)..(520): Homolog of NCBI NO: 266743 NR Description: Protein disulfide isomerase precursor (PDI)
  misc_feature (13)..(494): Homolog of NCBI NO: 30687521 NR Description: protein disulfide isomerase, putative
  misc_feature (13)..(520): Homolog of NCBI NO: 15219086 NR Description: protein disulfide isomerase, putative
  misc_feature (13)..(520): Homolog of NCBI NO: 15223975 NR Description: protein disulfide isomerase, putative
KKNIHREERAIIMAFKGFACFSILLLLSLFVSSIRSEETKEFVLTLDHSNFTETISKHDFIVVEFYAPWCGHCQKLAPEYEKAASELSSHNPPLALAKIDASEEANKEFANEYKIQGFPTLKILRNGGKSVQDYNGPREAEGIVTYLKKQSGPASVEIKSADSATEVVGEKNVVAVGVFPKLSGDEFDSFMALAEKLRADYDFAHTLDAKFLPRGESVEGPAVRLFKPFDELFVDSKDFNGEALEKFVKESSIPLVTVFDSDPNNHPYVAKFFESPATKAMMFVNFTGATAEALKSKYREVATSNKDQSLAFLVGDAESSQGAFQYFGLEESQVPLIIIQTPDNKKYLKVNVEVDQIESWFKDFQDGKVAVHKKSQPIPAENNEPVKVVVAESLDDIVFKSGKNVLIEFYAPWCGHCQKLAPILDEVALSFQNDPSVIIAKLDATANDIPSDTFDVKGFPTIYFRSASGNVVVYEGDRTKEDFINFVEKNSEKKPTSHGEESTKSEEPKKTEETAAKDEL

SEQ ID NO: 36302 - protein, 508 aa, Arabidopsis thaliana
  peptide (1)..(508): Ceres Seq. ID no. 13494643
  misc_feature (28)..(357): Pfam Name: Calsequestrin Pfam Description: Calsequestrin
  misc_feature (10)..(508): Homolog of NCBI NO: 12056115 NR Description: protein disulfide isomerase [Triticum turgidum
  misc_feature (7)..(508): Homolog of NCBI NO: 13925728 NR Description: protein disulfide isomerase 3 precursor [Triticum
  misc_feature (1)..(508): Homolog of NCBI NO: 1709619 NR Description: Protein disulfide isomerase precursor (PDI)
  misc_feature (2)..(481): Homolog of NCBI NO: 11133775 NR Description: Protein disulfide isomerase precursor (PDI)
  misc_feature (8)..(503): Homolog of NCBI NO: 11133818 NR Description: Protein disulfide isomerase precursor (PDI)
  misc_feature (4)..(508): Homolog of NCBI NO: 99992 NR Description: protein disulfide-isomerase (EC 5.3.4.1)
  misc_feature (4)..(508): Homolog of NCBI NO: 266743 NR Description: Protein disulfide isomerase precursor (PDI)
  misc_feature (1)..(482): Homolog of NCBI NO: 30687521 NR Description: protein disulfide isomerase, putative
  misc_feature (1)..(508): Homolog of NCBI NO: 15219086 NR Description: protein disulfide isomerase, putative
  misc_feature (1)..(508): Homolog of NCBI NO: 15223975 NR Description: protein disulfide isomerase, putative
MAFKGFACFSILLLLSLFVSSIRSEETKEFVLTLDHSNFTETISKHDFIVVEFYAPWCGHCQKLAPEYEKAASELSSHNPPLALAKIDASEEANKEFANEYKIQGFPTLKILRNGGKSVQDYNGPREAEGIVTYLKKQSGPASVEIKSADSATEVVGEKNVVAVGVFPKLSGDEFDSFMALAEKLRADYDFAHTLDAKFLPRGESVEGPAVRLFKPFDELFVDSKDFNGEALEKFVKESSIPLVTVFDSDPNNHPYVAKFFESPATKAMMFVNFTGATAEALKSKYREVATSNKDQSLAFLVGDAESSQGAFQYFGLEESQVPLIIIQTPDNKKYLKVNVEVDQIESWFKDFQDGKVAVHKKSQPIPAENNEPVKVVVAESLDDIVFKSGKNVLIEFYAPWCGHCQKLAPILDEVALSFQNDPSVIIAKLDATANDIPSDTFDVKGFPTIYFRSASGNVVVYEGDRTKEDFINFVEKNSEKKPTSHGEESTKSEEPKKTEETAAKDEL

SEQ ID NO: 36303 - protein, 330 aa, Arabidopsis thaliana
  peptide (1)..(330): Ceres Seq. ID no. 13494644
  misc_feature (1)..(179): Pfam Name: Calsequestrin Pfam Description: Calsequestrin
  misc_feature (1)..(330): Homolog of NCBI NO: 12056115 NR Description: protein disulfide isomerase [Triticum turgidum
  misc_feature (1)..(330): Homolog of NCBI NO: 13925728 NR Description: protein disulfide isomerase 3 precursor [Triticum
  misc_feature (1)..(330): Homolog of NCBI NO: 1709619 NR Description: Protein disulfide isomerase precursor (PDI)
  misc_feature (1)..(303): Homolog of NCBI NO: 11133775 NR Description: Protein disulfide isomerase precursor (PDI)
  misc_feature (1)..(325): Homolog of NCBI NO: 11133818 NR Description: Protein disulfide isomerase precursor (PDI)
  misc_feature (1)..(330): Homolog of NCBI NO: 99992 NR Description: protein disulfide-isomerase (EC 5.3.4.1)
  misc_feature (1)..(330): Homolog of NCBI NO: 266743 NR Description: Protein disulfide isomerase precursor (PDI)
  misc_feature (1)..(304): Homolog of NCBI NO: 30687521 NR Description: protein disulfide isomerase, putative
  misc_feature (1)..(330): Homolog of NCBI NO: 15219086 NR Description: protein disulfide isomerase, putative
  misc_feature (1)..(330): Homolog of NCBI NO: 15223975 NR Description: protein disulfide isomerase, putative
MALAEKLRADYDFAHTLDAKFLPRGESVEGPAVRLFKPFDELFVDSKDFNGEALEKFVKESSIPLVTVFDSDPNNHPYVAKFFESPATKAMMFVNFTGATAEALKSKYREVATSNKDQSLAFLVGDAESSQGAFQYFGLEESQVPLIIIQTPDNKKYLKVNVEVDQIESWFKDFQDGKVAVHKKSQPIPAENNEPVKVVVAESLDDIVFKSGKNVLIEFYAPWCGHCQKLAPILDEVALSFQNDPSVIIAKLDATANDIPSDTFDVKGFPTIYFRSASGNVVVYEGDRTKEDFINFVEKNSEKKPTSHGEESTKSEEPKKTEETAAKDEL

SEQ ID NO: 36304 - DNA, 1435 bp, Arabidopsis thaliana
  misc_feature (1)..(1435): Ceres Seq. ID no. 13500060
  misc_feature: MA Experiment ID: 108462 Result: Down-regulated in Transcription
  misc_feature: MA Experiment 108462 PARAMETER Experiment Name: At_Germinating_Seeds_cDNA_P Parameter: Age (day) Value: 2 vs. 0
  misc_feature: MA Experiment 108462 PARAMETER Experiment Name: At_Germinating_Seeds_cDNA_P Parameter: Tissue Value: Germinating Seeds
  misc_feature: MA Experiment ID: 108464 Result: Down-regulated in Transcription
  misc_feature: MA Experiment 108464 PARAMETER Experiment Name: At_Germinating_Seeds_cDNA_P Parameter: Age (day) Value: 4 vs. 0
  misc_feature: MA Experiment 108464 PARAMETER Experiment Name: At_Germinating_Seeds_cDNA_P Parameter: Tissue Value: Germinating Seeds
  misc_feature: MA Experiment ID: 108573 Result: Up-regulated in Transcription
  misc_feature: MA Experiment 108573 PARAMETER Experiment Name: At_Drought_cDNA_P Parameter: Timepoint (hr) Value: 6
  misc_feature: MA Experiment 108573 PARAMETER Experiment Name: At_Drought_cDNA_P Parameter: Tissue Value: Aerial
  misc_feature: MA Experiment 108573 PARAMETER Experiment Name: At_Drought_cDNA_P Parameter: Treatment Value: Drought vs. No Drought
  misc_feature: MA Experiment ID: 20000111 Result: Down-regulated in Transcription
  misc_feature: MA Experiment 20000111 PARAMETER Experiment Name: At_42deg_Heat_cDNA_P Parameter: Temperature (deg C) Value: 42 vs. 22
  misc_feature: MA Experiment 20000111 PARAMETER Experiment Name: At_42deg_Heat_cDNA_P Parameter: Timepoint (hr) Value: 6
  misc_feature: MA Experiment 20000111 PARAMETER Experiment Name: At_42deg_Heat_cDNA_P Parameter: Tissue Value: Aerial
  misc_feature: MA Experiment ID: 20000224 Result: Down-regulated in Transcription
  misc_feature: MA Experiment ID: 20000794 Result: Up-regulated in Transcription
  misc_feature: MA Experiment 20000794 PARAMETER Experiment Name: At_Petals_P Parameter: Age (day) Value: 23-25 days
  misc_feature: MA Experiment 20000794 PARAMETER Experiment Name: At_Petals_P Parameter: Plant Line Value: WS
  misc_feature: MA Experiment 20000794 PARAMETER Experiment Name: At_Petals_P Parameter: Tissue Value: Petals vs. Whole plant
  misc_feature: MA Experiment ID: 20001247 Result: Up-regulated in Transcription
  misc_feature: MA Experiment 20001247 PARAMETER Experiment Name: At_Far-red-induction_P Parameter: Age (day) Value: 7
  misc_feature: MA Experiment 20001247 PARAMETER Experiment Name: At_Far-red-induction_P Parameter: Light Value: Far-red vs. White
  misc_feature: MA Experiment 20001247 PARAMETER Experiment Name: At_Far-red-induction_P Parameter: Organism Value: A. thaliana
  misc_feature: MA Experiment 20001247 PARAMETER Experiment Name: At_Far-red-induction_P Parameter: Plant Line Value: Columbia
  misc_feature: MA Experiment 20001247 PARAMETER Experiment Name: At_Far-red-induction_P Parameter: Timepoint (hr) Value: 1
  misc_feature: MA Experiment 20001247 PARAMETER Experiment Name: At_Far-red-induction_P Parameter: Tissue Value: Whole Plant
  misc_feature: MA Experiment ID: 20001248 Result: Up-regulated in Transcription
  misc_feature: MA Experiment 20001248 PARAMETER Experiment Name: At_Far-red-induction_P Parameter: Age (day) Value: 7
  misc_feature: MA Experiment 20001248 PARAMETER Experiment Name: At_Far-red-induction_P Parameter: Light Value: Far-red vs. White
  misc_feature: MA Experiment 20001248 PARAMETER Experiment Name: At_Far-red-induction_P Parameter: Organism Value: A. thaliana
  misc_feature: MA Experiment 20001248 PARAMETER Experiment Name: At_Far-red-induction_P Parameter: Plant Line Value: Columbia
  misc_feature: MA Experiment 20001248 PARAMETER Experiment Name: At_Far-red-induction_P Parameter: Timepoint (hr) Value: 4
  misc_feature: MA Experiment 20001248 PARAMETER Experiment Name: At_Far-red-induction_P Parameter: Tissue Value: Whole Plant
  misc_feature: MA Experiment ID: 20001450 Result: Up-regulated in Transcription
  misc_feature: MA Experiment 20001450 PARAMETER Experiment Name: At_Far-red-induction_P Parameter: Age (day) Value: 7
  misc_feature: MA Experiment 20001450 PARAMETER Experiment Name: At_Far-red-induction_P Parameter: Light Value: Far-red vs. White
  misc_feature: MA Experiment 20001450 PARAMETER Experiment Name: At_Far-red-induction_P Parameter: Organism Value: A. thaliana
  misc_feature: MA Experiment 20001450 PARAMETER Experiment Name: At_Far-red-induction_P Parameter: Plant Line Value: Columbia
  misc_feature: MA Experiment 20001450 PARAMETER Experiment Name: At_Far-red-induction_P Parameter: Timepoint (hr) Value: 8
  misc_feature: MA Experiment 20001450 PARAMETER Experiment Name: At_Far-red-induction_P Parameter: Tissue Value: Whole Plant
gccctttcattattatgtcaacaaccctcctctattgaagatttcttcaatcatcttctccacaacaaaaaaataaccctaatttacacagaaaatatgtggggaattggaggaaattactactggcgaaagaaaaacaacaacggaggagaaagcgaagcgatcgttgtggtattcgcttggatgtctagcgaagaacgcaatctaaagaaccatgtcgatctctattcttctcttctttgggattctctcgtttgccattctcaatttctcaacatgtttcttccagataaagctgcagatttagcttctaatgttgtttctgaacttgtcaaggagctcaaagcaaagccagttcctttagtgtttgcttctttctctggtggtcctaatgcttgtatgtataaagttcttcaaatacttgaaggaacatgcgaaacgggactaaatccggatgattgtagattggttagaaactgcatctcagggtttatttatgactcatgtcctgtggatttcactagcgacttgggagctcgattagcggttcatccaactacgcttaaaatgtctagtccacctaaaccgtttgtatgggcagcgaatggtattgcttcgagtctcgattatgtttttctcaacaggtttgaatcacagcgagccgagtactggcagactctttactctactataatcatgagagtaccttatctcattctatgctctgaaaacgatgaccttgctccttatcaaactatacacaatttcgctacacgtctccaagaactaggaggaaatgtaaaacttgtaaaatggaatgattcccctcattgtggtcattatcgttataaccaggtcgactataaagctgctgtatctgagttcttgtcaaaagcagcgtcggtttattcgcagaagacgagaagtcttgacagagaagctatgaaaggaacatgtcatgatgagataacagagccaattcagagcttggggcaatcaacctctggtcttaaccgaagcttcaacggaactccacttgtcacaaccgatcatttcttcgtacctagcaccgtaggttactacgtgggcagagacggcggatatgtgcaagatgaacacaaacaagatttgatttgtttgtccaatactcaaaccaatgaatcggttaagcccaatggagttctaggccaaatcttatttgatgtttatattccgaagaatgttgaggattgggatataaagctatcagaaaccgggcggtctaggcggagaccggggaagagatttatacgtagatcgagattgtaacatctgagttatatattatatataccatgagtacccatttgttttcttcagatactgttgcagaggtattccatttggttttccctcgcaaagattaataaattaataaaataagatcttttttgct

SEQ ID NO: 36305 - protein, 435 aa, Arabidopsis thaliana
  peptide (1)..(435): Ceres Seq. ID no. 13500061
  misc_feature (128)..(411): Pfam Name: Eukaryotic protein of unknown function (DUF829) Pfam Description: Eukaryotic protein of unknown function (DUF829)
  misc_feature (37)..(416): Homolog of NCBI NO: 25411656 NR Description: hypothetical protein At2g15690 [imported] -
  misc_feature (37)..(416): Homolog of NCBI NO: 18397898 NR Description: expressed protein [Arabidopsis thaliana]
  misc_feature (33)..(435): Homolog of NCBI NO: 15241450 NR Description: expressed protein [Arabidopsis thaliana]
ALSLLCQQPSSIEDFFNHLLHNKKITLIYTENMWGIGGNYYWRKKNNNGGESEAIVVVFAWMSSEERNLKNHVDLYSSLLWDSLVCHSQFLNMFLPDKAADLASNVVSELVKELKAKPVPLVFASFSGGPNACMYKVLQILEGTCETGLNPDDCRLVRNCISGFIYDSCPVDFTSDLGARLAVHPTTLKMSSPPKPFVWAANGIASSLDYVFLNRFESQRAEYWQTLYSTIIMRVPYLILCSENDDLAPYQTIHNFATRLQELGGNVKLVKWNDSPHCGHYRYNQVDYKAAVSEFLSKAASVYSQKTRSLDREAMKGTCHDEITEPIQSLGQSTSGLNRSFNGTPLVTTDHFFVPSTVGYYVGRDGGYVQDEHKQDLICLSNTQTNESVKPNGVLGQILFDVYIPKNVEDWDIKLSETGRSRRRPGKRFIRRSRL

SEQ ID NO: 36306 - protein, 403 aa, Arabidopsis thaliana
  peptide (1)..(403): Ceres Seq. ID no. 13500062
  misc_feature (96)..(379): Pfam Name: Eukaryotic protein of unknown function (DUF829) Pfam Description: Eukaryotic protein of unknown function (DUF829)
  misc_feature (5)..(384): Homolog of NCBI NO: 25411656 NR Description: hypothetical protein At2g15690 [imported] -
  misc_feature (5)..(384): Homolog of NCBI NO: 18397898 NR Description: expressed protein [Arabidopsis thaliana]
  misc_feature (1)..(403): Homolog of NCBI NO: 15241450 NR Description: expressed protein [Arabidopsis thaliana]
MWGIGGNYYWRKKNNNGGESEAIVVVFAWMSSEERNLKNHVDLYSSLLWDSLVCHSQFLNMFLPDKAADLASNVVSELVKELKAKPVPLVFASFSGGPNACMYKVLQILEGTCETGLNPDDCRLVRNCISGFIYDSCPVDFTSDLGARLAVHPTTLKMSSPPKPFVWAANGIASSLDYVFLNRFESQRAEYWQTLYSTIIMRVPYLILCSENDDLAPYQTIHNFATRLQELGGNVKLVKWNDSPHCGHYRYNQVDYKAAVSEFLSKAASVYSQKTRSLDREAMKGTCHDEITEPIQSLGQSTSGLNRSFNGTPLVTTDHFFVPSTVGYYVGRDGGYVQDEHKQDLICLSNTQTNESVKPNGVLGQILFDVYIPKNVEDWDIKLSETGRSRRRPGKRFIRRSRL

SEQ ID NO: 36307 - protein, 374 aa, Arabidopsis thaliana
  peptide (1)..(374): Ceres Seq. ID no. 13500063
  misc_feature (67)..(350): Pfam Name: Eukaryotic protein of unknown function (DUF829) Pfam Description: Eukaryotic protein of unknown function (DUF829)
  misc_feature (1)..(355): Homolog of NCBI NO: 25411656 NR Description: hypothetical protein At2g15690 [imported] -
  misc_feature (1)..(355): Homolog of NCBI NO: 18397898 NR Description: expressed protein [Arabidopsis thaliana]
  misc_feature (1)..(374): Homolog of NCBI NO: 15241450 NR Description: expressed protein [Arabidopsis thaliana]
MSSEERNLKNHVDLYSSLLWDSLVCHSQFLNMFLPDKAADLASNVVSELVKELKAKPVPLVFASFSGGPNACMYKVLQILEGTCETGLNPDDCRLVRNCISGFIYDSCPVDFTSDLGARLAVHPTTLKMSSPPKPFVWAANGIASSLDYVFLNRFESQRAEYWQTLYSTIIMRVPYLILCSENDDLAPYQTIHNFATRLQELGGNVKLVKWNDSPHCGHYRYNQVDYKAAVSEFLSKAASVYSQKTRSLDREAMKGTCHDEITEPIQSLGQSTSGLNRSFNGTPLVTTDHFFVPSTVGYYVGRDGGYVQDEHKQDLICLSNTQTNESVKPNGVLGQILFDVYIPKNVEDWDIKLSETGRSRRRPGKRFIRRSRL

SEQ ID NO: 36308 - DNA, 1172 bp, Arabidopsis thaliana
  misc_feature (1)..(1172): Ceres Seq. ID no. 13497451
  misc_feature: MA Experiment ID: 108573 Result: Up-regulated in Transcription
  misc_feature: MA Experiment 108573 PARAMETER Experiment Name: At_Drought_cDNA_P Parameter: Timepoint (hr) Value: 6
  misc_feature: MA Experiment 108573 PARAMETER Experiment Name: At_Drought_cDNA_P Parameter: Tissue Value: Aerial
  misc_feature: MA Experiment 108573 PARAMETER Experiment Name: At_Drought_cDNA_P Parameter: Treatment Value: Drought vs. No Drought
  misc_feature: MA Experiment ID: 108585 Result: Up-regulated in Transcription
  misc_feature: MA Experiment 108585 PARAMETER Experiment Name: At_5mM_NaNP_cDNA_P Parameter: Timepoint (hr) Value: 6
  misc_feature: MA Experiment 108585 PARAMETER Experiment Name: At_5mM_NaNP_cDNA_P Parameter: Tissue Value: Aerial
  misc_feature: MA Experiment 108585 PARAMETER Experiment Name: At_5mM_NaNP_cDNA_P Parameter: Treatment Value: null
  misc_feature: MA Experiment ID: 108668 Result: Up-regulated in Transcription
  misc_feature: MA Experiment 108668 PARAMETER Experiment Name: At_2mM_SA_cDNA_P Parameter: Plant Line Value: WS
  misc_feature: MA Experiment 108668 PARAMETER Experiment Name: At_2mM_SA_cDNA_P Parameter: Timepoint (hr) Value: 6
  misc_feature: MA Experiment 108668 PARAMETER Experiment Name: At_2mM_SA_cDNA_P Parameter: Treatment Value: 2mM SA vs. No Treatment
  misc_feature: MA Experiment ID: 20000090 Result: Up-regulated in Transcription
  misc_feature: MA Experiment ID: 20000182 Result: Up-regulated in Transcription
  misc_feature: MA Experiment 20000182 PARAMETER Experiment Name: At_2mM_SA_P Parameter: Age (day) Value: 14
  misc_feature: MA Experiment 20000182 PARAMETER Experiment Name: At_2mM_SA_P Parameter: Organism Value: A. thaliana
  misc_feature: MA Experiment 20000182 PARAMETER Experiment Name: At_2mM_SA_P Parameter: Plant Line Value: WS
  misc_feature: MA Experiment 20000182 PARAMETER Experiment Name: At_2mM_SA_P Parameter: Timepoint (hr) Value: 6
  misc_feature: MA Experiment 20000182 PARAMETER Experiment Name: At_2mM_SA_P Parameter: Tissue Value: Aerial
  misc_feature: MA Experiment 20000182 PARAMETER Experiment Name: At_2mM_SA_P Parameter: Treatment Value: 2mM SA vs. No Treatment
  misc_feature: MA Experiment ID: 20000224 Result: Down-regulated in Transcription
  misc_feature: MA Experiment ID: 20000227 Result: Down-regulated in Transcription
  misc_feature: MA Experiment 20000227 PARAMETER Experiment Name: At_Root-Tips-vs-Tops_P Parameter: Tissue Value: Root Tips vs. Root Tops
  misc_feature: MA Experiment ID: 20000265 Result: Down-regulated in Transcription
  misc_feature: MA Experiment 20000265 PARAMETER Experiment Name: At_Open_Flower_P Parameter: Age (day) Value: 21
  misc_feature: MA Experiment 20000265 PARAMETER Experiment Name: At_Open_Flower_P Parameter: Plant Line Value: WS
  misc_feature: MA Experiment 20000265 PARAMETER Experiment Name: At_Open_Flower_P Parameter: Tissue Value: Closed Flower vs. Whole Plant
  misc_feature: MA Experiment ID: 20001451 Result: Up-regulated in Transcription
  misc_feature: MA Experiment 20001451 PARAMETER Experiment Name: At_Far-red-induction_P Parameter: Age (day) Value: 7
  misc_feature: MA Experiment 20001451 PARAMETER Experiment Name: At_Far-red-induction_P Parameter: Light Value: Far-red vs. White
  misc_feature: MA Experiment 20001451 PARAMETER Experiment Name: At_Far-red-induction_P Parameter: Organism Value: A. thaliana
  misc_feature: MA Experiment 20001451 PARAMETER Experiment Name: At_Far-red-induction_P Parameter: Plant Line Value: Columbia
  misc_feature: MA Experiment 20001451 PARAMETER Experiment Name: At_Far-red-induction_P Parameter: Timepoint (hr) Value: 24
  misc_feature: MA Experiment 20001451 PARAMETER Experiment Name: At_Far-red-induction_P Parameter: Tissue Value: Whole Plant
  misc_feature: Phenotype: WHOLE PLANT Size-Small
  misc_feature: Phenotype: FERTILITY Fertility-Reduced
  misc_feature: Phenotype: FERTILITY Fertility-Reduced
  misc_feature: Phenotype: FERTILITY Fertility-Reduced
gtcttcaacgttcggctaatccttggtccgtgctaagatcttagatcgatttctaaagtcttcgtcttcttcttcttctgataactagatttttcaatcttctgaagctttaattttttcatagccatggctaatcgttatgatccaaatcctttcgctgaggaagaagaagtcaatcctttcgctaatgctagaggagttccacctgcgtcgaattcgagactttcgcctttgcctccagagcctgttggtttcgattatggtcgaaccgtagacattcctcttgacagagctggtacacaggatttgaagaagaaagagaaggaactccaagccaaagaagctgagctaaaacgacgagagcaggacctcaaacggaaagaagatgctgctgcacgagctggaatcgttatcgaagtgaaaaactggccgcctttcttcccgcttatccaccatgatattgcaaatgaaattccggttcatctccaaagactacagtatgttacctttgcaacgtatttggggttggttctttgtcttttctggaatatcatcgccgttactacagcttggatcaaaggagaaggagtgacgatatggcttcttgccttaatttacttcatagcgggtgttccaggaggctatgtgttatggtatcgaccactctaccgtgccttcagaactgatagtgcattgagctttggatggtttttcttgttctatatgctccacattgctttctgcgtctttgctgcagttgctccacctgtcgtcttcaaaggaaaatctcttgctgggatcttacctgcaatagatgtcttaagcggtcaagcaattgttgggatattctacttcattgggtttgcatttttctgcctcgaatcagtggttagcatctgggttatacagcaagtgtatatgtacttccgaggcagcgggaaacaagatcaaatgagacgggaagcagcgagaggagccttgagagccgctgtttgagagttctccttgtaacattctggtttgtgtatgcactgtttcttttttcagattttcttgaagtctctctctctctctctctctctgctctataaacaaaaaaaaaaaaatttaatttttcctttgtacctttatgtcatgtaaatttgtttgttcaaaaatcagagttcagattc

SEQ ID NO: 36309 - protein, 289 aa, Arabidopsis thaliana
  peptide (1)..(289): Ceres Seq. ID no. 13497452
  misc_feature (97)..(271): Pfam Name: SCAMP family Pfam Description: SCAMP family
  misc_feature (21)..(288): Homolog of NCBI NO: 34899754 NR Description: putative secretory carrier membrane protein
  misc_feature (4)..(289): Homolog of NCBI NO: 18379111 NR Description: expressed protein [Arabidopsis thaliana]
  misc_feature (201)..(261): Homolog of NCBI NO: 25404319 NR Description: hypothetical protein F11P17.4 [imported] -
  misc_feature (1)..(136): Homolog of NCBI NO: 25404319 NR Description: hypothetical protein F11P17.4 [imported] -
  misc_feature (1)..(289): Homolog of NCBI NO: 25402653 NR Description: hypothetical protein [imported] - Arabidopsis
  misc_feature (1)..(289): Homolog of NCBI NO: 3941289 NR Description: similarity to SCAMP37 [Pisum sativum]
  misc_feature (1)..(288): Homolog of NCBI NO: 7109232 NR Description: secretory carrier membrane protein [Oryza sativa]
  misc_feature (3)..(289): Homolog of NCBI NO: 15226410 NR Description: secretory carrier-associated membrane protein
  misc_feature (1)..(289): Homolog of NCBI NO: 15220305 NR Description: secretory carrier membrane protein -related
  misc_feature (1)..(289): Homolog of NCBI NO: 15219893 NR Description: secretory carrier membrane protein [Arabidopsis
MANRYDPNPFAEEEEVNPFANARGVPPASNSRLSPLPPEPVGFDYGRTVDIPLDRAGTQDLKKKEKELQAKEAELKRREQDLKRKEDAAARAGIVIEVKNWPPFFPLIHHDIANEIPVHLQRLQYVTFATYLGLVLCLFWNIIAVTTAWIKGEGVTIWLLALIYFIAGVPGGYVLWYRPLYRAFRTDSALSFGWFFLFYMLHIAFCVFAAVAPPVVFKGKSLAGILPAIDVLSGQAIVGIFYFIGFAFFCLESVVSIWVIQQVYMYFRGSGKQDQMRREAARGALRAAV

SEQ ID NO: 36310 - DNA, 1232 bp, Arabidopsis thaliana
  misc_feature (1)..(1232): Ceres Seq. ID no. 13504878
  misc_feature: MA Experiment ID: 108464 Result: Up-regulated in Transcription
  misc_feature: MA Experiment 108464 PARAMETER Experiment Name: At_Germinating_Seeds_cDNA_P Parameter: Age (day) Value: 4 vs. 0
  misc_feature: MA Experiment 108464 PARAMETER Experiment Name: At_Germinating_Seeds_cDNA_P Parameter: Tissue Value: Germinating Seeds
  misc_feature: MA Experiment ID: 108488 Result: Down-regulated in Transcription
  misc_feature: MA Experiment ID: 108501 Result: Down-regulated in Transcription
  misc_feature: MA Experiment 108501 PARAMETER Experiment Name: At_ap2_floral_buds_cDNA_P Parameter: Plant Line Value: ap2 (Ler.)
  misc_feature: MA Experiment 108501 PARAMETER Experiment Name: At_ap2_floral_buds_cDNA_P Parameter: Tissue Value: Closed Flower
  misc_feature: MA Experiment ID: 108572 Result: Up-regulated in Transcription
  misc_feature: MA Experiment 108572 PARAMETER Experiment Name: At_Drought_cDNA_P Parameter: Timepoint (hr) Value: 1
  misc_feature: MA Experiment 108572 PARAMETER Experiment Name: At_Drought_cDNA_P Parameter: Tissue Value: Aerial
  misc_feature: MA Experiment 108572 PARAMETER Experiment Name: At_Drought_cDNA_P Parameter: Treatment Value: Drought vs. No Drought
  misc_feature: MA Experiment ID: 108573 Result: Up-regulated in Transcription
  misc_feature: MA Experiment 108573 PARAMETER Experiment Name: At_Drought_cDNA_P Parameter: Timepoint (hr) Value: 6
  misc_feature: MA Experiment 108573 PARAMETER Experiment Name: At_Drought_cDNA_P Parameter: Tissue Value: Aerial
  misc_feature: MA Experiment 108573 PARAMETER Experiment Name: At_Drought_cDNA_P Parameter: Treatment Value: Drought vs. No Drought
  misc_feature: MA Experiment ID: 108574 Result: Down-regulated in Transcription
  misc_feature: MA Experiment 108574 PARAMETER Experiment Name: At_Wounding__cDNA_P Parameter: Timepoint (hr) Value: 1
  misc_feature: MA Experiment 108574 PARAMETER Experiment Name: At_Wounding__cDNA_P Parameter: Tissue Value: Aerial
  misc_feature: MA Experiment 108574 PARAMETER Experiment Name: At_Wounding__cDNA_P Parameter: Treatment Value: Wounding vs. No Wounding
  misc_feature: MA Experiment ID: 108579 Result: Down-regulated in Transcription
  misc_feature: MA Experiment 108579 PARAMETER Experiment Name: At_4deg_Cold_cDNA_P Parameter: Temperature (deg C) Value: 4 vs. 22
  misc_feature: MA Experiment 108579 PARAMETER Experiment Name: At_4deg_Cold_cDNA_P Parameter: Timepoint (hr) Value: 6
  misc_feature: MA Experiment 108579 PARAMETER Experiment Name: At_4deg_Cold_cDNA_P Parameter: Tissue Value: Aerial
  misc_feature: MA Experiment ID: 108585 Result: Up-regulated in Transcription
  misc_feature: MA Experiment 108585 PARAMETER Experiment Name: At_5mM_NaNP_cDNA_P Parameter: Timepoint (hr) Value: 6
  misc_feature: MA Experiment 108585 PARAMETER Experiment Name: At_5mM_NaNP_cDNA_P Parameter: Tissue Value: Aerial
  misc_feature: MA Experiment 108585 PARAMETER Experiment Name: At_5mM_NaNP_cDNA_P Parameter: Treatment Value: null
  misc_feature: MA Experiment ID: 20000111 Result: Up-regulated in Transcription
  misc_feature: MA Experiment 20000111 PARAMETER Experiment Name: At_42deg_Heat_cDNA_P Parameter: Temperature (deg C) Value: 42 vs. 22
  misc_feature: MA Experiment 20000111 PARAMETER Experiment Name: At_42deg_Heat_cDNA_P Parameter: Timepoint (hr) Value: 6
  misc_feature: MA Experiment 20000111 PARAMETER Experiment Name: At_42deg_Heat_cDNA_P Parameter: Tissue Value: Aerial
  misc_feature: MA Experiment ID: 20000112 Result: Up-regulated in Transcription
  misc_feature: MA Experiment 20000112 PARAMETER Experiment Name: At_42deg_Heat_cDNA_P Parameter: Temperature (deg C) Value: 42 vs. 22
  misc_feature: MA Experiment 20000112 PARAMETER Experiment Name: At_42deg_Heat_cDNA_P Parameter: Timepoint (hr) Value: 2
  misc_feature: MA Experiment 20000112 PARAMETER Experiment Name: At_42deg_Heat_cDNA_P Parameter: Tissue Value: Aerial
  misc_feature: MA Experiment ID: 20000113 Result: Up-regulated in Transcription
  misc_feature: MA Experiment 20000113 PARAMETER Experiment Name: At_42deg_Heat_cDNA_P Parameter: Temperature (deg C) Value: 42 vs. 22
  misc_feature: MA Experiment 20000113 PARAMETER Experiment Name: At_42deg_Heat_cDNA_P Parameter: Timepoint (hr) Value: 8
  misc_feature: MA Experiment 20000113 PARAMETER Experiment Name: At_42deg_Heat_cDNA_P Parameter: Tissue Value: Aerial
  misc_feature: MA Experiment ID: 20000173 Result: Up-regulated in Transcription
  misc_feature: MA Experiment 20000173 PARAMETER Experiment Name: At_42deg_Heat_P Parameter: Age (day) Value: 14
  misc_feature: MA Experiment 20000173 PARAMETER Experiment Name: At_42deg_Heat_P Parameter: Organism Value: A. thaliana
  misc_feature: MA Experiment 20000173 PARAMETER Experiment Name: At_42deg_Heat_P Parameter: Plant Line Value: WS
  misc_feature: MA Experiment 20000173 PARAMETER Experiment Name: At_42deg_Heat_P Parameter: Temperature (deg C) Value: 42 vs. 22
  misc_feature: MA Experiment 20000173 PARAMETER Experiment Name: At_42deg_Heat_P Parameter: Timepoint (hr) Value: 6
  misc_feature: MA Experiment 20000173 PARAMETER Experiment Name: At_42deg_Heat_P Parameter: Tissue Value: Aerial
  misc_feature: MA Experiment ID: 20000224 Result: Down-regulated in Transcription
  misc_feature: MA Experiment ID: 20000227 Result: Down-regulated in Transcription
  misc_feature: MA Experiment 20000227 PARAMETER Experiment Name: At_Root-Tips-vs-Tops_P Parameter: Tissue Value: Root Tips vs. Root Tops
  misc_feature: MA Experiment ID: 20000234 Result: Down-regulated in Transcription
  misc_feature: MA Experiment 20000234 PARAMETER Experiment Name: At_Siliques_P Parameter: Age (day) Value: 21
  misc_feature: MA Experiment 20000234 PARAMETER Experiment Name: At_Siliques_P Parameter: Organism Value: A. thaliana
  misc_feature: MA Experiment 20000234 PARAMETER Experiment Name: At_Siliques_P Parameter: Plant Line Value: WS
  misc_feature: MA Experiment 20000234 PARAMETER Experiment Name: At_Siliques_P Parameter: Tissue Value: Less Than 5mm Siliques vs. Whole Plant
  misc_feature: MA Experiment ID: 20000235 Result: Down-regulated in Transcription
  misc_feature: MA Experiment 20000235 PARAMETER Experiment Name: At_Siliques_P Parameter: Age (day) Value: 21
  misc_feature: MA Experiment 20000235 PARAMETER Experiment Name: At_Siliques_P Parameter: Organism Value: A. thaliana
  misc_feature: MA Experiment 20000235 PARAMETER Experiment Name: At_Siliques_P Parameter: Plant Line Value: WS
  misc_feature: MA Experiment 20000235 PARAMETER Experiment Name: At_Siliques_P Parameter: Tissue Value: 5-10mm Siliques vs. Whole Plant
  misc_feature: MA Experiment ID: 20000264 Result: Down-regulated in Transcription
  misc_feature: MA Experiment 20000264 PARAMETER Experiment Name: At_Open_Flower_P Parameter: Age (day) Value: 21
  misc_feature: MA Experiment 20000264 PARAMETER Experiment Name: At_Open_Flower_P Parameter: Plant Line Value: WS
  misc_feature: MA Experiment 20000264 PARAMETER Experiment Name: At_Open_Flower_P Parameter: Tissue Value: Open Flower vs. Whole Plant
  misc_feature: MA Experiment ID: 20000265 Result: Down-regulated in Transcription
  misc_feature: MA Experiment 20000265 PARAMETER Experiment Name: At_Open_Flower_P Parameter: Age (day) Value: 21
  misc_feature: MA Experiment 20000265 PARAMETER Experiment Name: At_Open_Flower_P Parameter: Plant Line Value: WS
  misc_feature: MA Experiment 20000265 PARAMETER Experiment Name: At_Open_Flower_P Parameter: Tissue Value: Closed Flower vs. Whole Plant
  misc_feature: MA Experiment ID: 20000286 Result: Down-regulated in Transcription
  misc_feature: MA Experiment 20000286 PARAMETER Experiment Name: At_Open_Flower_P Parameter: Age (day) Value: 21
  misc_feature: MA Experiment 20000286 PARAMETER Experiment Name: At_Open_Flower_P Parameter: Plant Line Value: WS
  misc_feature: MA Experiment 20000286 PARAMETER Experiment Name: At_Open_Flower_P Parameter: Tissue Value: Half Open vs. Whole Plant
  misc_feature: MA Experiment ID: 20000437 Result: Up-regulated in Transcription
  misc_feature: MA Experiment 20000437 PARAMETER Experiment Name: At_Drought_P Parameter: Age (day) Value: 8
  misc_feature: MA Experiment 20000437 PARAMETER Experiment Name: At_Drought_P Parameter: Organism Value: A. thaliana
  misc_feature: MA Experiment 20000437 PARAMETER Experiment Name: At_Drought_P Parameter: Plant Line Value: WS
  misc_feature: MA Experiment 20000437 PARAMETER Experiment Name: At_Drought_P Parameter: Timepoint (hr) Value: 24
  misc_feature: MA Experiment 20000437 PARAMETER Experiment Name: At_Drought_P Parameter: Tissue Value: Whole Plant
  misc_feature: MA Experiment 20000437 PARAMETER Experiment Name: At_Drought_P Parameter: Treatment Value: Drought vs. No Drought
  misc_feature: MA Experiment ID: 20000438 Result: Down-regulated in Transcription
  misc_feature: MA Experiment 20000438 PARAMETER Experiment Name: At_Shoots__P Parameter: Age (day) Value: 14
  misc_feature: MA Experiment 20000438 PARAMETER Experiment Name: At_Shoots__P Parameter: Tissue Value: Shoots vs. Whole Plant
  misc_feature: MA Experiment ID: 20000495 Result: Up-regulated in Transcription
  misc_feature: MA Experiment 20000495 PARAMETER Experiment Name: At_Guard_Cells_P Parameter: Harvest Date Value: 8/2/2002
  misc_feature: MA Experiment 20000495 PARAMETER Experiment Name: At_Guard_Cells_P Parameter: Organism Value: A. thaliana
  misc_feature: MA Experiment 20000495 PARAMETER Experiment Name: At_Guard_Cells_P Parameter: Tissue Value: Guard Cells vs. Leaves
  misc_feature: MA Experiment ID: 20001247 Result: Up-regulated in Transcription
  misc_feature: MA Experiment 20001247 PARAMETER Experiment Name: At_Far-red-induction_P Parameter: Age (day) Value: 7
  misc_feature: MA Experiment 20001247 PARAMETER Experiment Name: At_Far-red-induction_P Parameter: Light Value: Far-red vs. White
  misc_feature: MA Experiment 20001247 PARAMETER Experiment Name: At_Far-red-induction_P Parameter: Organism Value: A. thaliana
  misc_feature: MA Experiment 20001247 PARAMETER Experiment Name: At_Far-red-induction_P Parameter: Plant Line Value: Columbia
  misc_feature: MA Experiment 20001247 PARAMETER Experiment Name: At_Far-red-induction_P Parameter: Timepoint (hr) Value: 1
  misc_feature: MA Experiment 20001247 PARAMETER Experiment Name: At_Far-red-induction_P Parameter: Tissue Value: Whole Plant
  misc_feature: MA Experiment ID: 20001248 Result: Up-regulated in Transcription
  misc_feature: MA Experiment 20001248 PARAMETER Experiment Name: At_Far-red-induction_P Parameter: Age (day) Value: 7
  misc_feature: MA Experiment 20001248 PARAMETER Experiment Name: At_Far-red-induction_P Parameter: Light Value: Far-red vs. White
  misc_feature: MA Experiment 20001248 PARAMETER Experiment Name: At_Far-red-induction_P Parameter: Organism Value: A. thaliana
  misc_feature: MA Experiment 20001248 PARAMETER Experiment Name: At_Far-red-induction_P Parameter: Plant Line Value: Columbia
  misc_feature: MA Experiment 20001248 PARAMETER Experiment Name: At_Far-red-induction_P Parameter: Timepoint (hr) Value: 4
  misc_feature: MA Experiment 20001248 PARAMETER Experiment Name: At_Far-red-induction_P Parameter: Tissue Value: Whole Plant
  misc_feature: MA Experiment ID: 20001450 Result: Up-regulated in Transcription
  misc_feature: MA Experiment 20001450 PARAMETER Experiment Name: At_Far-red-induction_P Parameter: Age (day) Value: 7
  misc_feature: MA Experiment 20001450 PARAMETER Experiment Name: At_Far-red-induction_P Parameter: Light Value: Far-red vs. White
  misc_feature: MA Experiment 20001450 PARAMETER Experiment Name: At_Far-red-induction_P Parameter: Organism Value: A. thaliana
  misc_feature: MA Experiment 20001450 PARAMETER Experiment Name: At_Far-red-induction_P Parameter: Plant Line Value: Columbia
  misc_feature: MA Experiment 20001450 PARAMETER Experiment Name: At_Far-red-induction_P Parameter: Timepoint (hr) Value: 8
  misc_feature: MA Experiment 20001450 PARAMETER Experiment Name: At_Far-red-induction_P Parameter: Tissue Value: Whole Plant
  misc_feature: MA Experiment ID: 20001451 Result: Up-regulated in Transcription
  misc_feature: MA Experiment 20001451 PARAMETER Experiment Name: At_Far-red-induction_P Parameter: Age (day) Value: 7
  misc_feature: MA Experiment 20001451 PARAMETER Experiment Name: At_Far-red-induction_P Parameter: Light Value: Far-red vs. White
  misc_feature: MA Experiment 20001451 PARAMETER Experiment Name: At_Far-red-induction_P Parameter: Organism Value: A. thaliana
  misc_feature: MA Experiment 20001451 PARAMETER Experiment Name: At_Far-red-induction_P Parameter: Plant Line Value: Columbia
  misc_feature: MA Experiment 20001451 PARAMETER Experiment Name: At_Far-red-induction_P Parameter: Timepoint (hr) Value: 24
  misc_feature: MA Experiment 20001451 PARAMETER Experiment Name: At_Far-red-induction_P Parameter: Tissue Value: Whole Plant
  misc_feature: MA Experiment ID: 20001560 Result: Down-regulated in Transcription
  misc_feature: MA Experiment 20001560 PARAMETER Experiment Name: At_Drought_Soil_Dry_P Parameter: Age (day) Value: 28
  misc_feature: MA Experiment 20001560 PARAMETER Experiment Name: At_Drought_Soil_Dry_P Parameter: Organism Value: A. thaliana
  misc_feature: MA Experiment 20001560 PARAMETER Experiment Name: At_Drought_Soil_Dry_P Parameter: Plant Line Value: WS
  misc_feature: MA Experiment 20001560 PARAMETER Experiment Name: At_Drought_Soil_Dry_P Parameter: Post Timepoint (hr) Value: None
  misc_feature: MA Experiment 20001560 PARAMETER Experiment Name: At_Drought_Soil_Dry_P Parameter: Post-Treatment Value: None
  misc_feature: MA Experiment 20001560 PARAMETER Experiment Name: At_Drought_Soil_Dry_P Parameter: Timepoint (day) Value: 14
  misc_feature: MA Experiment 20001560 PARAMETER Experiment Name: At_Drought_Soil_Dry_P Parameter: Treatment Value: Drought vs. No Drought
  misc_feature: MA Experiment ID: 20001911 Result: Up-regulated in Transcription
  misc_feature: MA Experiment 20001911 PARAMETER Experiment Name: At_Drought_Reproduction_P Parameter: Age (day) Value: 40
  misc_feature: MA Experiment 20001911 PARAMETER Experiment Name: At_Drought_Reproduction_P Parameter: Organism Value: A. thaliana
  misc_feature: MA Experiment 20001911 PARAMETER Experiment Name: At_Drought_Reproduction_P Parameter: Plant Line Value: WS
  misc_feature: MA Experiment 20001911 PARAMETER Experiment Name: At_Drought_Reproduction_P Parameter: Timepoint (day) Value: 10
  misc_feature: MA Experiment 20001911 PARAMETER Experiment Name: At_Drought_Reproduction_P Parameter: Tissue Value: Flowers
  misc_feature: MA Experiment 20001911 PARAMETER Experiment Name: At_Drought_Reproduction_P Parameter: Treatment Value: Drought vs. No Drought
atgttgtcttcaacctcacccacactttcttcggtctcatccttttataaaatccccatttcctctaacgatttttcgcctctctctctctctctctctctctctctctttcttctatcttctccgtcatcgttctctctctctcctctcccggagatttttactcaggcgttcttctgtggatcagaggtgaaaaagatgaatcattgcaaccttcagcagaacgccttcatgtctcgtgaggagatgatgggatttgaccgtaaggatcttgttgtttgtcctaagcctcgacgtgttggtttactcgccaacaacgttattcgtcctcttagattacatatgagtcaagctgcagccgacttgtgtgattctaaagctggtgctgagcttttggaaatcattcgtagaaaggaggataatggaacaatagggcagttactatcatcatccccaccgtattttcccggttcaccaccgagtagagcggcgaacccattagcccaagatgctcgttttcgagatgagaaactcaatccaatctcaccaaactctcctttccttcagccatattcggcaaccgggtttccatctccatcttcttcctcatcatcgtcgtcttcccgtggttgtgttagaatgaaatttggactcaactcgcctgcagttagagtagaaggatttgattgcttgaaccgtgaccgtcaaaactcgagcatccctgccatggcttagtagacaaacaacaaaaaaacaagtgtacatagagattccggaatcgttcgttcgccaatgcctaacagaggaggatttgattactactgctgcaactattactactaccatttttgaaagtaaatgaatatgtttttgtttttcatcttctcctaagagagagagagagggaagaggaaggaggaagatgaagatcagttaccgtcgccggtcaccgtttaactgttttattcaggttagtgtttgtatataaagatgcagtatttaaaagaagagtcgaatctatgtattcgtttggtgtttttctgggtcgggcggatctttagtactgtttcatatataactaagagggaagattagaagatgaagaagctgtaaaattttcttgggaagaaaactctggtttctatcttctcgttgtaatatagataatcaacttggatttatcttctttcagattcaccattgtatatagtaatgtttatttttcttggtgc

SEQ ID NO: 36311 - protein, 244 aa, Arabidopsis thaliana
  peptide (1)..(244): Ceres Seq. ID no. 13504879
  misc_feature (67)..(244): Homolog of NCBI NO: 15222278 NR Description: expressed protein [Arabidopsis thaliana]
  misc_feature (67)..(244): Homolog of NCBI NO: 18396232 NR Description: expressed protein [Arabidopsis thaliana]
  misc_feature (67)..(244): Homolog of NCBI NO: 18409044 NR Description: expressed protein [Arabidopsis thaliana]
  misc_feature (67)..(244): Homolog of NCBI NO: 11762168 NR Description: AT5g16110 [Arabidopsis thaliana]
  misc_feature (1)..(244): Homolog of NCBI NO: 30685676 NR Description: expressed protein [Arabidopsis thaliana]
MLSSTSPTLSSVSSFYKIPISSNDFSPLSLSLSLSLFLLSSPSSFSLSPLPEIFTQAFFCGSEVKKMNHCNLQQNAFMSREEMMGFDRKDLVVCPKPRRVGLLANNVIRPLRLHMSQAAADLCDSKAGAELLEIIRRKEDNGTIGQLLSSSPPYFPGSPPSRAANPLAQDARFRDEKLNPISPNSPFLQPYSATGFPSPSSSSSSSSSRGCVRMKFGLNSPAVRVEGFDCLNRDRQNSSIPAMA

SEQ ID NO: 36312 - protein, 178 aa, Arabidopsis thaliana
  peptide (1)..(178): Ceres Seq. ID no. 13504880
  misc_feature (1)..(178): Homolog of NCBI NO: 15222278 NR Description: expressed protein [Arabidopsis thaliana]
  misc_feature (1)..(178): Homolog of NCBI NO: 18396232 NR Description: expressed protein [Arabidopsis thaliana]
  misc_feature (1)..(178): Homolog of NCBI NO: 18409044 NR Description: expressed protein [Arabidopsis thaliana]
  misc_feature (1)..(178): Homolog of NCBI NO: 11762168 NR Description: AT5g16110 [Arabidopsis thaliana]
  misc_feature (1)..(178): Homolog of NCBI NO: 30685676 NR Description: expressed protein [Arabidopsis thaliana]
MNHCNLQQNAFMSREEMMGFDRKDLVVCPKPRRVGLLANNVIRPLRLHMSQAAADLCDSKAGAELLEIIRRKEDNGTIGQLLSSSPPYFPGSPPSRAANPLAQDARFRDEKLNPISPNSPFLQPYSATGFPSPSSSSSSSSSRGCVRMKFGLNSPAVRVEGFDCLNRDRQNSSIPAMA

SEQ ID NO: 36313 - protein, 167 aa, Arabidopsis thaliana
  peptide (1)..(167): Ceres Seq. ID no. 13504881
  misc_feature (1)..(167): Homolog of NCBI NO: 15222278 NR Description: expressed protein [Arabidopsis thaliana]
  misc_feature (1)..(167): Homolog of NCBI NO: 18396232 NR Description: expressed protein [Arabidopsis thaliana]
  misc_feature (1)..(167): Homolog of NCBI NO: 18409044 NR Description: expressed protein [Arabidopsis thaliana]
  misc_feature (1)..(167): Homolog of NCBI NO: 11762168 NR Description: AT5g16110 [Arabidopsis thaliana]
  misc_feature (1)..(167): Homolog of NCBI NO: 30685676 NR Description: expressed protein [Arabidopsis thaliana]
MSREEMMGFDRKDLVVCPKPRRVGLLANNVIRPLRLHMSQAAADLCDSKAGAELLEIIRRKEDNGTIGQLLSSSPPYFPGSPPSRAANPLAQDARFRDEKLNPISPNSPFLQPYSATGFPSPSSSSSSSSSRGCVRMKFGLNSPAVRVEGFDCLNRDRQNSSIPAMA

SEQ ID NO: 36314 - DNA, 1549 bp, Arabidopsis thaliana
  misc_feature (1)..(1549): Ceres Seq. ID no. 12321430
  misc_feature: MA Experiment ID: 108434 Result: Up-regulated in Transcription
  misc_feature: MA Experiment 108434 PARAMETER Experiment Name: At_Root_Tips_cDNA_P Parameter: Tissue Value: Root Tips
  misc_feature: MA Experiment ID: 108463 Result: Down-regulated in Transcription
  misc_feature: MA Experiment 108463 PARAMETER Experiment Name: At_Germinating_Seeds_cDNA_P Parameter: Age (day) Value: 3 vs. 0
  misc_feature: MA Experiment 108463 PARAMETER Experiment Name: At_Germinating_Seeds_cDNA_P Parameter: Tissue Value: Germinating Seeds
  misc_feature: MA Experiment ID: 108572 Result: Down-regulated in Transcription
  misc_feature: MA Experiment 108572 PARAMETER Experiment Name: At_Drought_cDNA_P Parameter: Timepoint (hr) Value: 1
  misc_feature: MA Experiment 108572 PARAMETER Experiment Name: At_Drought_cDNA_P Parameter: Tissue Value: Aerial
  misc_feature: MA Experiment 108572 PARAMETER Experiment Name: At_Drought_cDNA_P Parameter: Treatment Value: Drought vs. No Drought
  misc_feature: MA Experiment ID: 108573 Result: Down-regulated in Transcription
  misc_feature: MA Experiment 108573 PARAMETER Experiment Name: At_Drought_cDNA_P Parameter: Timepoint (hr) Value: 6
  misc_feature: MA Experiment 108573 PARAMETER Experiment Name: At_Drought_cDNA_P Parameter: Tissue Value: Aerial
  misc_feature: MA Experiment 108573 PARAMETER Experiment Name: At_Drought_cDNA_P Parameter: Treatment Value: Drought vs. No Drought
  misc_feature: MA Experiment ID: 20000090 Result: Up-regulated in Transcription
  misc_feature: MA Experiment ID: 20000093 Result: Up-regulated in Transcription
  misc_feature: MA Experiment 20000093 PARAMETER Experiment Name: At_42deg_Heat_cDNA_P Parameter: Temperature (deg C) Value: 42 vs. 22
  misc_feature: MA Experiment 20000093 PARAMETER Experiment Name: At_42deg_Heat_cDNA_P Parameter: Timepoint (hr) Value: 0.5
  misc_feature: MA Experiment 20000093 PARAMETER Experiment Name: At_42deg_Heat_cDNA_P Parameter: Tissue Value: Aerial
  misc_feature: MA Experiment ID: 20000144 Result: Up-regulated in Transcription
  misc_feature: MA Experiment 20000144 PARAMETER Experiment Name: At_42deg_Heat_cDNA_P Parameter: Temperature (deg C) Value: 42 vs. 22
  misc_feature: MA Experiment 20000144 PARAMETER Experiment Name: At_42deg_Heat_cDNA_P Parameter: Timepoint (hr) Value: 1
  misc_feature: MA Experiment 20000144 PARAMETER Experiment Name: At_42deg_Heat_cDNA_P Parameter: Tissue Value: Aerial
  misc_feature: MA Experiment ID: 20000179 Result: Up-regulated in Transcription
  misc_feature: MA Experiment 20000179 PARAMETER Experiment Name: At_Germinating_Seeds_P Parameter: Age (hr) Value: 6 vs. 0
  misc_feature: MA Experiment 20000179 PARAMETER Experiment Name: At_Germinating_Seeds_P Parameter: Tissue Value: Germinating Seeds
  misc_feature: MA Experiment ID: 20000185 Result: Up-regulated in Transcription
  misc_feature: MA Experiment 20000185 PARAMETER Experiment Name: At_Roots__P Parameter: Age (day) Value: 7 vs. 21
  misc_feature: MA Experiment 20000185 PARAMETER Experiment Name: At_Roots__P Parameter: Organism Value: A. thaliana
  misc_feature: MA Experiment 20000185 PARAMETER Experiment Name: At_Roots__P Parameter: Tissue Value: Roots vs. Whole Plant
  misc_feature: MA Experiment ID: 20000224 Result: Up-regulated in Transcription
  misc_feature: MA Experiment ID: 20000227 Result: Up-regulated in Transcription
  misc_feature: MA Experiment 20000227 PARAMETER Experiment Name: At_Root-Tips-vs-Tops_P Parameter: Tissue Value: Root Tips vs. Root Tops
  misc_feature: MA Experiment ID: 20000234 Result: Up-regulated in Transcription
  misc_feature: MA Experiment 20000234 PARAMETER Experiment Name: At_Siliques_P Parameter: Age (day) Value: 21
  misc_feature: MA Experiment 20000234 PARAMETER Experiment Name: At_Siliques_P Parameter: Organism Value: A. thaliana
  misc_feature: MA Experiment 20000234 PARAMETER Experiment Name: At_Siliques_P Parameter: Plant Line Value: WS
  misc_feature: MA Experiment 20000234 PARAMETER Experiment Name: At_Siliques_P Parameter: Tissue Value: Less Than 5mm Siliques vs. Whole Plant
  misc_feature: MA Experiment ID: 20000235 Result: Up-regulated in Transcription
  misc_feature: MA Experiment 20000235 PARAMETER Experiment Name: At_Siliques_P Parameter: Age (day) Value: 21
  misc_feature: MA Experiment 20000235 PARAMETER Experiment Name: At_Siliques_P Parameter: Organism Value: A. thaliana
  misc_feature: MA Experiment 20000235 PARAMETER Experiment Name: At_Siliques_P Parameter: Plant Line Value: WS
  misc_feature: MA Experiment 20000235 PARAMETER Experiment Name: At_Siliques_P Parameter: Tissue Value: 5-10mm Siliques vs. Whole Plant
  misc_feature: MA Experiment ID: 20000264 Result: Up-regulated in Transcription
  misc_feature: MA Experiment 20000264 PARAMETER Experiment Name: At_Open_Flower_P Parameter: Age (day) Value: 21
  misc_feature: MA Experiment 20000264 PARAMETER Experiment Name: At_Open_Flower_P Parameter: Plant Line Value: WS
  misc_feature: MA Experiment 20000264 PARAMETER Experiment Name: At_Open_Flower_P Parameter: Tissue Value: Open Flower vs. Whole Plant
  misc_feature: MA Experiment ID: 20000265 Result: Up-regulated in Transcription
  misc_feature: MA Experiment 20000265 PARAMETER Experiment Name: At_Open_Flower_P Parameter: Age (day) Value: 21
  misc_feature: MA Experiment 20000265 PARAMETER Experiment Name: At_Open_Flower_P Parameter: Plant Line Value: WS
  misc_feature: MA Experiment 20000265 PARAMETER Experiment Name: At_Open_Flower_P Parameter: Tissue Value: Closed Flower vs. Whole Plant
  misc_feature: MA Experiment ID: 20000437 Result: Down-regulated in Transcription
  misc_feature: MA Experiment 20000437 PARAMETER Experiment Name: At_Drought_P Parameter: Age (day) Value: 8
  misc_feature: MA Experiment 20000437 PARAMETER Experiment Name: At_Drought_P Parameter: Organism Value: A. thaliana
  misc_feature: MA Experiment 20000437 PARAMETER Experiment Name: At_Drought_P Parameter: Plant Line Value: WS
  misc_feature: MA Experiment 20000437 PARAMETER Experiment Name: At_Drought_P Parameter: Timepoint (hr) Value: 24
  misc_feature: MA Experiment 20000437 PARAMETER Experiment Name: At_Drought_P Parameter: Tissue Value: Whole Plant
  misc_feature: MA Experiment 20000437 PARAMETER Experiment Name: At_Drought_P Parameter: Treatment Value: Drought vs. No Drought
  misc_feature: MA Experiment ID: 20001560 Result: Up-regulated in Transcription
  misc_feature: MA Experiment 20001560 PARAMETER Experiment Name: At_Drought_Soil_Dry_P Parameter: Age (day) Value: 28
  misc_feature: MA Experiment 20001560 PARAMETER Experiment Name: At_Drought_Soil_Dry_P Parameter: Organism Value: A. thaliana
  misc_feature: MA Experiment 20001560 PARAMETER Experiment Name: At_Drought_Soil_Dry_P Parameter: Plant Line Value: WS
  misc_feature: MA Experiment 20001560 PARAMETER Experiment Name: At_Drought_Soil_Dry_P Parameter: Post Timepoint (hr) Value: None
  misc_feature: MA Experiment 20001560 PARAMETER Experiment Name: At_Drought_Soil_Dry_P Parameter: Post-Treatment Value: None
  misc_feature: MA Experiment 20001560 PARAMETER Experiment Name: At_Drought_Soil_Dry_P Parameter: Timepoint (day) Value: 14
  misc_feature: MA Experiment 20001560 PARAMETER Experiment Name: At_Drought_Soil_Dry_P Parameter: Treatment Value: Drought vs. No Drought
  misc_feature: MA Experiment ID: 20001905 Result: Down-regulated in Transcription
  misc_feature: MA Experiment 20001905 PARAMETER Experiment Name: At_Drought_Reproduction_P Parameter: Age (day) Value: 40
  misc_feature: MA Experiment 20001905 PARAMETER Experiment Name: At_Drought_Reproduction_P Parameter: Organism Value: A. thaliana
  misc_feature: MA Experiment 20001905 PARAMETER Experiment Name: At_Drought_Reproduction_P Parameter: Plant Line Value: WS
  misc_feature: MA Experiment 20001905 PARAMETER Experiment Name: At_Drought_Reproduction_P Parameter: Timepoint (day) Value: 10
  misc_feature: MA Experiment 20001905 PARAMETER Experiment Name: At_Drought_Reproduction_P Parameter: Tissue Value: Rosettes
  misc_feature: MA Experiment 20001905 PARAMETER Experiment Name: At_Drought_Reproduction_P Parameter: Treatment Value: Drought vs. No Drought
  misc_feature: MA Experiment ID: 20001911 Result: Down-regulated in Transcription
  misc_feature: MA Experiment 20001911 PARAMETER Experiment Name: At_Drought_Reproduction_P Parameter: Age (day) Value: 40
  misc_feature: MA Experiment 20001911 PARAMETER Experiment Name: At_Drought_Reproduction_P Parameter: Organism Value: A. thaliana
  misc_feature: MA Experiment 20001911 PARAMETER Experiment Name: At_Drought_Reproduction_P Parameter: Plant Line Value: WS
  misc_feature: MA Experiment 20001911 PARAMETER Experiment Name: At_Drought_Reproduction_P Parameter: Timepoint (day) Value: 10
  misc_feature: MA Experiment 20001911 PARAMETER Experiment Name: At_Drought_Reproduction_P Parameter: Tissue Value: Flowers
  misc_feature: MA Experiment 20001911 PARAMETER Experiment Name: At_Drought_Reproduction_P Parameter: Treatment Value: Drought vs. No Drought
atatataagctccaggtcttgtacatcttcatcatctgatctcggggaagctccgatctgagtttttttttagcaatggcgaaaatgattcctagcctcgtctctctaattcttatcggtcttgttgcgatcgcctccgccgcagttattttcgaggagcgctttgatgatggctgggagaacagatgggttaaatctgagtggaagaaggatgataacactgctggggagtggaagcacactgcgggaaattggtctggtgacgctaacgataaaggtatccagaccagtgaagactacagattctacgccatttcagctgagttccctgaattcagtaacaaggacaagaccttagtcttccaattctcagtcaagcacgagcaaaagcttgactgcggtggtggctacatgaagctactaagtggtgatgttgaccaaaagaaatttggtggagacacaccatacagtatcatgtttggtcctgatatctgtggctacagcacaaagaaagtgcatgctatccttacctataatgaagccaaccacctgatcaagaaagatgttccatgtgaaactgaccagctcacccatgtgtacacatttatcctccgcccagatgctacttacagcattctcatcgacaatgttgagaaacaaactggtagcctttactctgactgggatcttctcccacccaagaagatcaaggaccccagcgccaagaagcctgaggactgggacgaacaagaatacatttctgaccctgaagacaagaaacctgacggttacgatgatatccctaaggagatcccagacaccgactcaaagaagcctgaggactgggatgatgaagaagatggtgagtggactgccccaacaatccccaaccctgagtacatgggtgaatggaagcctaagcaaatcaagaaccccaactacaagggcaagtgggaggctccattgattgacaaccctgacttcaaggatgacccagagctctacgtcttccccaagctgaaatatgttggactcgaattgtggcaggtgaaatcaggatcattgttcgacaatgtcttgatctgcgatgacccagactatgccaagaagttggcagatgaaacatggggaaagctcaaggatgcggagaaagcagctttcgatgaggctgagaagaagaatgaggaagaggaatccaaggacgcacctgcggaatctgatgctgaagacgaaccagaggatgatgaaggaggagatgattccgattctgaatctaaggccgaggagaccaaatcagtagatagcgaggaaacctctgagaaagacgccaccgctcatgatgagctataggtgaaaggttgaagatttgaagaccaaagttttcagtctctttattgttttatcgttttcttttgaagtattttagcatctagtttgtcggagatagaaacaagttttagcaaaactaaaagggggatacaatgtctgtcagatgctcattttagactttaaaaaaccatgaagaagttttgcagttgcttctctttcg

SEQ ID NO: 36315 - protein, 424 aa, Arabidopsis thaliana
  peptide (1)..(424): Ceres Seq. ID no. 12321431
  misc_feature (24)..(336): Pfam Name: Calreticulin family Pfam Description: Calreticulin family
  misc_feature (6)..(424): Homolog of NCBI NO: 11131745 NR Description: Calreticulin precursor
  misc_feature (1)..(424): Homolog of NCBI NO: 11131904 NR Description: Calreticulin precursor
  misc_feature (88)..(424): Homolog of NCBI NO: 7441500 NR Description: probable calreticulin - rape
  misc_feature (1)..(415): Homolog of NCBI NO: 24417462 NR Description: unknown [Arabidopsis thaliana]
  misc_feature (1)..(424): Homolog of NCBI NO: 15223517 NR Description: calreticulin (crt1)
  misc_feature (18)..(424): Homolog of NCBI NO: 1009712 NR Description: calreticulin
  misc_feature (1)..(421): Homolog of NCBI NO: 25295763 NR Description: hypothetical protein [imported] - Arabidopsis
  misc_feature (1)..(424): Homolog of NCBI NO: 12643243 NR Description: CALRETICULIN 2 PRECURSOR
  misc_feature (1)..(424): Homolog of NCBI NO: 21555174 NR Description: putative calcium-binding protein, calreticulin
  misc_feature (1)..(424): Homolog of NCBI NO: 15217459 NR Description: putative calcium-binding protein, calreticulin
MAKMIPSLVSLILIGLVAIASAAVIFEERFDDGWENRWVKSEWKKDDNTAGEWKHTAGNWSGDANDKGIQTSEDYRFYAISAEFPEFSNKDKTLVFQFSVKHEQKLDCGGGYMKLLSGDVDQKKFGGDTPYSIMFGPDICGYSTKKVHAILTYNEANHLIKKDVPCETDQLTHVYTFILRPDATYSILIDNVEKQTGSLYSDWDLLPPKKIKDPSAKKPEDWDEQEYISDPEDKKPDGYDDIPKEIPDTDSKKPEDWDDEEDGEWTAPTIPNPEYMGEWKPKQIKNPNYKGKWEAPLIDNPDFKDDPELYVFPKLKYVGLELWQVKSGSLFDNVLICDDPDYAKKLADETWGKLKDAEKAAFDEAEKKNEEEESKDAPAESDAEDEPEDDEGGDDSDSESKAEETKSVDSEETSEKDATAHDEL

SEQ ID NO: 36316 - protein, 421 aa, Arabidopsis thaliana
  peptide (1)..(421): Ceres Seq. ID no. 12321432
  misc_feature (21)..(333): Pfam Name: Calreticulin family Pfam Description: Calreticulin family
  misc_feature (3)..(421): Homolog of NCBI NO: 11131745 NR Description: Calreticulin precursor
  misc_feature (1)..(421): Homolog of NCBI NO: 11131904 NR Description: Calreticulin precursor
  misc_feature (85)..(421): Homolog of NCBI NO: 7441500 NR Description: probable calreticulin - rape
  misc_feature (1)..(412): Homolog of NCBI NO: 24417462 NR Description: unknown [Arabidopsis thaliana]
  misc_feature (1)..(421): Homolog of NCBI NO: 15223517 NR Description: calreticulin (crt1)
  misc_feature (15)..(421): Homolog of NCBI NO: 1009712 NR Description: calreticulin
  misc_feature (1)..(418): Homolog of NCBI NO: 25295763 NR Description: hypothetical protein [imported] - Arabidopsis
  misc_feature (1)..(421): Homolog of NCBI NO: 12643243 NR Description: CALRETICULIN 2 PRECURSOR
  misc_feature (1)..(421): Homolog of NCBI NO: 21555174 NR Description: putative calcium-binding protein, calreticulin
  misc_feature (1)..(421): Homolog of NCBI NO: 15217459 NR Description: putative calcium-binding protein, calreticulin
MIPSLVSLILIGLVAIASAAVIFEERFDDGWENRWVKSEWKKDDNTAGEWKHTAGNWSGDANDKGIQTSEDYRFYAISAEFPEFSNKDKTLVFQFSVKHEQKLDCGGGYMKLLSGDVDQKKFGGDTPYSIMFGPDICGYSTKKVHAILTYNEANHLIKKDVPCETDQLTHVYTFILRPDATYSILIDNVEKQTGSLYSDWDLLPPKKIKDPSAKKPEDWDEQEYISDPEDKKPDGYDDIPKEIPDTDSKKPEDWDDEEDGEWTAPTIPNPEYMGEWKPKQIKNPNYKGKWEAPLIDNPDFKDDPELYVFPKLKYVGLELWQVKSGSLFDNVLICDDPDYAKKLADETWGKLKDAEKAAFDEAEKKNEEEESKDAPAESDAEDEPEDDEGGDDSDSESKAEETKSVDSEETSEKDATAHDEL

SEQ ID NO: 36317 - protein, 312 aa, Arabidopsis thaliana
  peptide (1)..(312): Ceres Seq. ID no. 12321433
  misc_feature (1)..(224): Pfam Name: Calreticulin family Pfam Description: Calreticulin family
  misc_feature (1)..(312): Homolog of NCBI NO: 11131745 NR Description: Calreticulin precursor
  misc_feature (1)..(312): Homolog of NCBI NO: 11131904 NR Description: Calreticulin precursor
  misc_feature (1)..(312): Homolog of NCBI NO: 7441500 NR Description: probable calreticulin - rape
  misc_feature (1)..(303): Homolog of NCBI NO: 24417462 NR Description: unknown [Arabidopsis thaliana]
  misc_feature (1)..(312): Homolog of NCBI NO: 15223517 NR Description: calreticulin (crt1)
  misc_feature (1)..(312): Homolog of NCBI NO: 1009712 NR Description: calreticulin
  misc_feature (1)..(309): Homolog of NCBI NO: 25295763 NR Description: hypothetical protein [imported] - Arabidopsis
  misc_feature (1)..(312): Homolog of NCBI NO: 12643243 NR Description: CALRETICULIN 2 PRECURSOR
  misc_feature (1)..(312): Homolog of NCBI NO: 21555174 NR Description: putative calcium-binding protein, calreticulin
  misc_feature (1)..(312): Homolog of NCBI NO: 15217459 NR Description: putative calcium-binding protein, calreticulin
MKLLSGDVDQKKFGGDTPYSIMFGPDICGYSTKKVHAILTYNEANHLIKKDVPCETDQLTHVYTFILRPDATYSILIDNVEKQTGSLYSDWDLLPPKKIKDPSAKKPEDWDEQEYISDPEDKKPDGYDDIPKEIPDTDSKKPEDWDDEEDGEWTAPTIPNPEYMGEWKPKQIKNPNYKGKWEAPLIDNPDFKDDPELYVFPKLKYVGLELWQVKSGSLFDNVLICDDPDYAKKLADETWGKLKDAEKAAFDEAEKKNEEEESKDAPAESDAEDEPEDDEGGDDSDSESKAEETKSVDSEETSEKDATAHDEL

SEQ ID NO: 36318 - DNA, 1193 bp, Arabidopsis thaliana
  misc_feature (1)..(1193): Ceres Seq. ID no. 12321426
  misc_feature: MA Experiment ID: 108434 Result: Up-regulated in Transcription
  misc_feature: MA Experiment 108434 PARAMETER Experiment Name: At_Root_Tips_cDNA_P Parameter: Tissue Value: Root Tips
  misc_feature: MA Experiment ID: 108462 Result: Down-regulated in Transcription
  misc_feature: MA Experiment 108462 PARAMETER Experiment Name: At_Germinating_Seeds_cDNA_P Parameter: Age (day) Value: 2 vs. 0
  misc_feature: MA Experiment 108462 PARAMETER Experiment Name: At_Germinating_Seeds_cDNA_P Parameter: Tissue Value: Germinating Seeds
  misc_feature: MA Experiment ID: 108501 Result: Up-regulated in Transcription
  misc_feature: MA Experiment 108501 PARAMETER Experiment Name: At_ap2_floral_buds_cDNA_P Parameter: Plant Line Value: ap2 (Ler.)
  misc_feature: MA Experiment 108501 PARAMETER Experiment Name: At_ap2_floral_buds_cDNA_P Parameter: Tissue Value: Closed Flower
acacttcactccaacgtgaaacctgcaaactgaacttatctcttcatattttctttagcttctcttaattttacacttagggttttcaaaccagtagagagagagagaagtgtgtaagagcgatgatgcagactccgtacactacttcaacgcaggggcaatattgtcattcttgtggaatgttccaccaccatagccaaagctgctgctacaacaacaacaacaactccaacgccggttcttactcgatggtcttctccatgcaaaacggtggcgttttcgagcagaacggtgaggactatcatcactcttcctccctcgttgactgcactctctctcttggaactccttctacgaggctttgtgaggaagatgagaaacgtagacgctctacttcatctggtgcttcttcttgcatctccaacttttgggacttgattcacaccaaaaacaacaactccaaaacggcaccgtacaataacgttccttctttctccgctaacaagccaagtcgcggttgttccggtggtggtgatggcggaggaggcggtggcggaggtgactctcttctcgctagacgctgtgccaactgtgacactacttctactccactatggaggaatggtcctagaggccctaagtccctatgcaacgcatgcggcattcgtttcaagaaggaagagagaagaactactgcggcttcaggaaacaccgtcgtcggagctgcaccggttcaaaccgaccagtacgggcatcacaactctggctacaataattaccatgctgccactaataacaacaataataatggtactccgtgggctcatcaccactcgacgcagagggttccgtgtaattatccggcaaatgagatcaggttcatggatgattacggcagtggagtagcaaacaacgttgaatccgacggtgctcacggcggtgttccgttcctttcttggaggcttaatgtagcggatagggcaagtcttgtccatgactttaccagatgaaaggagaatagaaaacgacgttagattctcttaaaatttccatgtggtttaattatgtctaattaaaaaaaaaccaagaaaatatttctgaaaaaaaatagaagtgtatatcgagagacgatgttgatgtttattgatagtgacggtctaacttatggtttatctataaagtaccgttctggc

SEQ ID NO: 36319 - protein, 295 aa, Arabidopsis thaliana
  peptide (1)..(295): Ceres Seq. ID no. 12321427
  misc_feature (173)..(202): Homolog of NCBI NO: 5091599 NR Description: 10A19I.2 [Oryza sativa]
  misc_feature (23)..(173): Homolog of NCBI NO: 5091599 NR Description: 10A19I.2 [Oryza sativa]
  misc_feature (122)..(194): Homolog of NCBI NO: 34912080 NR Description: P0671D01.19 [Oryza sativa (japonica
  misc_feature (35)..(118): Homolog of NCBI NO: 15224164 NR Description: GATA zinc finger protein; protein id: At2g18380.1
  misc_feature (144)..(253): Homolog of NCBI NO: 15224164 NR Description: GATA zinc finger protein; protein id: At2g18380.1
  misc_feature (43)..(127): Homolog of NCBI NO: 15234463 NR Description: GATA zinc finger protein; protein id: At4g36620.1
  misc_feature (137)..(294): Homolog of NCBI NO: 15234463 NR Description: GATA zinc finger protein; protein id: At4g36620.1
  misc_feature (2)..(295): Homolog of NCBI NO: 7488381 NR Description: transcription factor homolog F18B3.150 -
  misc_feature (1)..(295): Homolog of NCBI NO: 18409199 NR Description: GATA zinc finger protein
  misc_feature (2)..(295): Homolog of NCBI NO: 21555178 NR Description: transcription factor-like protein [Arabidopsis
MMQTPYTTSTQGQYCHSCGMFHHHSQSCCYNNNNNSNAGSYSMVFSMQNGGVFEQNGEDYHHSSSLVDCTLSLGTPSTRLCEEDEKRRRSTSSGASSCISNFWDLIHTKNNNSKTAPYNNVPSFSANKPSRGCSGGGDGGGGGGGGDSLLARRCANCDTTSTPLWRNGPRGPKSLCNACGIRFKKEERRTTAASGNTVVGAAPVQTDQYGHHNSGYNNYHAATNNNNNNGTPWAHHHSTQRVPCNYPANEIRFMDDYGSGVANNVESDGAHGGVPFLSWRLNVADRASLVHDFTR

SEQ ID NO: 36320 - protein, 294 aa, Arabidopsis thaliana
  peptide (1)..(294): Ceres Seq. ID no. 12321428
  misc_feature (172)..(201): Homolog of NCBI NO: 5091599 NR Description: 10A19I.2 [Oryza sativa]
  misc_feature (22)..(172): Homolog of NCBI NO: 5091599 NR Description: 10A19I.2 [Oryza sativa]
  misc_feature (121)..(193): Homolog of NCBI NO: 34912080 NR Description: P0671D01.19 [Oryza sativa (japonica
  misc_feature (34)..(117): Homolog of NCBI NO: 15224164 NR Description: GATA zinc finger protein; protein id: At2g18380.1
  misc_feature (143)..(252): Homolog of NCBI NO: 15224164 NR Description: GATA zinc finger protein; protein id: At2g18380.1
  misc_feature (42)..(126): Homolog of NCBI NO: 15234463 NR Description: GATA zinc finger protein; protein id: At4g36620.1
  misc_feature (136)..(293): Homolog of NCBI NO: 15234463 NR Description: GATA zinc finger protein; protein id: At4g36620.1
  misc_feature (1)..(294): Homolog of NCBI NO: 7488381 NR Description: transcription factor homolog F18B3.150 -
  misc_feature (1)..(294): Homolog of NCBI NO: 18409199 NR Description: GATA zinc finger protein
  misc_feature (1)..(294): Homolog of NCBI NO: 21555178 NR Description: transcription factor-like protein [Arabidopsis
MQTPYTTSTQGQYCHSCGMFHHHSQSCCYNNNNNSNAGSYSMVFSMQNGGVFEQNGEDYHHSSSLVDCTLSLGTPSTRLCEEDEKRRRSTSSGASSCISNFWDLIHTKNNNSKTAPYNNVPSFSANKPSRGCSGGGDGGGGGGGGDSLLARRCANCDTTSTPLWRNGPRGPKSLCNACGIRFKKEERRTTAASGNTVVGAAPVQTDQYGHHNSGYNNYHAATNNNNNNGTPWAHHHSTQRVPCNYPANEIRFMDDYGSGVANNVESDGAHGGVPFLSWRLNVADRASLVHDFTR

SEQ ID NO: 36321 - protein, 276 aa, Arabidopsis thaliana
  peptide (1)..(276): Ceres Seq. ID no. 12321429
  misc_feature (154)..(183): Homolog of NCBI NO: 5091599 NR Description: 10A19I.2 [Oryza sativa]
  misc_feature (4)..(154): Homolog of NCBI NO: 5091599 NR Description: 10A19I.2 [Oryza sativa]
  misc_feature (103)..(175): Homolog of NCBI NO: 34912080 NR Description: P0671D01.19 [Oryza sativa (japonica
  misc_feature (16)..(99): Homolog of NCBI NO: 15224164 NR Description: GATA zinc finger protein; protein id: At2g18380.1
  misc_feature (125)..(234): Homolog of NCBI NO: 15224164 NR Description: GATA zinc finger protein; protein id: At2g18380.1
  misc_feature (24)..(108): Homolog of NCBI NO: 15234463 NR Description: GATA zinc finger protein; protein id: At4g36620.1
  misc_feature (118)..(275): Homolog of NCBI NO: 15234463 NR Description: GATA zinc finger protein; protein id: At4g36620.1
  misc_feature (1)..(276): Homolog of NCBI NO: 7488381 NR Description: transcription factor homolog F18B3.150 -
  misc_feature (1)..(276): Homolog of NCBI NO: 18409199 NR Description: GATA zinc finger protein
  misc_feature (1)..(276): Homolog of NCBI NO: 21555178 NR Description: transcription factor-like protein [Arabidopsis
MFHHHSQSCCYNNNNNSNAGSYSMVFSMQNGGVFEQNGEDYHHSSSLVDCTLSLGTPSTRLCEEDEKRRRSTSSGASSCISNFWDLIHTKNNNSKTAPYNNVPSFSANKPSRGCSGGGDGGGGGGGGDSLLARRCANCDTTSTPLWRNGPRGPKSLCNACGIRFKKEERRTTAASGNTVVGAAPVQTDQYGHHNSGYNNYHAATNNNNNNGTPWAHHHSTQRVPCNYPANEIRFMDDYGSGVANNVESDGAHGGVPFLSWRLNVADRASLVHDFTR

SEQ ID NO: 36322 - DNA, 1046 bp, Arabidopsis thaliana
  misc_feature (1)..(1046): Ceres Seq. ID no. 12322806
  misc_feature: MA Experiment ID: 108462 Result: Up-regulated in Transcription
  misc_feature: MA Experiment 108462 PARAMETER Experiment Name: At_Germinating_Seeds_cDNA_P Parameter: Age (day) Value: 2 vs. 0
  misc_feature: MA Experiment 108462 PARAMETER Experiment Name: At_Germinating_Seeds_cDNA_P Parameter: Tissue Value: Germinating Seeds
  misc_feature: MA Experiment ID: 108463 Result: Up-regulated in Transcription
  misc_feature: MA Experiment 108463 PARAMETER Experiment Name: At_Germinating_Seeds_cDNA_P Parameter: Age (day) Value: 3 vs. 0
  misc_feature: MA Experiment 108463 PARAMETER Experiment Name: At_Germinating_Seeds_cDNA_P Parameter: Tissue Value: Germinating Seeds
  misc_feature: MA Experiment ID: 108464 Result: Up-regulated in Transcription
  misc_feature: MA Experiment 108464 PARAMETER Experiment Name: At_Germinating_Seeds_cDNA_P Parameter: Age (day) Value: 4 vs. 0
  misc_feature: MA Experiment 108464 PARAMETER Experiment Name: At_Germinating_Seeds_cDNA_P Parameter: Tissue Value: Germinating Seeds
  misc_feature: MA Experiment ID: 108469 Result: Down-regulated in Transcription
  misc_feature: MA Experiment ID: 108473 Result: Down-regulated in Transcription
  misc_feature: MA Experiment 108473 PARAMETER Experiment Name: At_Drought_Flowers_cDNA_P Parameter: Timepoint (hr) Value: 7 d
  misc_feature: MA Experiment 108473 PARAMETER Experiment Name: At_Drought_Flowers_cDNA_P Parameter: Tissue Value: Flower
  misc_feature: MA Experiment 108473 PARAMETER Experiment Name: At_Drought_Flowers_cDNA_P Parameter: Treatment Value: Drought vs. No Drought
  misc_feature: MA Experiment ID: 108488 Result: Down-regulated in Transcription
  misc_feature: MA Experiment ID: 108501 Result: Down-regulated in Transcription
  misc_feature: MA Experiment 108501 PARAMETER Experiment Name: At_ap2_floral_buds_cDNA_P Parameter: Plant Line Value: ap2 (Ler.)
  misc_feature: MA Experiment 108501 PARAMETER Experiment Name: At_ap2_floral_buds_cDNA_P Parameter: Tissue Value: Closed Flower
  misc_feature: MA Experiment ID: 108569 Result: Up-regulated in Transcription
  misc_feature: MA Experiment 108569 PARAMETER Experiment Name: At_0.001%_MeJA__cDNA_P Parameter: Timepoint (hr) Value: 6
  misc_feature: MA Experiment 108569 PARAMETER Experiment Name: At_0.001%_MeJA__cDNA_P Parameter: Tissue Value: Aerial
  misc_feature: MA Experiment 108569 PARAMETER Experiment Name: At_0.001%_MeJA__cDNA_P Parameter: Treatment Value: 0.001% MeJA vs. No Treatment
  misc_feature: MA Experiment ID: 108572 Result: Up-regulated in Transcription
  misc_feature: MA Experiment 108572 PARAMETER Experiment Name: At_Drought_cDNA_P Parameter: Timepoint (hr) Value: 1
  misc_feature: MA Experiment 108572 PARAMETER Experiment Name: At_Drought_cDNA_P Parameter: Tissue Value: Aerial
  misc_feature: MA Experiment 108572 PARAMETER Experiment Name: At_Drought_cDNA_P Parameter: Treatment Value: Drought vs. No Drought
  misc_feature: MA Experiment ID: 108573 Result: Up-regulated in Transcription
  misc_feature: MA Experiment 108573 PARAMETER Experiment Name: At_Drought_cDNA_P Parameter: Timepoint (hr) Value: 6
  misc_feature: MA Experiment 108573 PARAMETER Experiment Name: At_Drought_cDNA_P Parameter: Tissue Value: Aerial
  misc_feature: MA Experiment 108573 PARAMETER Experiment Name: At_Drought_cDNA_P Parameter: Treatment Value: Drought vs. No Drought
  misc_feature: MA Experiment ID: 108574 Result: Up-regulated in Transcription
  misc_feature: MA Experiment 108574 PARAMETER Experiment Name: At_Wounding__cDNA_P Parameter: Timepoint (hr) Value: 1
  misc_feature: MA Experiment 108574 PARAMETER Experiment Name: At_Wounding__cDNA_P Parameter: Tissue Value: Aerial
  misc_feature: MA Experiment 108574 PARAMETER Experiment Name: At_Wounding__cDNA_P Parameter: Treatment Value: Wounding vs. No Wounding
  misc_feature: MA Experiment ID: 108585 Result: Up-regulated in Transcription
  misc_feature: MA Experiment 108585 PARAMETER Experiment Name: At_5mM_NaNP_cDNA_P Parameter: Timepoint (hr) Value: 6
  misc_feature: MA Experiment 108585 PARAMETER Experiment Name: At_5mM_NaNP_cDNA_P Parameter: Tissue Value: Aerial
  misc_feature: MA Experiment 108585 PARAMETER Experiment Name: At_5mM_NaNP_cDNA_P Parameter: Treatment Value: null
  misc_feature: MA Experiment ID: 108594 Result: Up-regulated in Transcription
  misc_feature: MA Experiment 108594 PARAMETER Experiment Name: At_Ler-rhl_Root_cDNA_P Parameter: Plant Line Value: null
  misc_feature: MA Experiment ID: 108595 Result: Up-regulated in Transcription
  misc_feature: MA Experiment 108595 PARAMETER Experiment Name: At_Ler-pi_Ovule_cDNA_P Parameter: Plant Line Value: null
  misc_feature: MA Experiment ID: 108605 Result: Up-regulated in Transcription
  misc_feature: MA Experiment 108605 PARAMETER Experiment Name: At_100uM_ABA_cDNA_P Parameter: Timepoint (hr) Value: 6
  misc_feature: MA Experiment 108605 PARAMETER Experiment Name: At_100uM_ABA_cDNA_P Parameter: Tissue Value: Aerial
  misc_feature: MA Experiment 108605 PARAMETER Experiment Name: At_100uM_ABA_cDNA_P Parameter: Treatment Value: 100uM ABA vs. No Treatment
  misc_feature: MA Experiment ID: 108607 Result: Up-regulated in Transcription
  misc_feature: MA Experiment 108607 PARAMETER Experiment Name: At_100uM_ABA_cDNA_P Parameter: Timepoint (hr) Value: 4
  misc_feature: MA Experiment 108607 PARAMETER Experiment Name: At_100uM_ABA_cDNA_P Parameter: Tissue Value: Aerial
  misc_feature: MA Experiment 108607 PARAMETER Experiment Name: At_100uM_ABA_cDNA_P Parameter: Treatment Value: 100uM ABA vs. No Treatment
  misc_feature: MA Experiment ID: 108608 Result: Up-regulated in Transcription
  misc_feature: MA Experiment 108608 PARAMETER Experiment Name: At_100uM_ABA_cDNA_P Parameter: Timepoint (hr) Value: 1
  misc_feature: MA Experiment 108608 PARAMETER Experiment Name: At_100uM_ABA_cDNA_P Parameter: Tissue Value: Aerial
  misc_feature: MA Experiment 108608 PARAMETER Experiment Name: At_100uM_ABA_cDNA_P Parameter: Treatment Value: 100uM ABA vs. No Treatment
  misc_feature: MA Experiment ID: 108609 Result: Up-regulated in Transcription
  misc_feature: MA Experiment 108609 PARAMETER Experiment Name: At_100uM_ABA_cDNA_P Parameter: Timepoint (hr) Value: 24
  misc_feature: MA Experiment 108609 PARAMETER Experiment Name: At_100uM_ABA_cDNA_P Parameter: Tissue Value: Aerial
  misc_feature: MA Experiment 108609 PARAMETER Experiment Name: At_100uM_ABA_cDNA_P Parameter: Treatment Value: 100uM ABA vs. No Treatment
  misc_feature: MA Experiment ID: 20000030 Result: Down-regulated in Transcription
  misc_feature: MA Experiment 20000030 PARAMETER Experiment Name: At_CS6630_Roots_cDNA_P Parameter: Plant Line Value: CS6630 vs. WS
  misc_feature: MA Experiment 20000030 PARAMETER Experiment Name: At_CS6630_Roots_cDNA_P Parameter: Tissue Value: Roots
  misc_feature: MA Experiment ID: 20000068 Result: Up-regulated in Transcription
  misc_feature: MA Experiment ID: 20000069 Result: Up-regulated in Transcription
  misc_feature: MA Experiment 20000069 PARAMETER Experiment Name: At_100uM_ABA_Mutants_cDNA_P Parameter: Plant Line Value: CS23
  misc_feature: MA Experiment 20000069 PARAMETER Experiment Name: At_100uM_ABA_Mutants_cDNA_P Parameter: Timepoint (hr) Value: 6
  misc_feature: MA Experiment 20000069 PARAMETER Experiment Name: At_100uM_ABA_Mutants_cDNA_P Parameter: Tissue Value: Aerial
  misc_feature: MA Experiment 20000069 PARAMETER Experiment Name: At_100uM_ABA_Mutants_cDNA_P Parameter: Treatment Value: 100uM ABA vs. No Treatment
  misc_feature: MA Experiment ID: 20000070 Result: Up-regulated in Transcription
  misc_feature: MA Experiment 20000070 PARAMETER Experiment Name: At_100uM_ABA_Mutants_cDNA_P Parameter: Plant Line Value: CS24
  misc_feature: MA Experiment 20000070 PARAMETER Experiment Name: At_100uM_ABA_Mutants_cDNA_P Parameter: Timepoint (hr) Value: 6
  misc_feature: MA Experiment 20000070 PARAMETER Experiment Name: At_100uM_ABA_Mutants_cDNA_P Parameter: Tissue Value: Aerial
  misc_feature: MA Experiment 20000070 PARAMETER Experiment Name: At_100uM_ABA_Mutants_cDNA_P Parameter: Treatment Value: 100uM ABA vs. No Treatment
  misc_feature: MA Experiment ID: 20000071 Result: Up-regulated in Transcription
  misc_feature: MA Experiment 20000071 PARAMETER Experiment Name: At_100uM_ABA_Mutants_cDNA_P Parameter: Plant Line Value: CS8104
  misc_feature: MA Experiment 20000071 PARAMETER Experiment Name: At_100uM_ABA_Mutants_cDNA_P Parameter: Timepoint (hr) Value: 6
  misc_feature: MA Experiment 20000071 PARAMETER Experiment Name: At_100uM_ABA_Mutants_cDNA_P Parameter: Tissue Value: Aerial
  misc_feature: MA Experiment 20000071 PARAMETER Experiment Name: At_100uM_ABA_Mutants_cDNA_P Parameter: Treatment Value: 100uM ABA vs. No Treatment
  misc_feature: MA Experiment ID: 20000072 Result: Up-regulated in Transcription
  misc_feature: MA Experiment 20000072 PARAMETER Experiment Name: At_100uM_ABA_Mutants_cDNA_P Parameter: Plant Line Value: CS8105
  misc_feature: MA Experiment 20000072 PARAMETER Experiment Name: At_100uM_ABA_Mutants_cDNA_P Parameter: Timepoint (hr) Value: 6
  misc_feature: MA Experiment 20000072 PARAMETER Experiment Name: At_100uM_ABA_Mutants_cDNA_P Parameter: Tissue Value: Aerial
  misc_feature: MA Experiment 20000072 PARAMETER Experiment Name: At_100uM_ABA_Mutants_cDNA_P Parameter: Treatment Value: 100uM ABA vs. No Treatment
  misc_feature: MA Experiment ID: 20000086 Result: Up-regulated in Transcription
  misc_feature: MA Experiment 20000086 PARAMETER Experiment Name: At_100uM_ABA_Mutants_cDNA_P Parameter: Plant Line Value: CS22
  misc_feature: MA Experiment 20000086 PARAMETER Experiment Name: At_100uM_ABA_Mutants_cDNA_P Parameter: Timepoint (hr) Value: 6
  misc_feature: MA Experiment 20000086 PARAMETER Experiment Name: At_100uM_ABA_Mutants_cDNA_P Parameter: Tissue Value: Aerial
  misc_feature: MA Experiment 20000086 PARAMETER Experiment Name: At_100uM_ABA_Mutants_cDNA_P Parameter: Treatment Value: 100uM ABA vs. No Treatment
  misc_feature: MA Experiment ID: 20000087 Result: Up-regulated in Transcription
  misc_feature: MA Experiment 20000087 PARAMETER Experiment Name: At_100uM_ABA_Mutants_cDNA_P Parameter: Plant Line Value: WS
  misc_feature: MA Experiment 20000087 PARAMETER Experiment Name: At_100uM_ABA_Mutants_cDNA_P Parameter: Timepoint (hr) Value: 6
  misc_feature: MA Experiment 20000087 PARAMETER Experiment Name: At_100uM_ABA_Mutants_cDNA_P Parameter: Tissue Value: Aerial
  misc_feature: MA Experiment 20000087 PARAMETER Experiment Name: At_100uM_ABA_Mutants_cDNA_P Parameter: Treatment Value: 100uM ABA vs. No Treatment
  misc_feature: MA Experiment ID: 20000088 Result: Up-regulated in Transcription
  misc_feature: MA Experiment 20000088 PARAMETER Experiment Name: At_100uM_ABA_Mutants_cDNA_P Parameter: Plant Line Value: Landsberg
  misc_feature: MA Experiment 20000088 PARAMETER Experiment Name: At_100uM_ABA_Mutants_cDNA_P Parameter: Timepoint (hr) Value: 6
  misc_feature: MA Experiment 20000088 PARAMETER Experiment Name: At_100uM_ABA_Mutants_cDNA_P Parameter: Tissue Value: Aerial
  misc_feature: MA Experiment 20000088 PARAMETER Experiment Name: At_100uM_ABA_Mutants_cDNA_P Parameter: Treatment Value: 100uM ABA vs. No Treatment
  misc_feature: MA Experiment ID: 20000090 Result: Up-regulated in Transcription
  misc_feature: MA Experiment ID: 20000112 Result: Down-regulated in Transcription
  misc_feature: MA Experiment 20000112 PARAMETER Experiment Name: At_42deg_Heat_cDNA_P Parameter: Temperature (deg C) Value: 42 vs. 22
  misc_feature: MA Experiment 20000112 PARAMETER Experiment Name: At_42deg_Heat_cDNA_P Parameter: Timepoint (hr) Value: 2
  misc_feature: MA Experiment 20000112 PARAMETER Experiment Name: At_42deg_Heat_cDNA_P Parameter: Tissue Value: Aerial
  misc_feature: MA Experiment ID: 20000113 Result: Down-regulated in Transcription
  misc_feature: MA Experiment 20000113 PARAMETER Experiment Name: At_42deg_Heat_cDNA_P Parameter: Temperature (deg C) Value: 42 vs. 22
  misc_feature: MA Experiment 20000113 PARAMETER Experiment Name: At_42deg_Heat_cDNA_P Parameter: Timepoint (hr) Value: 8
  misc_feature: MA Experiment 20000113 PARAMETER Experiment Name: At_42deg_Heat_cDNA_P Parameter: Tissue Value: Aerial
  misc_feature: MA Experiment ID: 20000169 Result: Up-regulated in Transcription
  misc_feature: MA Experiment 20000169 PARAMETER Experiment Name: At_100uM_ABA_P Parameter: Age (day) Value: 14
  misc_feature: MA Experiment 20000169 PARAMETER Experiment Name: At_100uM_ABA_P Parameter: Organism Value: A. thaliana
  misc_feature: MA Experiment 20000169 PARAMETER Experiment Name: At_100uM_ABA_P Parameter: Plant Line Value: WS
  misc_feature: MA Experiment 20000169 PARAMETER Experiment Name: At_100uM_ABA_P Parameter: Timepoint (hr) Value: 6
  misc_feature: MA Experiment 20000169 PARAMETER Experiment Name: At_100uM_ABA_P Parameter: Tissue Value: Aerial
  misc_feature: MA Experiment 20000169 PARAMETER Experiment Name: At_100uM_ABA_P Parameter: Treatment Value: 100uM ABA vs. No Treatment
  misc_feature: MA Experiment ID: 20000180 Result: Up-regulated in Transcription
  misc_feature: MA Experiment 20000180 PARAMETER Experiment Name: At_Germinating_Seeds_P Parameter: Age (hr) Value: 24 vs. 0
  misc_feature: MA Experiment 20000180 PARAMETER Experiment Name: At_Germinating_Seeds_P Parameter: Tissue Value: Germinating Seeds
  misc_feature: MA Experiment ID: 20000224 Result: Up-regulated in Transcription
  misc_feature: MA Experiment ID: 20000234 Result: Up-regulated in Transcription
  misc_feature: MA Experiment 20000234 PARAMETER Experiment Name: At_Siliques_P Parameter: Age (day) Value: 21
  misc_feature: MA Experiment 20000234 PARAMETER Experiment Name: At_Siliques_P Parameter: Organism Value: A. thaliana
  misc_feature: MA Experiment 20000234 PARAMETER Experiment Name: At_Siliques_P Parameter: Plant Line Value: WS
  misc_feature: MA Experiment 20000234 PARAMETER Experiment Name: At_Siliques_P Parameter: Tissue Value: Less Than 5mm Siliques vs. Whole Plant
  misc_feature: MA Experiment ID: 20000264 Result: Up-regulated in Transcription
  misc_feature: MA Experiment 20000264 PARAMETER Experiment Name: At_Open_Flower_P Parameter: Age (day) Value: 21
  misc_feature: MA Experiment 20000264 PARAMETER Experiment Name: At_Open_Flower_P Parameter: Plant Line Value: WS
  misc_feature: MA Experiment 20000264 PARAMETER Experiment Name: At_Open_Flower_P Parameter: Tissue Value: Open Flower vs. Whole Plant
  misc_feature: MA Experiment ID: 20000265 Result: Up-regulated in Transcription
  misc_feature: MA Experiment 20000265 PARAMETER Experiment Name: At_Open_Flower_P Parameter: Age (day) Value: 21
  misc_feature: MA Experiment 20000265 PARAMETER Experiment Name: At_Open_Flower_P Parameter: Plant Line Value: WS
  misc_feature: MA Experiment 20000265 PARAMETER Experiment Name: At_Open_Flower_P Parameter: Tissue Value: Closed Flower vs. Whole Plant
  misc_feature: MA Experiment ID: 20000267 Result: Up-regulated in Transcription
  misc_feature: MA Experiment 20000267 PARAMETER Experiment Name: At_Drought_P Parameter: Age (day) Value: 7
  misc_feature: MA Experiment 20000267 PARAMETER Experiment Name: At_Drought_P Parameter: Organism Value: A. thaliana
  misc_feature: MA Experiment 20000267 PARAMETER Experiment Name: At_Drought_P Parameter: Plant Line Value: WS
  misc_feature: MA Experiment 20000267 PARAMETER Experiment Name: At_Drought_P Parameter: Timepoint (hr) Value: 6
  misc_feature: MA Experiment 20000267 PARAMETER Experiment Name: At_Drought_P Parameter: Tissue Value: Whole Plant
  misc_feature: MA Experiment 20000267 PARAMETER Experiment Name: At_Drought_P Parameter: Treatment Value: Drought vs. No Drought
  misc_feature: MA Experiment ID: 20000268 Result: Up-regulated in Transcription
  misc_feature: MA Experiment 20000268 PARAMETER Experiment Name: At_100mM_NaCl__P Parameter: Age (day) Value: 14
  misc_feature: MA Experiment 20000268 PARAMETER Experiment Name: At_100mM_NaCl__P Parameter: Organism Value: A. thaliana
  misc_feature: MA Experiment 20000268 PARAMETER Experiment Name: At_100mM_NaCl__P Parameter: Plant Line Value: WS
  misc_feature: MA Experiment 20000268 PARAMETER Experiment Name: At_100mM_NaCl__P Parameter: Timepoint (hr) Value: 6
  misc_feature: MA Experiment 20000268 PARAMETER Experiment Name: At_100mM_NaCl__P Parameter: Tissue Value: Whole Plant
  misc_feature: MA Experiment 20000268 PARAMETER Experiment Name: At_100mM_NaCl__P Parameter: Treatment Value: 100mM NaCl vs. No Treatment
  misc_feature: MA Experiment ID: 20000269 Result: Up-regulated in Transcription
  misc_feature: MA Experiment 20000269 PARAMETER Experiment Name: At_1mM_KNO3_L-vs-H_Roots_P Parameter: Age (day) Value: 7,10,12
  misc_feature: MA Experiment 20000269 PARAMETER Experiment Name: At_1mM_KNO3_L-vs-H_Roots_P Parameter: Organism Value: A. thaliana
  misc_feature: MA Experiment 20000269 PARAMETER Experiment Name: At_1mM_KNO3_L-vs-H_Roots_P Parameter: Plant Line Value: WS
  misc_feature: MA Experiment 20000269 PARAMETER Experiment Name: At_1mM_KNO3_L-vs-H_Roots_P Parameter: Timepoint (day) Value: 7,10,12
  misc_feature: MA Experiment 20000269 PARAMETER Experiment Name: At_1mM_KNO3_L-vs-H_Roots_P Parameter: Tissue Value: Roots
  misc_feature: MA Experiment 20000269 PARAMETER Experiment Name: At_1mM_KNO3_L-vs-H_Roots_P Parameter: Treatment Value: 1mM KNO3 vs. 50mM KNO3
  misc_feature: MA Experiment ID: 20000286 Result: Up-regulated in Transcription
  misc_feature: MA Experiment 20000286 PARAMETER Experiment Name: At_Open_Flower_P Parameter: Age (day) Value: 21
  misc_feature: MA Experiment 20000286 PARAMETER Experiment Name: At_Open_Flower_P Parameter: Plant Line Value: WS
  misc_feature: MA Experiment 20000286 PARAMETER Experiment Name: At_Open_Flower_P Parameter: Tissue Value: Half Open vs. Whole Plant
  misc_feature: MA Experiment ID: 20000308 Result: Up-regulated in Transcription
  misc_feature: MA Experiment 20000308 PARAMETER Experiment Name: At_100mM_NaCl__P Parameter: Age (day) Value: 17
  misc_feature: MA Experiment 20000308 PARAMETER Experiment Name: At_100mM_NaCl__P Parameter: Organism Value: A. thaliana
  misc_feature: MA Experiment 20000308 PARAMETER Experiment Name: At_100mM_NaCl__P Parameter: Plant Line Value: WS
  misc_feature: MA Experiment 20000308 PARAMETER Experiment Name: At_100mM_NaCl__P Parameter: Timepoint (hr) Value: 72
  misc_feature: MA Experiment 20000308 PARAMETER Experiment Name: At_100mM_NaCl__P Parameter: Tissue Value: Whole Plant
  misc_feature: MA Experiment 20000308 PARAMETER Experiment Name: At_100mM_NaCl__P Parameter: Treatment Value: 100mM NaCl vs. No Treatment
  misc_feature: MA Experiment ID: 20000436 Result: Up-regulated in Transcription
  misc_feature: MA Experiment 20000436 PARAMETER Experiment Name: At_Drought_P Parameter: Age (day) Value: 7
  misc_feature: MA Experiment 20000436 PARAMETER Experiment Name: At_Drought_P Parameter: Organism Value: A. thaliana
  misc_feature: MA Experiment 20000436 PARAMETER Experiment Name: At_Drought_P Parameter: Plant Line Value: WS
  misc_feature: MA Experiment 20000436 PARAMETER Experiment Name: At_Drought_P Parameter: Timepoint (hr) Value: 12
  misc_feature: MA Experiment 20000436 PARAMETER Experiment Name: At_Drought_P Parameter: Tissue Value: Whole Plant
  misc_feature: MA Experiment 20000436 PARAMETER Experiment Name: At_Drought_P Parameter: Treatment Value: Drought vs. No Drought
  misc_feature: MA Experiment ID: 20000438 Result: Down-regulated in Transcription
  misc_feature: MA Experiment 20000438 PARAMETER Experiment Name: At_Shoots__P Parameter: Age (day) Value: 14
  misc_feature: MA Experiment 20000438 PARAMETER Experiment Name: At_Shoots__P Parameter: Tissue Value: Shoots vs. Whole Plant
  misc_feature: MA Experiment ID: 20000453 Result: Up-regulated in Transcription
  misc_feature: MA Experiment 20000453 PARAMETER Experiment Name: At_100uM_ABA_P Parameter: Age (day) Value: 15
  misc_feature: MA Experiment 20000453 PARAMETER Experiment Name: At_100uM_ABA_P Parameter: Organism Value: A. thaliana
  misc_feature: MA Experiment 20000453 PARAMETER Experiment Name: At_100uM_ABA_P Parameter: Plant Line Value: WS
  misc_feature: MA Experiment 20000453 PARAMETER Experiment Name: At_100uM_ABA_P Parameter: Timepoint (hr) Value: 24
  misc_feature: MA Experiment 20000453 PARAMETER Experiment Name: At_100uM_ABA_P Parameter: Tissue Value: Aerial
  misc_feature: MA Experiment 20000453 PARAMETER Experiment Name: At_100uM_ABA_P Parameter: Treatment Value: 100uM ABA vs. No Treatment
  misc_feature: MA Experiment ID: 20000456 Result: Up-regulated in Transcription
  misc_feature: MA Experiment 20000456 PARAMETER Experiment Name: At_100uM_BA_P Parameter: Age (day) Value: 14
  misc_feature: MA Experiment 20000456 PARAMETER Experiment Name: At_100uM_BA_P Parameter: Organism Value: A. thaliana
  misc_feature: MA Experiment 20000456 PARAMETER Experiment Name: At_100uM_BA_P Parameter: Plant Line Value: WS
  misc_feature: MA Experiment 20000456 PARAMETER Experiment Name: At_100uM_BA_P Parameter: Timepoint (hr) Value: 6
  misc_feature: MA Experiment 20000456 PARAMETER Experiment Name: At_100uM_BA_P Parameter: Tissue Value: Aerial
  misc_feature: MA Experiment 20000456 PARAMETER Experiment Name: At_100uM_BA_P Parameter: Treatment Value: 100uM BA vs. No Treatment
  misc_feature: MA Experiment ID: 20000495 Result: Down-regulated in Transcription
  misc_feature: MA Experiment 20000495 PARAMETER Experiment Name: At_Guard_Cells_P Parameter: Harvest Date Value: 8/2/2002
  misc_feature: MA Experiment 20000495 PARAMETER Experiment Name: At_Guard_Cells_P Parameter: Organism Value: A. thaliana
  misc_feature: MA Experiment 20000495 PARAMETER Experiment Name: At_Guard_Cells_P Parameter: Tissue Value: Guard Cells vs. Leaves
  misc_feature: MA Experiment ID: 20000506 Result: Up-regulated in Transcription
  misc_feature: MA Experiment 20000506 PARAMETER Experiment Name: At_Wounding_P Parameter: Organism Value: A. thaliana
  misc_feature: MA Experiment 20000506 PARAMETER Experiment Name: At_Wounding_P Parameter: Plant Line Value: WS
  misc_feature: MA Experiment 20000506 PARAMETER Experiment Name: At_Wounding_P Parameter: Timepoint (hr) Value: 6
  misc_feature: MA Experiment 20000506 PARAMETER Experiment Name: At_Wounding_P Parameter: Tissue Value: Aerial
  misc_feature: MA Experiment 20000506 PARAMETER Experiment Name: At_Wounding_P Parameter: Treatment Value: Wounding vs. No Wounding
  misc_feature: MA Experiment ID: 20000527 Result: Down-regulated in Transcription
  misc_feature: MA Experiment 20000527 PARAMETER Experiment Name: At_10percent_PEG_P Parameter: Age (day) Value: 20
  misc_feature: MA Experiment 20000527 PARAMETER Experiment Name: At_10percent_PEG_P Parameter: Organism Value: A. thaliana
  misc_feature: MA Experiment 20000527 PARAMETER Experiment Name: At_10percent_PEG_P Parameter: Plant Line Value: WS
  misc_feature: MA Experiment 20000527 PARAMETER Experiment Name: At_10percent_PEG_P Parameter: Timepoint (day) Value: 20
  misc_feature: MA Experiment 20000527 PARAMETER Experiment Name: At_10percent_PEG_P Parameter: Tissue Value: Whole Plant
  misc_feature: MA Experiment 20000527 PARAMETER Experiment Name: At_10percent_PEG_P Parameter: Treatment Value: 10percent PEG vs. No Treatment
  misc_feature: MA Experiment ID: 20000794 Result: Up-regulated in Transcription
  misc_feature: MA Experiment 20000794 PARAMETER Experiment Name: At_Petals_P Parameter: Age (day) Value: 23-25 days
  misc_feature: MA Experiment 20000794 PARAMETER Experiment Name: At_Petals_P Parameter: Plant Line Value: WS
  misc_feature: MA Experiment 20000794 PARAMETER Experiment Name: At_Petals_P Parameter: Tissue Value: Petals vs. Whole plant
  misc_feature: MA Experiment ID: 20001450 Result: Down-regulated in Transcription
  misc_feature: MA Experiment 20001450 PARAMETER Experiment Name: At_Far-red-induction_P Parameter: Age (day) Value: 7
  misc_feature: MA Experiment 20001450 PARAMETER Experiment Name: At_Far-red-induction_P Parameter: Light Value: Far-red vs. White
  misc_feature: MA Experiment 20001450 PARAMETER Experiment Name: At_Far-red-induction_P Parameter: Organism Value: A. thaliana
  misc_feature: MA Experiment 20001450 PARAMETER Experiment Name: At_Far-red-induction_P Parameter: Plant Line Value: Columbia
  misc_feature: MA Experiment 20001450 PARAMETER Experiment Name: At_Far-red-induction_P Parameter: Timepoint (hr) Value: 8
  misc_feature: MA Experiment 20001450 PARAMETER Experiment Name: At_Far-red-induction_P Parameter: Tissue Value: Whole Plant
  misc_feature: MA Experiment ID: 20001558 Result: Down-regulated in Transcription
  misc_feature: MA Experiment 20001558 PARAMETER Experiment Name: At_Drought_Soil_Dry_P Parameter: Age (day) Value: 27
  misc_feature: MA Experiment 20001558 PARAMETER Experiment Name: At_Drought_Soil_Dry_P Parameter: Organism Value: A. thaliana
  misc_feature: MA Experiment 20001558 PARAMETER Experiment Name: At_Drought_Soil_Dry_P Parameter: Plant Line Value: WS
  misc_feature: MA Experiment 20001558 PARAMETER Experiment Name: At_Drought_Soil_Dry_P Parameter: Post Timepoint (hr) Value: 6
  misc_feature: MA Experiment 20001558 PARAMETER Experiment Name: At_Drought_Soil_Dry_P Parameter: Post-Treatment Value: Re-Water vs. No Drought
  misc_feature: MA Experiment 20001558 PARAMETER Experiment Name: At_Drought_Soil_Dry_P Parameter: Timepoint (day) Value: 13
  misc_feature: MA Experiment 20001558 PARAMETER Experiment Name: At_Drought_Soil_Dry_P Parameter: Treatment Value: Drought vs. No Drought
  misc_feature: MA Experiment ID: 20001769 Result: Up-regulated in Transcription
  misc_feature: MA Experiment 20001769 PARAMETER Experiment Name: At_Far-red-enriched-adult_P Parameter: Age (day) Value: 28
  misc_feature: MA Experiment 20001769 PARAMETER Experiment Name: At_Far-red-enriched-adult_P Parameter: Light Value: Far-red enriched vs. White
  misc_feature: MA Experiment 20001769 PARAMETER Experiment Name: At_Far-red-enriched-adult_P Parameter: Organism Value: A. thaliana
  misc_feature: MA Experiment 20001769 PARAMETER Experiment Name: At_Far-red-enriched-adult_P Parameter: Plant Line Value: Columbia
  misc_feature: MA Experiment 20001769 PARAMETER Experiment Name: At_Far-red-enriched-adult_P Parameter: Timepoint (hr) Value: 4
  misc_feature: MA Experiment 20001769 PARAMETER Experiment Name: At_Far-red-enriched-adult_P Parameter: Tissue Value: Aerial
  misc_feature: MA Experiment ID: 20001906 Result: Up-regulated in Transcription
  misc_feature: MA Experiment 20001906 PARAMETER Experiment Name: At_Drought_Reproduction_P Parameter: Age (day) Value: 35
  misc_feature: MA Experiment 20001906 PARAMETER Experiment Name: At_Drought_Reproduction_P Parameter: Organism Value: A. thaliana
  misc_feature: MA Experiment 20001906 PARAMETER Experiment Name: At_Drought_Reproduction_P Parameter: Plant Line Value: WS
  misc_feature: MA Experiment 20001906 PARAMETER Experiment Name: At_Drought_Reproduction_P Parameter: Timepoint (day) Value: 5
  misc_feature: MA Experiment 20001906 PARAMETER Experiment Name: At_Drought_Reproduction_P Parameter: Tissue Value: Siliques
  misc_feature: MA Experiment 20001906 PARAMETER Experiment Name: At_Drought_Reproduction_P Parameter: Treatment Value: Drought vs. No Drought
  misc_feature: MA Experiment ID: 20001908 Result: Up-regulated in Transcription
  misc_feature: MA Experiment 20001908 PARAMETER Experiment Name: At_Drought_Reproduction_P Parameter: Age (day) Value: 40
  misc_feature: MA Experiment 20001908 PARAMETER Experiment Name: At_Drought_Reproduction_P Parameter: Organism Value: A. thaliana
  misc_feature: MA Experiment 20001908 PARAMETER Experiment Name: At_Drought_Reproduction_P Parameter: Plant Line Value: WS
  misc_feature: MA Experiment 20001908 PARAMETER Experiment Name: At_Drought_Reproduction_P Parameter: Timepoint (day) Value: 10
  misc_feature: MA Experiment 20001908 PARAMETER Experiment Name: At_Drought_Reproduction_P Parameter: Tissue Value: Siliques
  misc_feature: MA Experiment 20001908 PARAMETER Experiment Name: At_Drought_Reproduction_P Parameter: Treatment Value: Drought vs. No Drought
acataaaacaaaaggtacagtatataccataaatctccgagattcttttgatgtatctgtccatttcattattacacaaactaggaaactgatatctctctattcacattcctctgattctatttctctttatatatattcacccattaaccatctcaatcttataaccctcaaaatcacaatcttctcttacaaaaaactttgaaagatgaagattcttctagcatcattgtgtttgatcagtcttctcgtaatcttgccttctgtcttctctgcttcttcttcctctgaagattttgatttcttctacttcgtccaacaatggccaggatcatactgtgacacacagaagaagtgttgttatccaaattcaggcaaaccagctgctgattttggcattcatggtctttggcctaactacaaagatggaacttatccatctaactgtgatgcctctaaaccattcgatagctcaacgatatcagatcttctcacttcaatgaagaagagctggccaacactggcttgcccaagcggttcaggtgaagcgttttgggagcacgaatgggagaagcatggtacttgctctgaatcggttatcgatcaacatgaatatttccaaaccgctcttaaccttaaacagaaaaccaatctccttggagctctaaccaaagccgggattaatccggatggaaaatcttactctttggagagcataagagattcgataaaagagtcaattggtttcactccttgggttgagtgtaacagagatggttctggtaatagccaattgtaccaagtctatctttgtgttgaccggtctggttccggtttaatcgaatgtccggttttcccacatgggaaatgtggagctgagatcgaattcccttctttttagtttccaatttctaaattcagtctcttgaaccggcatcgatcttttgttcatggagattggtttggtcaaaaagaagatttaatgtaataaaaatttatgggatattggataatgatatagttcaatttcaataatattctacgtt

SEQ ID NO: 36323 - protein, 230 aa, Arabidopsis thaliana
  peptide (1)..(230): Ceres Seq. ID no. 12322807
  misc_feature (30)..(219): Pfam Name: Ribonuclease T2 family Pfam Description: Ribonuclease T2 family
  misc_feature (14)..(230): Homolog of NCBI NO: 7435266 NR Description: ribonuclease M5 (EC 3.1.-.-) precursor,
  misc_feature (10)..(230): Homolog of NCBI NO: 31621002 NR Description: ribonuclease NW [Nicotiana glutinosa]
  misc_feature (24)..(230): Homolog of NCBI NO: 10120506 NR Description: Chain A, Crystal Structure Of Rnase Le
  misc_feature (10)..(230): Homolog of NCBI NO: 2148018 NR Description: ribonuclease II (EC 3.1.-.-) precursor,
  misc_feature (10)..(230): Homolog of NCBI NO: 532754 NR Description: RNase NE [Nicotiana alata]
  misc_feature (6)..(230): Homolog of NCBI NO: 1710615 NR Description: Extracellular ribonuclease LE precursor (RNase
  misc_feature (7)..(230): Homolog of NCBI NO: 9081845 NR Description: S-like ribonuclease [Prunus dulcis]
  misc_feature (10)..(230): Homolog of NCBI NO: 3860325 NR Description: ribonuclease T2 [Cicer arietinum]
  misc_feature (1)..(230): Homolog of NCBI NO: 21555182 NR Description: ribonuclease, RNS1 [Arabidopsis thaliana]
  misc_feature (1)..(230): Homolog of NCBI NO: 15227068 NR Description: ribonuclease, RNS1
MKILLASLCLISLLVILPSVFSASSSSEDFDFFYFVQQWPGSYCDTQKKCCYPNSGKPAADFGIHGLWPNYKDGTYPSNCDASKPFDSSTISDLLTSMKKSWPTLACPSGSGEAFWEHEWEKHGTCSESVIDQHEYFQTALNLKQKTNLLGALTKAGINPDGKSYSLESIRDSIKESIGFTPWVECNRDGSGNSQLYQVYLCVDRSGSGLIECPVFPHGKCGAEIEFPSF

SEQ ID NO: 36324 - protein, 133 aa, Arabidopsis thaliana
  peptide (1)..(133): Ceres Seq. ID no. 12322808
  misc_feature (1)..(122): Pfam Name: Ribonuclease T2 family Pfam Description: Ribonuclease T2 family
  misc_feature (1)..(133): Homolog of NCBI NO: 7435266 NR Description: ribonuclease M5 (EC 3.1.-.-) precursor,
  misc_feature (1)..(133): Homolog of NCBI NO: 31621002 NR Description: ribonuclease NW [Nicotiana glutinosa]
  misc_feature (1)..(133): Homolog of NCBI NO: 10120506 NR Description: Chain A, Crystal Structure Of Rnase Le
  misc_feature (1)..(133): Homolog of NCBI NO: 2148018 NR Description: ribonuclease II (EC 3.1.-.-) precursor,
  misc_feature (1)..(133): Homolog of NCBI NO: 532754 NR Description: RNase NE [Nicotiana alata]
  misc_feature (1)..(133): Homolog of NCBI NO: 1710615 NR Description: Extracellular ribonuclease LE precursor (RNase
  misc_feature (1)..(133): Homolog of NCBI NO: 9081845 NR Description: S-like ribonuclease [Prunus dulcis]
  misc_feature (1)..(133): Homolog of NCBI NO: 3860325 NR Description: ribonuclease T2 [Cicer arietinum]
  misc_feature (1)..(133): Homolog of NCBI NO: 21555182 NR Description: ribonuclease, RNS1 [Arabidopsis thaliana]
  misc_feature (1)..(133): Homolog of NCBI NO: 15227068 NR Description: ribonuclease, RNS1
MKKSWPTLACPSGSGEAFWEHEWEKHGTCSESVIDQHEYFQTALNLKQKTNLLGALTKAGINPDGKSYSLESIRDSIKESIGFTPWVECNRDGSGNSQLYQVYLCVDRSGSGLIECPVFPHGKCGAEIEFPSF

SEQ ID NO: 36325 - DNA, 1070 bp, Arabidopsis thaliana
  misc_feature (1)..(1070): Ceres Seq. ID no. 12338220
  misc_feature: MA Experiment ID: 108434 Result: Down-regulated in Transcription
  misc_feature: MA Experiment 108434 PARAMETER Experiment Name: At_Root_Tips_cDNA_P Parameter: Tissue Value: Root Tips
  misc_feature: MA Experiment ID: 108473 Result: Up-regulated in Transcription
  misc_feature: MA Experiment 108473 PARAMETER Experiment Name: At_Drought_Flowers_cDNA_P Parameter: Timepoint (hr) Value: 7 d
  misc_feature: MA Experiment 108473 PARAMETER Experiment Name: At_Drought_Flowers_cDNA_P Parameter: Tissue Value: Flower
  misc_feature: MA Experiment 108473 PARAMETER Experiment Name: At_Drought_Flowers_cDNA_P Parameter: Treatment Value: Drought vs. No Drought
  misc_feature: MA Experiment ID: 108488 Result: Down-regulated in Transcription
  misc_feature: MA Experiment ID: 108561 Result: Up-regulated in Transcription
  misc_feature: MA Experiment 108561 PARAMETER Experiment Name: At_100uM_ABA_cDNA_P Parameter: Timepoint (hr) Value: 6
  misc_feature: MA Experiment 108561 PARAMETER Experiment Name: At_100uM_ABA_cDNA_P Parameter: Tissue Value: Aerial
  misc_feature: MA Experiment 108561 PARAMETER Experiment Name: At_100uM_ABA_cDNA_P Parameter: Treatment Value: 100uM ABA vs. No Treatment
  misc_feature: MA Experiment ID: 108572 Result: Up-regulated in Transcription
  misc_feature: MA Experiment 108572 PARAMETER Experiment Name: At_Drought_cDNA_P Parameter: Timepoint (hr) Value: 1
  misc_feature: MA Experiment 108572 PARAMETER Experiment Name: At_Drought_cDNA_P Parameter: Tissue Value: Aerial
  misc_feature: MA Experiment 108572 PARAMETER Experiment Name: At_Drought_cDNA_P Parameter: Treatment Value: Drought vs. No Drought
  misc_feature: MA Experiment ID: 108573 Result: Up-regulated in Transcription
  misc_feature: MA Experiment 108573 PARAMETER Experiment Name: At_Drought_cDNA_P Parameter: Timepoint (hr) Value: 6
  misc_feature: MA Experiment 108573 PARAMETER Experiment Name: At_Drought_cDNA_P Parameter: Tissue Value: Aerial
  misc_feature: MA Experiment 108573 PARAMETER Experiment Name: At_Drought_cDNA_P Parameter: Treatment Value: Drought vs. No Drought
  misc_feature: MA Experiment ID: 108579 Result: Down-regulated in Transcription
  misc_feature: MA Experiment 108579 PARAMETER Experiment Name: At_4deg_Cold_cDNA_P Parameter: Temperature (deg C) Value: 4 vs. 22
  misc_feature: MA Experiment 108579 PARAMETER Experiment Name: At_4deg_Cold_cDNA_P Parameter: Timepoint (hr) Value: 6
  misc_feature: MA Experiment 108579 PARAMETER Experiment Name: At_4deg_Cold_cDNA_P Parameter: Tissue Value: Aerial
  misc_feature: MA Experiment ID: 108585 Result: Up-regulated in Transcription
  misc_feature: MA Experiment 108585 PARAMETER Experiment Name: At_5mM_NaNP_cDNA_P Parameter: Timepoint (hr) Value: 6
  misc_feature: MA Experiment 108585 PARAMETER Experiment Name: At_5mM_NaNP_cDNA_P Parameter: Tissue Value: Aerial
  misc_feature: MA Experiment 108585 PARAMETER Experiment Name: At_5mM_NaNP_cDNA_P Parameter: Treatment Value: null
  misc_feature: MA Experiment ID: 108605 Result: Up-regulated in Transcription
  misc_feature: MA Experiment 108605 PARAMETER Experiment Name: At_100uM_ABA_cDNA_P Parameter: Timepoint (hr) Value: 6
  misc_feature: MA Experiment 108605 PARAMETER Experiment Name: At_100uM_ABA_cDNA_P Parameter: Tissue Value: Aerial
  misc_feature: MA Experiment 108605 PARAMETER Experiment Name: At_100uM_ABA_cDNA_P Parameter: Treatment Value: 100uM ABA vs. No Treatment
  misc_feature: MA Experiment ID: 108607 Result: Up-regulated in Transcription
  misc_feature: MA Experiment 108607 PARAMETER Experiment Name: At_100uM_ABA_cDNA_P Parameter: Timepoint (hr) Value: 4
  misc_feature: MA Experiment 108607 PARAMETER Experiment Name: At_100uM_ABA_cDNA_P Parameter: Tissue Value: Aerial
  misc_feature: MA Experiment 108607 PARAMETER Experiment Name: At_100uM_ABA_cDNA_P Parameter: Treatment Value: 100uM ABA vs. No Treatment
  misc_feature: MA Experiment ID: 108608 Result: Up-regulated in Transcription
  misc_feature: MA Experiment 108608 PARAMETER Experiment Name: At_100uM_ABA_cDNA_P Parameter: Timepoint (hr) Value: 1
  misc_feature: MA Experiment 108608 PARAMETER Experiment Name: At_100uM_ABA_cDNA_P Parameter: Tissue Value: Aerial
  misc_feature: MA Experiment 108608 PARAMETER Experiment Name: At_100uM_ABA_cDNA_P Parameter: Treatment Value: 100uM ABA vs. No Treatment
  misc_feature: MA Experiment ID: 108609 Result: Up-regulated in Transcription
  misc_feature: MA Experiment 108609 PARAMETER Experiment Name: At_100uM_ABA_cDNA_P Parameter: Timepoint (hr) Value: 24
  misc_feature: MA Experiment 108609 PARAMETER Experiment Name: At_100uM_ABA_cDNA_P Parameter: Tissue Value: Aerial
  misc_feature: MA Experiment 108609 PARAMETER Experiment Name: At_100uM_ABA_cDNA_P Parameter: Treatment Value: 100uM ABA vs. No Treatment
  misc_feature: MA Experiment ID: 20000069 Result: Up-regulated in Transcription
  misc_feature: MA Experiment 20000069 PARAMETER Experiment Name: At_100uM_ABA_Mutants_cDNA_P Parameter: Plant Line Value: CS23
  misc_feature: MA Experiment 20000069 PARAMETER Experiment Name: At_100uM_ABA_Mutants_cDNA_P Parameter: Timepoint (hr) Value: 6
  misc_feature: MA Experiment 20000069 PARAMETER Experiment Name: At_100uM_ABA_Mutants_cDNA_P Parameter: Tissue Value: Aerial
  misc_feature: MA Experiment 20000069 PARAMETER Experiment Name: At_100uM_ABA_Mutants_cDNA_P Parameter: Treatment Value: 100uM ABA vs. No Treatment
  misc_feature: MA Experiment ID: 20000070 Result: Up-regulated in Transcription
  misc_feature: MA Experiment 20000070 PARAMETER Experiment Name: At_100uM_ABA_Mutants_cDNA_P Parameter: Plant Line Value: CS24
  misc_feature: MA Experiment 20000070 PARAMETER Experiment Name: At_100uM_ABA_Mutants_cDNA_P Parameter: Timepoint (hr) Value: 6
  misc_feature: MA Experiment 20000070 PARAMETER Experiment Name: At_100uM_ABA_Mutants_cDNA_P Parameter: Tissue Value: Aerial
  misc_feature: MA Experiment 20000070 PARAMETER Experiment Name: At_100uM_ABA_Mutants_cDNA_P Parameter: Treatment Value: 100uM ABA vs. No Treatment
  misc_feature: MA Experiment ID: 20000072 Result: Up-regulated in Transcription
  misc_feature: MA Experiment 20000072 PARAMETER Experiment Name: At_100uM_ABA_Mutants_cDNA_P Parameter: Plant Line Value: CS8105
  misc_feature: MA Experiment 20000072 PARAMETER Experiment Name: At_100uM_ABA_Mutants_cDNA_P Parameter: Timepoint (hr) Value: 6
  misc_feature: MA Experiment 20000072 PARAMETER Experiment Name: At_100uM_ABA_Mutants_cDNA_P Parameter: Tissue Value: Aerial
  misc_feature: MA Experiment 20000072 PARAMETER Experiment Name: At_100uM_ABA_Mutants_cDNA_P Parameter: Treatment Value: 100uM ABA vs. No Treatment
  misc_feature: MA Experiment ID: 20000086 Result: Up-regulated in Transcription
  misc_feature: MA Experiment 20000086 PARAMETER Experiment Name: At_100uM_ABA_Mutants_cDNA_P Parameter: Plant Line Value: CS22
  misc_feature: MA Experiment 20000086 PARAMETER Experiment Name: At_100uM_ABA_Mutants_cDNA_P Parameter: Timepoint (hr) Value: 6
  misc_feature: MA Experiment 20000086 PARAMETER Experiment Name: At_100uM_ABA_Mutants_cDNA_P Parameter: Tissue Value: Aerial
  misc_feature: MA Experiment 20000086 PARAMETER Experiment Name: At_100uM_ABA_Mutants_cDNA_P Parameter: Treatment Value: 100uM ABA vs. No Treatment
  misc_feature: MA Experiment ID: 20000087 Result: Up-regulated in Transcription
  misc_feature: MA Experiment 20000087 PARAMETER Experiment Name: At_100uM_ABA_Mutants_cDNA_P Parameter: Plant Line Value: WS
  misc_feature: MA Experiment 20000087 PARAMETER Experiment Name: At_100uM_ABA_Mutants_cDNA_P Parameter: Timepoint (hr) Value: 6
  misc_feature: MA Experiment 20000087 PARAMETER Experiment Name: At_100uM_ABA_Mutants_cDNA_P Parameter: Tissue Value: Aerial
  misc_feature: MA Experiment 20000087 PARAMETER Experiment Name: At_100uM_ABA_Mutants_cDNA_P Parameter: Treatment Value: 100uM ABA vs. No Treatment
  misc_feature: MA Experiment ID: 20000088 Result: Up-regulated in Transcription
  misc_feature: MA Experiment 20000088 PARAMETER Experiment Name: At_100uM_ABA_Mutants_cDNA_P Parameter: Plant Line Value: Landsberg
  misc_feature: MA Experiment 20000088 PARAMETER Experiment Name: At_100uM_ABA_Mutants_cDNA_P Parameter: Timepoint (hr) Value: 6
  misc_feature: MA Experiment 20000088 PARAMETER Experiment Name: At_100uM_ABA_Mutants_cDNA_P Parameter: Tissue Value: Aerial
  misc_feature: MA Experiment 20000088 PARAMETER Experiment Name: At_100uM_ABA_Mutants_cDNA_P Parameter: Treatment Value: 100uM ABA vs. No Treatment
  misc_feature: MA Experiment ID: 20000117 Result: Up-regulated in Transcription
  misc_feature: MA Experiment 20000117 PARAMETER Experiment Name: At_100uM_ABA_Mutants_cDNA_P Parameter: Plant Line Value: Columbia
  misc_feature: MA Experiment 20000117 PARAMETER Experiment Name: At_100uM_ABA_Mutants_cDNA_P Parameter: Timepoint (hr) Value: 6
  misc_feature: MA Experiment 20000117 PARAMETER Experiment Name: At_100uM_ABA_Mutants_cDNA_P Parameter: Tissue Value: Aerial
  misc_feature: MA Experiment 20000117 PARAMETER Experiment Name: At_100uM_ABA_Mutants_cDNA_P Parameter: Treatment Value: 100uM ABA vs. No Treatment
  misc_feature: MA Experiment ID: 20000166 Result: Up-regulated in Transcription
  misc_feature: MA Experiment 20000166 PARAMETER Experiment Name: At_100uM_ABA_P Parameter: Age (day) Value: 14
  misc_feature: MA Experiment 20000166 PARAMETER Experiment Name: At_100uM_ABA_P Parameter: Organism Value: A. thaliana
  misc_feature: MA Experiment 20000166 PARAMETER Experiment Name: At_100uM_ABA_P Parameter: Plant Line Value: WS
  misc_feature: MA Experiment 20000166 PARAMETER Experiment Name: At_100uM_ABA_P Parameter: Timepoint (hr) Value: 1
  misc_feature: MA Experiment 20000166 PARAMETER Experiment Name: At_100uM_ABA_P Parameter: Tissue Value: Aerial
  misc_feature: MA Experiment 20000166 PARAMETER Experiment Name: At_100uM_ABA_P Parameter: Treatment Value: 100uM ABA vs. No Treatment
  misc_feature: MA Experiment ID: 20000169 Result: Up-regulated in Transcription
  misc_feature: MA Experiment 20000169 PARAMETER Experiment Name: At_100uM_ABA_P Parameter: Age (day) Value: 14
  misc_feature: MA Experiment 20000169 PARAMETER Experiment Name: At_100uM_ABA_P Parameter: Organism Value: A. thaliana
  misc_feature: MA Experiment 20000169 PARAMETER Experiment Name: At_100uM_ABA_P Parameter: Plant Line Value: WS
  misc_feature: MA Experiment 20000169 PARAMETER Experiment Name: At_100uM_ABA_P Parameter: Timepoint (hr) Value: 6
  misc_feature: MA Experiment 20000169 PARAMETER Experiment Name: At_100uM_ABA_P Parameter: Tissue Value: Aerial
  misc_feature: MA Experiment 20000169 PARAMETER Experiment Name: At_100uM_ABA_P Parameter: Treatment Value: 100uM ABA vs. No Treatment
  misc_feature: MA Experiment ID: 20000184 Result: Down-regulated in Transcription
  misc_feature: MA Experiment 20000184 PARAMETER Experiment Name: At_Shoots__P Parameter: Age (day) Value: 7
  misc_feature: MA Experiment 20000184 PARAMETER Experiment Name: At_Shoots__P Parameter: Tissue Value: Shoots vs. Whole Plant
  misc_feature: MA Experiment ID: 20000214 Result: Down-regulated in Transcription
  misc_feature: MA Experiment 20000214 PARAMETER Experiment Name: At_4deg_Cold_P Parameter: Timepoint (hr) Value: 6
  misc_feature: MA Experiment ID: 20000234 Result: Down-regulated in Transcription
  misc_feature: MA Experiment 20000234 PARAMETER Experiment Name: At_Siliques_P Parameter: Age (day) Value: 21
  misc_feature: MA Experiment 20000234 PARAMETER Experiment Name: At_Siliques_P Parameter: Organism Value: A. thaliana
  misc_feature: MA Experiment 20000234 PARAMETER Experiment Name: At_Siliques_P Parameter: Plant Line Value: WS
  misc_feature: MA Experiment 20000234 PARAMETER Experiment Name: At_Siliques_P Parameter: Tissue Value: Less Than 5mm Siliques vs. Whole Plant
  misc_feature: MA Experiment ID: 20000235 Result: Down-regulated in Transcription
  misc_feature: MA Experiment 20000235 PARAMETER Experiment Name: At_Siliques_P Parameter: Age (day) Value: 21
  misc_feature: MA Experiment 20000235 PARAMETER Experiment Name: At_Siliques_P Parameter: Organism Value: A. thaliana
  misc_feature: MA Experiment 20000235 PARAMETER Experiment Name: At_Siliques_P Parameter: Plant Line Value: WS
  misc_feature: MA Experiment 20000235 PARAMETER Experiment Name: At_Siliques_P Parameter: Tissue Value: 5-10mm Siliques vs. Whole Plant
  misc_feature: MA Experiment ID: 20000265 Result: Down-regulated in Transcription
  misc_feature: MA Experiment 20000265 PARAMETER Experiment Name: At_Open_Flower_P Parameter: Age (day) Value: 21
  misc_feature: MA Experiment 20000265 PARAMETER Experiment Name: At_Open_Flower_P Parameter: Plant Line Value: WS
  misc_feature: MA Experiment 20000265 PARAMETER Experiment Name: At_Open_Flower_P Parameter: Tissue Value: Closed Flower vs. Whole Plant
  misc_feature: MA Experiment ID: 20000286 Result: Down-regulated in Transcription
  misc_feature: MA Experiment 20000286 PARAMETER Experiment Name: At_Open_Flower_P Parameter: Age (day) Value: 21
  misc_feature: MA Experiment 20000286 PARAMETER Experiment Name: At_Open_Flower_P Parameter: Plant Line Value: WS
  misc_feature: MA Experiment 20000286 PARAMETER Experiment Name: At_Open_Flower_P Parameter: Tissue Value: Half Open vs. Whole Plant
  misc_feature: MA Experiment ID: 20000436 Result: Up-regulated in Transcription
  misc_feature: MA Experiment 20000436 PARAMETER Experiment Name: At_Drought_P Parameter: Age (day) Value: 7
  misc_feature: MA Experiment 20000436 PARAMETER Experiment Name: At_Drought_P Parameter: Organism Value: A. thaliana
  misc_feature: MA Experiment 20000436 PARAMETER Experiment Name: At_Drought_P Parameter: Plant Line Value: WS
  misc_feature: MA Experiment 20000436 PARAMETER Experiment Name: At_Drought_P Parameter: Timepoint (hr) Value: 12
  misc_feature: MA Experiment 20000436 PARAMETER Experiment Name: At_Drought_P Parameter: Tissue Value: Whole Plant
  misc_feature: MA Experiment 20000436 PARAMETER Experiment Name: At_Drought_P Parameter: Treatment Value: Drought vs. No Drought
  misc_feature: MA Experiment ID: 20000437 Result: Up-regulated in Transcription
  misc_feature: MA Experiment 20000437 PARAMETER Experiment Name: At_Drought_P Parameter: Age (day) Value: 8
  misc_feature: MA Experiment 20000437 PARAMETER Experiment Name: At_Drought_P Parameter: Organism Value: A. thaliana
  misc_feature: MA Experiment 20000437 PARAMETER Experiment Name: At_Drought_P Parameter: Plant Line Value: WS
  misc_feature: MA Experiment 20000437 PARAMETER Experiment Name: At_Drought_P Parameter: Timepoint (hr) Value: 24
  misc_feature: MA Experiment 20000437 PARAMETER Experiment Name: At_Drought_P Parameter: Tissue Value: Whole Plant
  misc_feature: MA Experiment 20000437 PARAMETER Experiment Name: At_Drought_P Parameter: Treatment Value: Drought vs. No Drought
  misc_feature: MA Experiment ID: 20000453 Result: Up-regulated in Transcription
  misc_feature: MA Experiment 20000453 PARAMETER Experiment Name: At_100uM_ABA_P Parameter: Age (day) Value: 15
  misc_feature: MA Experiment 20000453 PARAMETER Experiment Name: At_100uM_ABA_P Parameter: Organism Value: A. thaliana
  misc_feature: MA Experiment 20000453 PARAMETER Experiment Name: At_100uM_ABA_P Parameter: Plant Line Value: WS
  misc_feature: MA Experiment 20000453 PARAMETER Experiment Name: At_100uM_ABA_P Parameter: Timepoint (hr) Value: 24
  misc_feature: MA Experiment 20000453 PARAMETER Experiment Name: At_100uM_ABA_P Parameter: Tissue Value: Aerial
  misc_feature: MA Experiment 20000453 PARAMETER Experiment Name: At_100uM_ABA_P Parameter: Treatment Value: 100uM ABA vs. No Treatment
  misc_feature: MA Experiment ID: 20000794 Result: Up-regulated in Transcription
  misc_feature: MA Experiment 20000794 PARAMETER Experiment Name: At_Petals_P Parameter: Age (day) Value: 23-25 days
  misc_feature: MA Experiment 20000794 PARAMETER Experiment Name: At_Petals_P Parameter: Plant Line Value: WS
  misc_feature: MA Experiment 20000794 PARAMETER Experiment Name: At_Petals_P Parameter: Tissue Value: Petals vs. Whole plant
  misc_feature: MA Experiment ID: 20001450 Result: Up-regulated in Transcription
  misc_feature: MA Experiment 20001450 PARAMETER Experiment Name: At_Far-red-induction_P Parameter: Age (day) Value: 7
  misc_feature: MA Experiment 20001450 PARAMETER Experiment Name: At_Far-red-induction_P Parameter: Light Value: Far-red vs. White
  misc_feature: MA Experiment 20001450 PARAMETER Experiment Name: At_Far-red-induction_P Parameter: Organism Value: A. thaliana
  misc_feature: MA Experiment 20001450 PARAMETER Experiment Name: At_Far-red-induction_P Parameter: Plant Line Value: Columbia
  misc_feature: MA Experiment 20001450 PARAMETER Experiment Name: At_Far-red-induction_P Parameter: Timepoint (hr) Value: 8
  misc_feature: MA Experiment 20001450 PARAMETER Experiment Name: At_Far-red-induction_P Parameter: Tissue Value: Whole Plant
  misc_feature: MA Experiment ID: 20001451 Result: Up-regulated in Transcription
  misc_feature: MA Experiment 20001451 PARAMETER Experiment Name: At_Far-red-induction_P Parameter: Age (day) Value: 7
  misc_feature: MA Experiment 20001451 PARAMETER Experiment Name: At_Far-red-induction_P Parameter: Light Value: Far-red vs. White
  misc_feature: MA Experiment 20001451 PARAMETER Experiment Name: At_Far-red-induction_P Parameter: Organism Value: A. thaliana
  misc_feature: MA Experiment 20001451 PARAMETER Experiment Name: At_Far-red-induction_P Parameter: Plant Line Value: Columbia
  misc_feature: MA Experiment 20001451 PARAMETER Experiment Name: At_Far-red-induction_P Parameter: Timepoint (hr) Value: 24
  misc_feature: MA Experiment 20001451 PARAMETER Experiment Name: At_Far-red-induction_P Parameter: Tissue Value: Whole Plant
  misc_feature: MA Experiment ID: 20001554 Result: Up-regulated in Transcription
  misc_feature: MA Experiment 20001554 PARAMETER Experiment Name: At_Drought_Soil_Dry_P Parameter: Age (day) Value: 21
  misc_feature: MA Experiment 20001554 PARAMETER Experiment Name: At_Drought_Soil_Dry_P Parameter: Organism Value: A. thaliana
  misc_feature: MA Experiment 20001554 PARAMETER Experiment Name: At_Drought_Soil_Dry_P Parameter: Plant Line Value: WS
  misc_feature: MA Experiment 20001554 PARAMETER Experiment Name: At_Drought_Soil_Dry_P Parameter: Post Timepoint (hr) Value: None
  misc_feature: MA Experiment 20001554 PARAMETER Experiment Name: At_Drought_Soil_Dry_P Parameter: Post-Treatment Value: None
  misc_feature: MA Experiment 20001554 PARAMETER Experiment Name: At_Drought_Soil_Dry_P Parameter: Timepoint (day) Value: 7
  misc_feature: MA Experiment 20001554 PARAMETER Experiment Name: At_Drought_Soil_Dry_P Parameter: Treatment Value: Drought vs. No Drought
  misc_feature: MA Experiment ID: 20001555 Result: Up-regulated in Transcription
  misc_feature: MA Experiment 20001555 PARAMETER Experiment Name: At_Drought_Soil_Dry_P Parameter: Age (day) Value: 24
  misc_feature: MA Experiment 20001555 PARAMETER Experiment Name: At_Drought_Soil_Dry_P Parameter: Organism Value: A. thaliana
  misc_feature: MA Experiment 20001555 PARAMETER Experiment Name: At_Drought_Soil_Dry_P Parameter: Plant Line Value: WS
  misc_feature: MA Experiment 20001555 PARAMETER Experiment Name: At_Drought_Soil_Dry_P Parameter: Post Timepoint (hr) Value: None
  misc_feature: MA Experiment 20001555 PARAMETER Experiment Name: At_Drought_Soil_Dry_P Parameter: Post-Treatment Value: None
  misc_feature: MA Experiment 20001555 PARAMETER Experiment Name: At_Drought_Soil_Dry_P Parameter: Timepoint (day) Value: 10
  misc_feature: MA Experiment 20001555 PARAMETER Experiment Name: At_Drought_Soil_Dry_P Parameter: Treatment Value: Drought vs. No Drought
  misc_feature: MA Experiment ID: 20001559 Result: Up-regulated in Transcription
  misc_feature: MA Experiment 20001559 PARAMETER Experiment Name: At_Drought_Soil_Dry_P Parameter: Age (day) Value: 28
  misc_feature: MA Experiment 20001559 PARAMETER Experiment Name: At_Drought_Soil_Dry_P Parameter: Organism Value: A. thaliana
  misc_feature: MA Experiment 20001559 PARAMETER Experiment Name: At_Drought_Soil_Dry_P Parameter: Plant Line Value: WS
  misc_feature: MA Experiment 20001559 PARAMETER Experiment Name: At_Drought_Soil_Dry_P Parameter: Post Timepoint (hr) Value: 29
  misc_feature: MA Experiment 20001559 PARAMETER Experiment Name: At_Drought_Soil_Dry_P Parameter: Post-Treatment Value: Re-Water vs. No Drought
  misc_feature: MA Experiment 20001559 PARAMETER Experiment Name: At_Drought_Soil_Dry_P Parameter: Timepoint (day) Value: 14
  misc_feature: MA Experiment 20001559 PARAMETER Experiment Name: At_Drought_Soil_Dry_P Parameter: Treatment Value: Drought vs. No Drought
  misc_feature: MA Experiment ID: 20001904 Result: Up-regulated in Transcription
  misc_feature: MA Experiment 20001904 PARAMETER Experiment Name: At_Drought_Reproduction_P Parameter: Age (day) Value: 37
  misc_feature: MA Experiment 20001904 PARAMETER Experiment Name: At_Drought_Reproduction_P Parameter: Organism Value: A. thaliana
  misc_feature: MA Experiment 20001904 PARAMETER Experiment Name: At_Drought_Reproduction_P Parameter: Plant Line Value: WS
  misc_feature: MA Experiment 20001904 PARAMETER Experiment Name: At_Drought_Reproduction_P Parameter: Timepoint (day) Value: 7
  misc_feature: MA Experiment 20001904 PARAMETER Experiment Name: At_Drought_Reproduction_P Parameter: Tissue Value: Rosettes
  misc_feature: MA Experiment 20001904 PARAMETER Experiment Name: At_Drought_Reproduction_P Parameter: Treatment Value: Drought vs. No Drought
  misc_feature: MA Experiment ID: 20001905 Result: Up-regulated in Transcription
  misc_feature: MA Experiment 20001905 PARAMETER Experiment Name: At_Drought_Reproduction_P Parameter: Age (day) Value: 40
  misc_feature: MA Experiment 20001905 PARAMETER Experiment Name: At_Drought_Reproduction_P Parameter: Organism Value: A. thaliana
  misc_feature: MA Experiment 20001905 PARAMETER Experiment Name: At_Drought_Reproduction_P Parameter: Plant Line Value: WS
  misc_feature: MA Experiment 20001905 PARAMETER Experiment Name: At_Drought_Reproduction_P Parameter: Timepoint (day) Value: 10
  misc_feature: MA Experiment 20001905 PARAMETER Experiment Name: At_Drought_Reproduction_P Parameter: Tissue Value: Rosettes
  misc_feature: MA Experiment 20001905 PARAMETER Experiment Name: At_Drought_Reproduction_P Parameter: Treatment Value: Drought vs. No Drought
  misc_feature: MA Experiment ID: 20001911 Result: Up-regulated in Transcription
  misc_feature: MA Experiment 20001911 PARAMETER Experiment Name: At_Drought_Reproduction_P Parameter: Age (day) Value: 40
  misc_feature: MA Experiment 20001911 PARAMETER Experiment Name: At_Drought_Reproduction_P Parameter: Organism Value: A. thaliana
  misc_feature: MA Experiment 20001911 PARAMETER Experiment Name: At_Drought_Reproduction_P Parameter: Plant Line Value: WS
  misc_feature: MA Experiment 20001911 PARAMETER Experiment Name: At_Drought_Reproduction_P Parameter: Timepoint (day) Value: 10
  misc_feature: MA Experiment 20001911 PARAMETER Experiment Name: At_Drought_Reproduction_P Parameter: Tissue Value: Flowers
  misc_feature: MA Experiment 20001911 PARAMETER Experiment Name: At_Drought_Reproduction_P Parameter: Treatment Value: Drought vs. No Drought
acatttttcacgtctccgacaacttcttcttctccaacccaaattcctctcttctcaacctcgtcctctccgttctcctcctccaacatttctccgatcattgatgggttcgtcttcttctttctcctcttcttcctcgaagcttctctttcgtcaactctttgagaacgaatcttccacctttacttatcttctcgccgacgtttctcatcctgataaacctgctttgttgattgatccggtggacaagactgtggatagagacttgaaactgattgatgagttaggattaaagcttatctatgctatgaacactcatgttcatgctgatcatgtcactggtactggacttcttaagacgaagctcccgggtgtgaaatccgttatttcgaaagcaagtggttccaaagctgatttgtttcttgaacctggtgacaaagtatctattggtgatatataccttgaggttcgtgctacacctggacacactacaggatgtgttacatatgtgactggtgaaggagctgatcagccccaaccaagaatggcttttaccggggatgctgtactcatccgtggttgtgggaggactgactttcagggaggaagctcagatcaactctacgagtctgtacattcacagatattttcattgccaaaggacacattgatctatccagctcacgactacaaaggtttcgaggtaagtacagttggagaagagatgcaacacaacccgcgtctaactaaagataaagaaacattcaaaaccattatgtcaaatctgaatctgtcgtatccgaagatgattgatgttgcagtaccagcaaatatggtctgtgggttacaagatgtgccttctcaagccaactaaaaaaaactcttacatataatgtttgtctttttatcgatgtcattctatatttaccaaagccaataaaaactcttgagagtaatttctacaataagatttgcttccgttgtagataagttcattagaaaattgtgtaaattagattgaacatgtggaatttgttatgaagatgaagacagtatttgcgtgttcgact

SEQ ID NO: 36326 - protein, 290 aa, Arabidopsis thaliana
  peptide (1)..(290): Ceres Seq. ID no. 12338221
  misc_feature (59)..(228): Pfam Name: Metallo-beta-lactamase superfamily Pfam Description: Metallo-beta-lactamase superfamily
  misc_feature (39)..(287): Homolog of NCBI NO: 27676450 NR Description: similar to HSCO protein [Mus musculus] [Rattus
  misc_feature (31)..(283): Homolog of NCBI NO: 14198377 NR Description: Similar to RIKEN cDNA 0610025L15 gene [Homo
  misc_feature (39)..(287): Homolog of NCBI NO: 12963539 NR Description: HSCO protein [Mus musculus]
  misc_feature (32)..(284): Homolog of NCBI NO: 27371293 NR Description: Similar to RIKEN cDNA 0610025L15 gene [Xenopus
  misc_feature (28)..(286): Homolog of NCBI NO: 34910930 NR Description: putative glyoxalase II [Oryza sativa (japonica
  misc_feature (35)..(290): Homolog of NCBI NO: 18404530 NR Description: glyoxalase II, putative (hydroxyacylglutathione
  misc_feature (35)..(290): Homolog of NCBI NO: 1644427 NR Description: glyoxalase II [Arabidopsis thaliana]
  misc_feature (234)..(290): Homolog of NCBI NO: 8671869 NR Description: Contains similarity to an unknown glyoxalase II Arabidopsis thaliana gb|U74610 and contains a PF|00753 domain. ESTs gb|AI999524, gb|AI100252, gb|AI099807,
  misc_feature (1)..(235): Homolog of NCBI NO: 8671869 NR Description: Contains similarity to an unknown glyoxalase II Arabidopsis thaliana gb|U74610 and contains a PF|00753 domain. ESTs gb|AI999524, gb|AI100252, gb|AI099807,
  misc_feature (1)..(290): Homolog of NCBI NO: 25405648 NR Description: probable glyoxalase II, 78941-80643
HFSRLRQLLLLQPKFLSSQPRPLRSPPPTFLRSLMGSSSSFSSSSSKLLFRQLFENESSTFTYLLADVSHPDKPALLIDPVDKTVDRDLKLIDELGLKLIYAMNTHVHADHVTGTGLLKTKLPGVKSVISKASGSKADLFLEPGDKVSIGDIYLEVRATPGHTTGCVTYVTGEGADQPQPRMAFTGDAVLIRGCGRTDFQGGSSDQLYESVHSQIFSLPKDTLIYPAHDYKGFEVSTVGEEMQHNPRLTKDKETFKTIMSNLNLSYPKMIDVAVPANMVCGLQDVPSQAN

SEQ ID NO: 36327 - protein, 256 aa, Arabidopsis thaliana
  peptide (1)..(256): Ceres Seq. ID no. 12338222
  misc_feature (25)..(194): Pfam Name: Metallo-beta-lactamase superfamily Pfam Description: Metallo-beta-lactamase superfamily
  misc_feature (5)..(253): Homolog of NCBI NO: 27676450 NR Description: similar to HSCO protein [Mus musculus] [Rattus
  misc_feature (1)..(249): Homolog of NCBI NO: 14198377 NR Description: Similar to RIKEN cDNA 0610025L15 gene [Homo
  misc_feature (5)..(253): Homolog of NCBI NO: 12963539 NR Description: HSCO protein [Mus musculus]
  misc_feature (1)..(250): Homolog of NCBI NO: 27371293 NR Description: Similar to RIKEN cDNA 0610025L15 gene [Xenopus
  misc_feature (1)..(252): Homolog of NCBI NO: 34910930 NR Description: putative glyoxalase II [Oryza sativa (japonica
  misc_feature (1)..(256): Homolog of NCBI NO: 18404530 NR Description: glyoxalase II, putative (hydroxyacylglutathione
  misc_feature (1)..(256): Homolog of NCBI NO: 1644427 NR Description: glyoxalase II [Arabidopsis thaliana]
  misc_feature (200)..(256): Homolog of NCBI NO: 8671869 NR Description: Contains similarity to an unknown glyoxalase II Arabidopsis thaliana gb|U74610 and contains a PF|00753 domain. ESTs gb|AI999524, gb|AI100252, gb|AI099807,
  misc_feature (1)..(201): Homolog of NCBI NO: 8671869 NR Description: Contains similarity to an unknown glyoxalase II Arabidopsis thaliana gb|U74610 and contains a PF|00753 domain. ESTs gb|AI999524, gb|AI100252, gb|AI099807,
  misc_feature (1)..(256): Homolog of NCBI NO: 25405648 NR Description: probable glyoxalase II, 78941-80643
MGSSSSFSSSSSKLLFRQLFENESSTFTYLLADVSHPDKPALLIDPVDKTVDRDLKLIDELGLKLIYAMNTHVHADHVTGTGLLKTKLPGVKSVISKASGSKADLFLEPGDKVSIGDIYLEVRATPGHTTGCVTYVTGEGADQPQPRMAFTGDAVLIRGCGRTDFQGGSSDQLYESVHSQIFSLPKDTLIYPAHDYKGFEVSTVGEEMQHNPRLTKDKETFKTIMSNLNLSYPKMIDVAVPANMVCGLQDVPSQAN

SEQ ID NO: 36328 - protein, 188 aa, Arabidopsis thaliana
  peptide (1)..(188): Ceres Seq. ID no. 12338223
  misc_feature (1)..(126): Pfam Name: Metallo-beta-lactamase superfamily Pfam Description: Metallo-beta-lactamase superfamily
  misc_feature (1)..(185): Homolog of NCBI NO: 27676450 NR Description: similar to HSCO protein [Mus musculus] [Rattus
  misc_feature (1)..(181): Homolog of NCBI NO: 14198377 NR Description: Similar to RIKEN cDNA 0610025L15 gene [Homo
  misc_feature (1)..(185): Homolog of NCBI NO: 12963539 NR Description: HSCO protein [Mus musculus]
  misc_feature (1)..(182): Homolog of NCBI NO: 27371293 NR Description: Similar to RIKEN cDNA 0610025L15 gene [Xenopus
  misc_feature (1)..(184): Homolog of NCBI NO: 34910930 NR Description: putative glyoxalase II [Oryza sativa (japonica
  misc_feature (1)..(188): Homolog of NCBI NO: 18404530 NR Description: glyoxalase II, putative (hydroxyacylglutathione
  misc_feature (1)..(188): Homolog of NCBI NO: 1644427 NR Description: glyoxalase II [Arabidopsis thaliana]
  misc_feature (132)..(188): Homolog of NCBI NO: 8671869 NR Description: Contains similarity to an unknown glyoxalase II Arabidopsis thaliana gb|U74610 and contains a PF|00753 domain. ESTs gb|AI999524, gb|AI100252, gb|AI099807,
  misc_feature (1)..(133): Homolog of NCBI NO: 8671869 NR Description: Contains similarity to an unknown glyoxalase II Arabidopsis thaliana gb|U74610 and contains a PF|00753 domain. ESTs gb|AI999524, gb|AI100252, gb|AI099807,
  misc_feature (1)..(188): Homolog of NCBI NO: 25405648 NR Description: probable glyoxalase II, 78941-80643
MNTHVHADHVTGTGLLKTKLPGVKSVISKASGSKADLFLEPGDKVSIGDIYLEVRATPGHTTGCVTYVTGEGADQPQPRMAFTGDAVLIRGCGRTDFQGGSSDQLYESVHSQIFSLPKDTLIYPAHDYKGFEVSTVGEEMQHNPRLTKDKETFKTIMSNLNLSYPKMIDVAVPANMVCGLQDVPSQAN

SEQ ID NO: 36329 - DNA, 2009 bp, Arabidopsis thaliana
  misc_feature (1)..(2009): Ceres Seq. ID no. 13645749
  misc_feature: MA Experiment ID: 20000182 Result: Up-regulated in Transcription
  misc_feature: MA Experiment 20000182 PARAMETER Experiment Name: At_2mM_SA_P Parameter: Age (day) Value: 14
  misc_feature: MA Experiment 20000182 PARAMETER Experiment Name: At_2mM_SA_P Parameter: Organism Value: A. thaliana
  misc_feature: MA Experiment 20000182 PARAMETER Experiment Name: At_2mM_SA_P Parameter: Plant Line Value: WS
  misc_feature: MA Experiment 20000182 PARAMETER Experiment Name: At_2mM_SA_P Parameter: Timepoint (hr) Value: 6
  misc_feature: MA Experiment 20000182 PARAMETER Experiment Name: At_2mM_SA_P Parameter: Tissue Value: Aerial
  misc_feature: MA Experiment 20000182 PARAMETER Experiment Name: At_2mM_SA_P Parameter: Treatment Value: 2mM SA vs. No Treatment
  misc_feature: MA Experiment ID: 20000185 Result: Down-regulated in Transcription
  misc_feature: MA Experiment 20000185 PARAMETER Experiment Name: At_Roots__P Parameter: Age (day) Value: 7 vs. 21
  misc_feature: MA Experiment 20000185 PARAMETER Experiment Name: At_Roots__P Parameter: Organism Value: A. thaliana
  misc_feature: MA Experiment 20000185 PARAMETER Experiment Name: At_Roots__P Parameter: Tissue Value: Roots vs. Whole Plant
  misc_feature: MA Experiment ID: 20000234 Result: Down-regulated in Transcription
  misc_feature: MA Experiment 20000234 PARAMETER Experiment Name: At_Siliques_P Parameter: Age (day) Value: 21
  misc_feature: MA Experiment 20000234 PARAMETER Experiment Name: At_Siliques_P Parameter: Organism Value: A. thaliana
  misc_feature: MA Experiment 20000234 PARAMETER Experiment Name: At_Siliques_P Parameter: Plant Line Value: WS
  misc_feature: MA Experiment 20000234 PARAMETER Experiment Name: At_Siliques_P Parameter: Tissue Value: Less Than 5mm Siliques vs. Whole Plant
  misc_feature: MA Experiment ID: 20000235 Result: Down-regulated in Transcription
  misc_feature: MA Experiment 20000235 PARAMETER Experiment Name: At_Siliques_P Parameter: Age (day) Value: 21
  misc_feature: MA Experiment 20000235 PARAMETER Experiment Name: At_Siliques_P Parameter: Organism Value: A. thaliana
  misc_feature: MA Experiment 20000235 PARAMETER Experiment Name: At_Siliques_P Parameter: Plant Line Value: WS
  misc_feature: MA Experiment 20000235 PARAMETER Experiment Name: At_Siliques_P Parameter: Tissue Value: 5-10mm Siliques vs. Whole Plant
  misc_feature: MA Experiment ID: 20000264 Result: Down-regulated in Transcription
  misc_feature: MA Experiment 20000264 PARAMETER Experiment Name: At_Open_Flower_P Parameter: Age (day) Value: 21
  misc_feature: MA Experiment 20000264 PARAMETER Experiment Name: At_Open_Flower_P Parameter: Plant Line Value: WS
  misc_feature: MA Experiment 20000264 PARAMETER Experiment Name: At_Open_Flower_P Parameter: Tissue Value: Open Flower vs. Whole Plant
  misc_feature: MA Experiment ID: 20000265 Result: Down-regulated in Transcription
  misc_feature: MA Experiment 20000265 PARAMETER Experiment Name: At_Open_Flower_P Parameter: Age (day) Value: 21
  misc_feature: MA Experiment 20000265 PARAMETER Experiment Name: At_Open_Flower_P Parameter: Plant Line Value: WS
  misc_feature: MA Experiment 20000265 PARAMETER Experiment Name: At_Open_Flower_P Parameter: Tissue Value: Closed Flower vs. Whole Plant
  misc_feature: MA Experiment ID: 20000286 Result: Down-regulated in Transcription
  misc_feature: MA Experiment 20000286 PARAMETER Experiment Name: At_Open_Flower_P Parameter: Age (day) Value: 21
  misc_feature: MA Experiment 20000286 PARAMETER Experiment Name: At_Open_Flower_P Parameter: Plant Line Value: WS
  misc_feature: MA Experiment 20000286 PARAMETER Experiment Name: At_Open_Flower_P Parameter: Tissue Value: Half Open vs. Whole Plant
  misc_feature: MA Experiment ID: 20000438 Result: Down-regulated in Transcription
  misc_feature: MA Experiment 20000438 PARAMETER Experiment Name: At_Shoots__P Parameter: Age (day) Value: 14
  misc_feature: MA Experiment 20000438 PARAMETER Experiment Name: At_Shoots__P Parameter: Tissue Value: Shoots vs. Whole Plant
  misc_feature: MA Experiment ID: 20000439 Result: Down-regulated in Transcription
  misc_feature: MA Experiment 20000439 PARAMETER Experiment Name: At_Roots__P Parameter: Age (day) Value: 14 vs. 21
  misc_feature: MA Experiment 20000439 PARAMETER Experiment Name: At_Roots__P Parameter: Organism Value: A. thaliana
  misc_feature: MA Experiment 20000439 PARAMETER Experiment Name: At_Roots__P Parameter: Tissue Value: Roots vs. Whole Plant
  misc_feature: MA Experiment ID: 20000453 Result: Up-regulated in Transcription
  misc_feature: MA Experiment 20000453 PARAMETER Experiment Name: At_100uM_ABA_P Parameter: Age (day) Value: 15
  misc_feature: MA Experiment 20000453 PARAMETER Experiment Name: At_100uM_ABA_P Parameter: Organism Value: A. thaliana
  misc_feature: MA Experiment 20000453 PARAMETER Experiment Name: At_100uM_ABA_P Parameter: Plant Line Value: WS
  misc_feature: MA Experiment 20000453 PARAMETER Experiment Name: At_100uM_ABA_P Parameter: Timepoint (hr) Value: 24
  misc_feature: MA Experiment 20000453 PARAMETER Experiment Name: At_100uM_ABA_P Parameter: Tissue Value: Aerial
  misc_feature: MA Experiment 20000453 PARAMETER Experiment Name: At_100uM_ABA_P Parameter: Treatment Value: 100uM ABA vs. No Treatment
  misc_feature: MA Experiment ID: 20001558 Result: Down-regulated in Transcription
  misc_feature: MA Experiment 20001558 PARAMETER Experiment Name: At_Drought_Soil_Dry_P Parameter: Age (day) Value: 27
  misc_feature: MA Experiment 20001558 PARAMETER Experiment Name: At_Drought_Soil_Dry_P Parameter: Organism Value: A. thaliana
  misc_feature: MA Experiment 20001558 PARAMETER Experiment Name: At_Drought_Soil_Dry_P Parameter: Plant Line Value: WS
  misc_feature: MA Experiment 20001558 PARAMETER Experiment Name: At_Drought_Soil_Dry_P Parameter: Post Timepoint (hr) Value: 6
  misc_feature: MA Experiment 20001558 PARAMETER Experiment Name: At_Drought_Soil_Dry_P Parameter: Post-Treatment Value: Re-Water vs. No Drought
  misc_feature: MA Experiment 20001558 PARAMETER Experiment Name: At_Drought_Soil_Dry_P Parameter: Timepoint (day) Value: 13
  misc_feature: MA Experiment 20001558 PARAMETER Experiment Name: At_Drought_Soil_Dry_P Parameter: Treatment Value: Drought vs. No Drought
  misc_feature: MA Experiment ID: 20001560 Result: Down-regulated in Transcription
  misc_feature: MA Experiment 20001560 PARAMETER Experiment Name: At_Drought_Soil_Dry_P Parameter: Age (day) Value: 28
  misc_feature: MA Experiment 20001560 PARAMETER Experiment Name: At_Drought_Soil_Dry_P Parameter: Organism Value: A. thaliana
  misc_feature: MA Experiment 20001560 PARAMETER Experiment Name: At_Drought_Soil_Dry_P Parameter: Plant Line Value: WS
  misc_feature: MA Experiment 20001560 PARAMETER Experiment Name: At_Drought_Soil_Dry_P Parameter: Post Timepoint (hr) Value: None
  misc_feature: MA Experiment 20001560 PARAMETER Experiment Name: At_Drought_Soil_Dry_P Parameter: Post-Treatment Value: None
  misc_feature: MA Experiment 20001560 PARAMETER Experiment Name: At_Drought_Soil_Dry_P Parameter: Timepoint (day) Value: 14
  misc_feature: MA Experiment 20001560 PARAMETER Experiment Name: At_Drought_Soil_Dry_P Parameter: Treatment Value: Drought vs. No Drought
  misc_feature: MA Experiment ID: 20001911 Result: Up-regulated in Transcription
  misc_feature: MA Experiment 20001911 PARAMETER Experiment Name: At_Drought_Reproduction_P Parameter: Age (day) Value: 40
  misc_feature: MA Experiment 20001911 PARAMETER Experiment Name: At_Drought_Reproduction_P Parameter: Organism Value: A. thaliana
  misc_feature: MA Experiment 20001911 PARAMETER Experiment Name: At_Drought_Reproduction_P Parameter: Plant Line Value: WS
  misc_feature: MA Experiment 20001911 PARAMETER Experiment Name: At_Drought_Reproduction_P Parameter: Timepoint (day) Value: 10
  misc_feature: MA Experiment 20001911 PARAMETER Experiment Name: At_Drought_Reproduction_P Parameter: Tissue Value: Flowers
  misc_feature: MA Experiment 20001911 PARAMETER Experiment Name: At_Drought_Reproduction_P Parameter: Treatment Value: Drought vs. No Drought
aatgtcattttctttttgagtaaagaaactttcttcttttgcaacttgaaaattttcgatttcgagagcgaaggaagagagagagagagggagagatcaaaaaaatttgtgaaaaaagagatttattttagggttttgttgattttctttgttcattttgccgtcgtctctttctctttctcttgtgaagaaaaagaagaaaaatgaaacttctgggtttggtcttcttgctgtttaatctgtttatgttttcgttttctcggaaacttttaaccgagagtggtggtggtctccacgacgaagctgctctgttgaagttgaagagtagtttcttggatccaaatggagttctgtctagctgggtttccgacagctcatcaaaccattgttcttggtacggtgtctcttgcaactctgattcgagagtcgtttctttaattctcagaggctgtgatgagcttgaaggtagtggtgttcttcatctcccagatttgtcttcttgttcttcaagtaaaagaagacttggtggtgtaatctctcctgttgttggagatttgtctgaaattagggttttatctctgtcttttaatgatcttagaggtgagattccaaaggagatttgggggttggagaaattagagattcttgatcttaaaggtaacaactttatcggtggaattagggttgttgataatgttgttcttaggaaacttatgagttttgaggatgaagatgaaattggtccaagctcagctgatgatgattctcctggtaaatctggattgtatccgattgagatagcttctattgtgtcagcttcagtgattgtctttgtgcttcttgttcttgtgatcttgttcatctacacgaggaaatggaaacgaaactctcaggttcaggtagatgagatcaaggagattaaagtgtttgttgacattggtattcctctgacgtatgagatcattgttagagctactggttactttagtaactctaactgtatcggtcacggcggtttcggttcgacttataaagcagaggtgtctccaacgaatgtgtttgctgttaaaagactctctgttgggaggtttcaaggtgatcaacagtttcatgctgagatctctgctcttgagatggttaggcatccgaatcttgttatgttaatcggttaccatgcgagcgaaaccgagatgtttcttatttacaactacttatctggaggaaaccttcaagatttcattaaagagagatcgaaagctgctattgagtggaaggtacttcacaagattgctcttgatgtagcgcgtgctctctcctatcttcacgaacagtgttctcctaaagtcttgcatagagatatcaaaccgagtaacatactcttggacaacaactacaacgcttatctatctgatttcggactctcgaaactcttgggaacttcgcagtctcatgtcacaactggtgtggctggaacattcggatatgtagctccagagtacgcaatgacatgccgagtctcggagaaagcagatgtttacagctatgggatagtcctcttggagctgatatcggacaaacgagctctggatccttctttctcatcgcatgagaacgggttcaacattgtctcgtgggctcatatgatgttgagtcaaggcaaagcgaaagaagtcttcaccacaggactatgggagactggtcctccagacgatttggtcgaggttctgcatttggcactcaaatgcaccgtcgatagcctctcgataaggccgacaatgaaacaagctgtaagactgctgaaacgaatccagccttctagattgtgatacaaagctagaagaaaggtgtttttagaggatttgtacagcagcaaacaagtgcctagccattagaatctttctcaagtctgttttttatattttcagtgctagggaggtttttcatatgcatcatcaaaatgttattctcagtctactctcttgaaaactgatataaatgatgtttctttc

SEQ ID NO: 36330 - protein, 540 aa, Arabidopsis thaliana
  peptide (1)..(540): Ceres Seq. ID no. 13645750
  misc_feature (254)..(535): Homolog of NCBI NO: 15240747 NR Description: receptor-related protein kinase-like protein
  misc_feature (6)..(174): Homolog of NCBI NO: 23304947 NR Description: extra sporogenous cells [Arabidopsis thaliana]
  misc_feature (254)..(535): Homolog of NCBI NO: 23304947 NR Description: extra sporogenous cells [Arabidopsis thaliana]
  misc_feature (92)..(495): Homolog of NCBI NO: 26449973 NR Description: putative protein kinase [Arabidopsis thaliana]
  misc_feature (58)..(532): Homolog of NCBI NO: 21326117 NR Description: putative protein kinase [Sorghum bicolor]
  misc_feature (77)..(537): Homolog of NCBI NO: 34394917 NR Description: putative receptor-like protein kinase
  misc_feature (92)..(537): Homolog of NCBI NO: 30678490 NR Description: leucine-rich repeat transmembrane protein kinase,
  misc_feature (92)..(537): Homolog of NCBI NO: 6041804 NR Description: putative protein kinase [Arabidopsis thaliana]
  misc_feature (1)..(540): Homolog of NCBI NO: 15222260 NR Description: receptor protein kinase -related [Arabidopsis
  misc_feature (1)..(540): Homolog of NCBI NO: 6730642 NR Description: F4N2.23 [Arabidopsis thaliana]
MKLLGLVFLLFNLFMFSFSRKLLTESGGGLHDEAALLKLKSSFLDPNGVLSSWVSDSSSNHCSWYGVSCNSDSRVVSLILRGCDELEGSGVLHLPDLSSCSSSKRRLGGVISPVVGDLSEIRVLSLSFNDLRGEIPKEIWGLEKLEILDLKGNNFIGGIRVVDNVVLRKLMSFEDEDEIGPSSADDDSPGKSGLYPIEIASIVSASVIVFVLLVLVILFIYTRKWKRNSQVQVDEIKEIKVFVDIGIPLTYEIIVRATGYFSNSNCIGHGGFGSTYKAEVSPTNVFAVKRLSVGRFQGDQQFHAEISALEMVRHPNLVMLIGYHASETEMFLIYNYLSGGNLQDFIKERSKAAIEWKVLHKIALDVARALSYLHEQCSPKVLHRDIKPSNILLDNNYNAYLSDFGLSKLLGTSQSHVTTGVAGTFGYVAPEYAMTCRVSEKADVYSYGIVLLELISDKRALDPSFSSHENGFNIVSWAHMMLSQGKAKEVFTTGLWETGPPDDLVEVLHLALKCTVDSLSIRPTMKQAVRLLKRIQPSRL

SEQ ID NO: 36331 - protein, 526 aa, Arabidopsis thaliana
  peptide (1)..(526): Ceres Seq. ID no. 13645751
  misc_feature (240)..(521): Homolog of NCBI NO: 15240747 NR Description: receptor-related protein kinase-like protein
  misc_feature (1)..(160): Homolog of NCBI NO: 23304947 NR Description: extra sporogenous cells [Arabidopsis thaliana]
  misc_feature (240)..(521): Homolog of NCBI NO: 23304947 NR Description: extra sporogenous cells [Arabidopsis thaliana]
  misc_feature (78)..(481): Homolog of NCBI NO: 26449973 NR Description: putative protein kinase [Arabidopsis thaliana]
  misc_feature (44)..(518): Homolog of NCBI NO: 21326117 NR Description: putative protein kinase [Sorghum bicolor]
  misc_feature (63)..(523): Homolog of NCBI NO: 34394917 NR Description: putative receptor-like protein kinase
  misc_feature (78)..(523): Homolog of NCBI NO: 30678490 NR Description: leucine-rich repeat transmembrane protein kinase,
  misc_feature (78)..(523): Homolog of NCBI NO: 6041804 NR Description: putative protein kinase [Arabidopsis thaliana]
  misc_feature (1)..(526): Homolog of NCBI NO: 15222260 NR Description: receptor protein kinase -related [Arabidopsis
  misc_feature (1)..(526): Homolog of NCBI NO: 6730642 NR Description: F4N2.23 [Arabidopsis thaliana]
MFSFSRKLLTESGGGLHDEAALLKLKSSFLDPNGVLSSWVSDSSSNHCSWYGVSCNSDSRVVSLILRGCDELEGSGVLHLPDLSSCSSSKRRLGGVISPVVGDLSEIRVLSLSFNDLRGEIPKEIWGLEKLEILDLKGNNFIGGIRVVDNVVLRKLMSFEDEDEIGPSSADDDSPGKSGLYPIEIASIVSASVIVFVLLVLVILFIYTRKWKRNSQVQVDEIKEIKVFVDIGIPLTYEIIVRATGYFSNSNCIGHGGFGSTYKAEVSPTNVFAVKRLSVGRFQGDQQFHAEISALEMVRHPNLVMLIGYHASETEMFLIYNYLSGGNLQDFIKERSKAAIEWKVLHKIALDVARALSYLHEQCSPKVLHRDIKPSNILLDNNYNAYLSDFGLSKLLGTSQSHVTTGVAGTFGYVAPEYAMTCRVSEKADVYSYGIVLLELISDKRALDPSFSSHENGFNIVSWAHMMLSQGKAKEVFTTGLWETGPPDDLVEVLHLALKCTVDSLSIRPTMKQAVRLLKRIQPSRL

SEQ ID NO: 36332 - protein, 370 aa, Arabidopsis thaliana
  peptide (1)..(370): Ceres Seq. ID no. 13645752
  misc_feature (1)..(363): Homolog of NCBI NO: 25404291 NR Description: probable Serine/Threonine protein kinase F8A5.31
  misc_feature (84)..(365): Homolog of NCBI NO: 15240747 NR Description: receptor-related protein kinase-like protein
  misc_feature (84)..(365): Homolog of NCBI NO: 23304947 NR Description: extra sporogenous cells [Arabidopsis thaliana]
  misc_feature (1)..(325): Homolog of NCBI NO: 26449973 NR Description: putative protein kinase [Arabidopsis thaliana]
  misc_feature (1)..(362): Homolog of NCBI NO: 21326117 NR Description: putative protein kinase [Sorghum bicolor]
  misc_feature (1)..(367): Homolog of NCBI NO: 34394917 NR Description: putative receptor-like protein kinase
  misc_feature (1)..(367): Homolog of NCBI NO: 30678490 NR Description: leucine-rich repeat transmembrane protein kinase,
  misc_feature (1)..(367): Homolog of NCBI NO: 6041804 NR Description: putative protein kinase [Arabidopsis thaliana]
  misc_feature (1)..(370): Homolog of NCBI NO: 15222260 NR Description: receptor protein kinase -related [Arabidopsis
  misc_feature (1)..(370): Homolog of NCBI NO: 6730642 NR Description: F4N2.23 [Arabidopsis thaliana]
MSFEDEDEIGPSSADDDSPGKSGLYPIEIASIVSASVIVFVLLVLVILFIYTRKWKRNSQVQVDEIKEIKVFVDIGIPLTYEIIVRATGYFSNSNCIGHGGFGSTYKAEVSPTNVFAVKRLSVGRFQGDQQFHAEISALEMVRHPNLVMLIGYHASETEMFLIYNYLSGGNLQDFIKERSKAAIEWKVLHKIALDVARALSYLHEQCSPKVLHRDIKPSNILLDNNYNAYLSDFGLSKLLGTSQSHVTTGVAGTFGYVAPEYAMTCRVSEKADVYSYGIVLLELISDKRALDPSFSSHENGFNIVSWAHMMLSQGKAKEVFTTGLWETGPPDDLVEVLHLALKCTVDSLSIRPTMKQAVRLLKRIQPSRL

SEQ ID NO: 36333 - DNA, 719 bp, Arabidopsis thaliana
  misc_feature (1)..(719): Ceres Seq. ID no. 12332348
  misc_feature: MA Experiment ID: 108462 Result: Down-regulated in Transcription
  misc_feature: MA Experiment 108462 PARAMETER Experiment Name: At_Germinating_Seeds_cDNA_P Parameter: Age (day) Value: 2 vs. 0
  misc_feature: MA Experiment 108462 PARAMETER Experiment Name: At_Germinating_Seeds_cDNA_P Parameter: Tissue Value: Germinating Seeds
  misc_feature: MA Experiment ID: 108463 Result: Down-regulated in Transcription
  misc_feature: MA Experiment 108463 PARAMETER Experiment Name: At_Germinating_Seeds_cDNA_P Parameter: Age (day) Value: 3 vs. 0
  misc_feature: MA Experiment 108463 PARAMETER Experiment Name: At_Germinating_Seeds_cDNA_P Parameter: Tissue Value: Germinating Seeds
  misc_feature: MA Experiment ID: 108464 Result: Down-regulated in Transcription
  misc_feature: MA Experiment 108464 PARAMETER Experiment Name: At_Germinating_Seeds_cDNA_P Parameter: Age (day) Value: 4 vs. 0
  misc_feature: MA Experiment 108464 PARAMETER Experiment Name: At_Germinating_Seeds_cDNA_P Parameter: Tissue Value: Germinating Seeds
  misc_feature: MA Experiment ID: 20000113 Result: Up-regulated in Transcription
  misc_feature: MA Experiment 20000113 PARAMETER Experiment Name: At_42deg_Heat_cDNA_P Parameter: Temperature (deg C) Value: 42 vs. 22
  misc_feature: MA Experiment 20000113 PARAMETER Experiment Name: At_42deg_Heat_cDNA_P Parameter: Timepoint (hr) Value: 8
  misc_feature: MA Experiment 20000113 PARAMETER Experiment Name: At_42deg_Heat_cDNA_P Parameter: Tissue Value: Aerial
  misc_feature: MA Experiment ID: 20000224 Result: Down-regulated in Transcription
aaacaacaggtcagagaataaatagaaaaaccaaaaccctttagcgtctcccaaatcctctcaatcctctgctgctcaatctctcatcatcggcatcgctctctctaaaaatgtctcagatggatcccgacgctgtatctaaggccttcgtcgaacattactattccaccttcgacaccaaccgtgtcggtctcgctggtctctatcaggaagcttctatgctcaccttcgaaggtcaaaagatccaaggagtccagagcatcgtcgctaagctcacctctcttcctttccagcagtgcaagcatcacatctccaccgttgattgtcagccttctggtcctgcttccggtatgctcgttttcgtttccggtaatctccagctcgccggagaagaacacgctctcaagttcagccagatgtttcatttgatgccgacgccacaaggaagcttttacgtgttcaacgatatattcaggttgaactatgcctgaacagaaatcagattgttgttagcatacatcattgttgcatttctatactatttgagcaaatccttctatcaatttttctcgtctttttcttgttattcctagatgatttaccttgggaacagaggaatattgtctctcatcatgtatttggtttggattgtttgttcatttgtcattacaatctattgactttataagacaatttgaatggtcatttggctcttgtcc

SEQ ID NO: 36334 - protein, 126 aa, Arabidopsis thaliana
  peptide (1)..(126): Ceres Seq. ID no. 12332349
  misc_feature (9)..(123): Pfam Name: Nuclear transport factor 2 (NTF2) domain Pfam Description: Nuclear transport factor 2 (NTF2) domain
  misc_feature (4)..(126): Homolog of NCBI NO: 6320846 NR Description: May coordinate the Ran-dependent (GSP1/GSP2)
  misc_feature (4)..(126): Homolog of NCBI NO: 15214172 NR Description: Nuclear transport factor 2 (NTF-2)
  misc_feature (5)..(125): Homolog of NCBI NO: 19114665 NR Description: nuclear transport factor, NTF2 homolog
  misc_feature (5)..(125): Homolog of NCBI NO: 14700035 NR Description: nuclear transport factor 2 [Aspergillus nidulans]
  misc_feature (7)..(126): Homolog of NCBI NO: 25402667 NR Description: protein T23J18.22 [imported] - Arabidopsis
  misc_feature (7)..(125): Homolog of NCBI NO: 34908774 NR Description: putative Nuclear transport factor 2
  misc_feature (4)..(125): Homolog of NCBI NO: 15214179 NR Description: Nuclear transport factor 2 (NTF-2)
  misc_feature (4)..(126): Homolog of NCBI NO: 15223491 NR Description: putative nuclear transport factor
  misc_feature (4)..(126): Homolog of NCBI NO: 21555203 NR Description: nuclear transport factor 2, putative [Arabidopsis
  misc_feature (1)..(126): Homolog of NCBI NO: 15217779 NR Description: nuclear transport factor 2, putative
MSQMDPDAVSKAFVEHYYSTFDTNRVGLAGLYQEASMLTFEGQKIQGVQSIVAKLTSLPFQQCKHHISTVDCQPSGPASGMLVFVSGNLQLAGEEHALKFSQMFHLMPTPQGSFYVFNDIFRLNYA

SEQ ID NO: 36335 - protein, 123 aa, Arabidopsis thaliana
  peptide (1)..(123): Ceres Seq. ID no. 12332350
  misc_feature (6)..(120): Pfam Name: Nuclear transport factor 2 (NTF2) domain Pfam Description: Nuclear transport factor 2 (NTF2) domain
  misc_feature (1)..(123): Homolog of NCBI NO: 6320846 NR Description: May coordinate the Ran-dependent (GSP1/GSP2)
  misc_feature (1)..(123): Homolog of NCBI NO: 15214172 NR Description: Nuclear transport factor 2 (NTF-2)
  misc_feature (2)..(122): Homolog of NCBI NO: 19114665 NR Description: nuclear transport factor, NTF2 homolog
  misc_feature (2)..(122): Homolog of NCBI NO: 14700035 NR Description: nuclear transport factor 2 [Aspergillus nidulans]
  misc_feature (4)..(123): Homolog of NCBI NO: 25402667 NR Description: protein T23J18.22 [imported] - Arabidopsis
  misc_feature (4)..(122): Homolog of NCBI NO: 34908774 NR Description: putative Nuclear transport factor 2
  misc_feature (1)..(122): Homolog of NCBI NO: 15214179 NR Description: Nuclear transport factor 2 (NTF-2)
  misc_feature (1)..(123): Homolog of NCBI NO: 15223491 NR Description: putative nuclear transport factor
  misc_feature (1)..(123): Homolog of NCBI NO: 21555203 NR Description: nuclear transport factor 2, putative [Arabidopsis
  misc_feature (1)..(123): Homolog of NCBI NO: 15217779 NR Description: nuclear transport factor 2, putative
MDPDAVSKAFVEHYYSTFDTNRVGLAGLYQEASMLTFEGQKIQGVQSIVAKLTSLPFQQCKHHISTVDCQPSGPASGMLVFVSGNLQLAGEEHALKFSQMFHLMPTPQGSFYVFNDIFRLNYA

SEQ ID NO: 36336 - protein, 90 aa, Arabidopsis thaliana
  peptide (1)..(90): Ceres Seq. ID no. 12332351
  misc_feature (1)..(87): Pfam Name: Nuclear transport factor 2 (NTF2) domain Pfam Description: Nuclear transport factor 2 (NTF2) domain
  misc_feature (1)..(90): Homolog of NCBI NO: 6320846 NR Description: May coordinate the Ran-dependent (GSP1/GSP2)
  misc_feature (1)..(90): Homolog of NCBI NO: 15214172 NR Description: Nuclear transport factor 2 (NTF-2)
  misc_feature (1)..(89): Homolog of NCBI NO: 19114665 NR Description: nuclear transport factor, NTF2 homolog
  misc_feature (1)..(89): Homolog of NCBI NO: 14700035 NR Description: nuclear transport factor 2 [Aspergillus nidulans]
  misc_feature (1)..(90): Homolog of NCBI NO: 25402667 NR Description: protein T23J18.22 [imported] - Arabidopsis
  misc_feature (1)..(89): Homolog of NCBI NO: 34908774 NR Description: putative Nuclear transport factor 2
  misc_feature (1)..(89): Homolog of NCBI NO: 15214179 NR Description: Nuclear transport factor 2 (NTF-2)
  misc_feature (1)..(90): Homolog of NCBI NO: 15223491 NR Description: putative nuclear transport factor
  misc_feature (1)..(90): Homolog of NCBI NO: 21555203 NR Description: nuclear transport factor 2, putative [Arabidopsis
  misc_feature (1)..(90): Homolog of NCBI NO: 15217779 NR Description: nuclear transport factor 2, putative
MLTFEGQKIQGVQSIVAKLTSLPFQQCKHHISTVDCQPSGPASGMLVFVSGNLQLAGEEHALKFSQMFHLMPTPQGSFYVFNDIFRLNYA

SEQ ID NO: 36337 - DNA, 1071 bp, Arabidopsis thaliana
  misc_feature (1)..(1071): Ceres Seq. ID no. 12333126
  misc_feature: MA Experiment ID: 108435 Result: Down-regulated in Transcription
  misc_feature: MA Experiment 108435 PARAMETER Experiment Name: At_stm_Mutants_cDNA_P Parameter: Plant Line Value: wt Landsburg vs stm
  misc_feature: MA Experiment 108435 PARAMETER Experiment Name: At_stm_Mutants_cDNA_P Parameter: Tissue Value: Shoot Apical Meristem Region
  misc_feature: MA Experiment ID: 108461 Result: Up-regulated in Transcription
  misc_feature: MA Experiment 108461 PARAMETER Experiment Name: At_Germinating_Seeds_cDNA_P Parameter: Age (day) Value: 1 vs. 0
  misc_feature: MA Experiment 108461 PARAMETER Experiment Name: At_Germinating_Seeds_cDNA_P Parameter: Tissue Value: Germinating Seeds
  misc_feature: MA Experiment ID: 108462 Result: Up-regulated in Transcription
  misc_feature: MA Experiment 108462 PARAMETER Experiment Name: At_Germinating_Seeds_cDNA_P Parameter: Age (day) Value: 2 vs. 0
  misc_feature: MA Experiment 108462 PARAMETER Experiment Name: At_Germinating_Seeds_cDNA_P Parameter: Tissue Value: Germinating Seeds
  misc_feature: MA Experiment ID: 108463 Result: Up-regulated in Transcription
  misc_feature: MA Experiment 108463 PARAMETER Experiment Name: At_Germinating_Seeds_cDNA_P Parameter: Age (day) Value: 3 vs. 0
  misc_feature: MA Experiment 108463 PARAMETER Experiment Name: At_Germinating_Seeds_cDNA_P Parameter: Tissue Value: Germinating Seeds
  misc_feature: MA Experiment ID: 108464 Result: Up-regulated in Transcription
  misc_feature: MA Experiment 108464 PARAMETER Experiment Name: At_Germinating_Seeds_cDNA_P Parameter: Age (day) Value: 4 vs. 0
  misc_feature: MA Experiment 108464 PARAMETER Experiment Name: At_Germinating_Seeds_cDNA_P Parameter: Tissue Value: Germinating Seeds
  misc_feature: MA Experiment ID: 108473 Result: Down-regulated in Transcription
  misc_feature: MA Experiment 108473 PARAMETER Experiment Name: At_Drought_Flowers_cDNA_P Parameter: Timepoint (hr) Value: 7 d
  misc_feature: MA Experiment 108473 PARAMETER Experiment Name: At_Drought_Flowers_cDNA_P Parameter: Tissue Value: Flower
  misc_feature: MA Experiment 108473 PARAMETER Experiment Name: At_Drought_Flowers_cDNA_P Parameter: Treatment Value: Drought vs. No Drought
  misc_feature: MA Experiment ID: 108607 Result: Down-regulated in Transcription
  misc_feature: MA Experiment 108607 PARAMETER Experiment Name: At_100uM_ABA_cDNA_P Parameter: Timepoint (hr) Value: 4
  misc_feature: MA Experiment 108607 PARAMETER Experiment Name: At_100uM_ABA_cDNA_P Parameter: Tissue Value: Aerial
  misc_feature: MA Experiment 108607 PARAMETER Experiment Name: At_100uM_ABA_cDNA_P Parameter: Treatment Value: 100uM ABA vs. No Treatment
  misc_feature: MA Experiment ID: 108608 Result: Down-regulated in Transcription
  misc_feature: MA Experiment 108608 PARAMETER Experiment Name: At_100uM_ABA_cDNA_P Parameter: Timepoint (hr) Value: 1
  misc_feature: MA Experiment 108608 PARAMETER Experiment Name: At_100uM_ABA_cDNA_P Parameter: Tissue Value: Aerial
  misc_feature: MA Experiment 108608 PARAMETER Experiment Name: At_100uM_ABA_cDNA_P Parameter: Treatment Value: 100uM ABA vs. No Treatment
  misc_feature: MA Experiment ID: 20000069 Result: Down-regulated in Transcription
  misc_feature: MA Experiment 20000069 PARAMETER Experiment Name: At_100uM_ABA_Mutants_cDNA_P Parameter: Plant Line Value: CS23
  misc_feature: MA Experiment 20000069 PARAMETER Experiment Name: At_100uM_ABA_Mutants_cDNA_P Parameter: Timepoint (hr) Value: 6
  misc_feature: MA Experiment 20000069 PARAMETER Experiment Name: At_100uM_ABA_Mutants_cDNA_P Parameter: Tissue Value: Aerial
  misc_feature: MA Experiment 20000069 PARAMETER Experiment Name: At_100uM_ABA_Mutants_cDNA_P Parameter: Treatment Value: 100uM ABA vs. No Treatment
  misc_feature: MA Experiment ID: 20000070 Result: Down-regulated in Transcription
  misc_feature: MA Experiment 20000070 PARAMETER Experiment Name: At_100uM_ABA_Mutants_cDNA_P Parameter: Plant Line Value: CS24
  misc_feature: MA Experiment 20000070 PARAMETER Experiment Name: At_100uM_ABA_Mutants_cDNA_P Parameter: Timepoint (hr) Value: 6
  misc_feature: MA Experiment 20000070 PARAMETER Experiment Name: At_100uM_ABA_Mutants_cDNA_P Parameter: Tissue Value: Aerial
  misc_feature: MA Experiment 20000070 PARAMETER Experiment Name: At_100uM_ABA_Mutants_cDNA_P Parameter: Treatment Value: 100uM ABA vs. No Treatment
  misc_feature: MA Experiment ID: 20000071 Result: Down-regulated in Transcription
  misc_feature: MA Experiment 20000071 PARAMETER Experiment Name: At_100uM_ABA_Mutants_cDNA_P Parameter: Plant Line Value: CS8104
  misc_feature: MA Experiment 20000071 PARAMETER Experiment Name: At_100uM_ABA_Mutants_cDNA_P Parameter: Timepoint (hr) Value: 6
  misc_feature: MA Experiment 20000071 PARAMETER Experiment Name: At_100uM_ABA_Mutants_cDNA_P Parameter: Tissue Value: Aerial
  misc_feature: MA Experiment 20000071 PARAMETER Experiment Name: At_100uM_ABA_Mutants_cDNA_P Parameter: Treatment Value: 100uM ABA vs. No Treatment
  misc_feature: MA Experiment ID: 20000072 Result: Down-regulated in Transcription
  misc_feature: MA Experiment 20000072 PARAMETER Experiment Name: At_100uM_ABA_Mutants_cDNA_P Parameter: Plant Line Value: CS8105
  misc_feature: MA Experiment 20000072 PARAMETER Experiment Name: At_100uM_ABA_Mutants_cDNA_P Parameter: Timepoint (hr) Value: 6
  misc_feature: MA Experiment 20000072 PARAMETER Experiment Name: At_100uM_ABA_Mutants_cDNA_P Parameter: Tissue Value: Aerial
  misc_feature: MA Experiment 20000072 PARAMETER Experiment Name: At_100uM_ABA_Mutants_cDNA_P Parameter: Treatment Value: 100uM ABA vs. No Treatment
  misc_feature: MA Experiment ID: 20000087 Result: Down-regulated in Transcription
  misc_feature: MA Experiment 20000087 PARAMETER Experiment Name: At_100uM_ABA_Mutants_cDNA_P Parameter: Plant Line Value: WS
  misc_feature: MA Experiment 20000087 PARAMETER Experiment Name: At_100uM_ABA_Mutants_cDNA_P Parameter: Timepoint (hr) Value: 6
  misc_feature: MA Experiment 20000087 PARAMETER Experiment Name: At_100uM_ABA_Mutants_cDNA_P Parameter: Tissue Value: Aerial
  misc_feature: MA Experiment 20000087 PARAMETER Experiment Name: At_100uM_ABA_Mutants_cDNA_P Parameter: Treatment Value: 100uM ABA vs. No Treatment
  misc_feature: MA Experiment ID: 20000088 Result: Down-regulated in Transcription
  misc_feature: MA Experiment 20000088 PARAMETER Experiment Name: At_100uM_ABA_Mutants_cDNA_P Parameter: Plant Line Value: Landsberg
  misc_feature: MA Experiment 20000088 PARAMETER Experiment Name: At_100uM_ABA_Mutants_cDNA_P Parameter: Timepoint (hr) Value: 6
  misc_feature: MA Experiment 20000088 PARAMETER Experiment Name: At_100uM_ABA_Mutants_cDNA_P Parameter: Tissue Value: Aerial
  misc_feature: MA Experiment 20000088 PARAMETER Experiment Name: At_100uM_ABA_Mutants_cDNA_P Parameter: Treatment Value: 100uM ABA vs. No Treatment
  misc_feature: MA Experiment ID: 20000117 Result: Down-regulated in Transcription
  misc_feature: MA Experiment 20000117 PARAMETER Experiment Name: At_100uM_ABA_Mutants_cDNA_P Parameter: Plant Line Value: Columbia
  misc_feature: MA Experiment 20000117 PARAMETER Experiment Name: At_100uM_ABA_Mutants_cDNA_P Parameter: Timepoint (hr) Value: 6
  misc_feature: MA Experiment 20000117 PARAMETER Experiment Name: At_100uM_ABA_Mutants_cDNA_P Parameter: Tissue Value: Aerial
  misc_feature: MA Experiment 20000117 PARAMETER Experiment Name: At_100uM_ABA_Mutants_cDNA_P Parameter: Treatment Value: 100uM ABA vs. No Treatment
  misc_feature: MA Experiment ID: 20000179 Result: Up-regulated in Transcription
  misc_feature: MA Experiment 20000179 PARAMETER Experiment Name: At_Germinating_Seeds_P Parameter: Age (hr) Value: 6 vs. 0
  misc_feature: MA Experiment 20000179 PARAMETER Experiment Name: At_Germinating_Seeds_P Parameter: Tissue Value: Germinating Seeds
  misc_feature: MA Experiment ID: 20000180 Result: Up-regulated in Transcription
  misc_feature: MA Experiment 20000180 PARAMETER Experiment Name: At_Germinating_Seeds_P Parameter: Age (hr) Value: 24 vs. 0
  misc_feature: MA Experiment 20000180 PARAMETER Experiment Name: At_Germinating_Seeds_P Parameter: Tissue Value: Germinating Seeds
  misc_feature: MA Experiment ID: 20000184 Result: Up-regulated in Transcription
  misc_feature: MA Experiment 20000184 PARAMETER Experiment Name: At_Shoots__P Parameter: Age (day) Value: 7
  misc_feature: MA Experiment 20000184 PARAMETER Experiment Name: At_Shoots__P Parameter: Tissue Value: Shoots vs. Whole Plant
  misc_feature: MA Experiment ID: 20000224 Result: Down-regulated in Transcription
  misc_feature: MA Experiment ID: 20000234 Result: Down-regulated in Transcription
  misc_feature: MA Experiment 20000234 PARAMETER Experiment Name: At_Siliques_P Parameter: Age (day) Value: 21
  misc_feature: MA Experiment 20000234 PARAMETER Experiment Name: At_Siliques_P Parameter: Organism Value: A. thaliana
  misc_feature: MA Experiment 20000234 PARAMETER Experiment Name: At_Siliques_P Parameter: Plant Line Value: WS
  misc_feature: MA Experiment 20000234 PARAMETER Experiment Name: At_Siliques_P Parameter: Tissue Value: Less Than 5mm Siliques vs. Whole Plant
  misc_feature: MA Experiment ID: 20000235 Result: Down-regulated in Transcription
  misc_feature: MA Experiment 20000235 PARAMETER Experiment Name: At_Siliques_P Parameter: Age (day) Value: 21
  misc_feature: MA Experiment 20000235 PARAMETER Experiment Name: At_Siliques_P Parameter: Organism Value: A. thaliana
  misc_feature: MA Experiment 20000235 PARAMETER Experiment Name: At_Siliques_P Parameter: Plant Line Value: WS
  misc_feature: MA Experiment 20000235 PARAMETER Experiment Name: At_Siliques_P Parameter: Tissue Value: 5-10mm Siliques vs. Whole Plant
  misc_feature: MA Experiment ID: 20000264 Result: Down-regulated in Transcription
  misc_feature: MA Experiment 20000264 PARAMETER Experiment Name: At_Open_Flower_P Parameter: Age (day) Value: 21
  misc_feature: MA Experiment 20000264 PARAMETER Experiment Name: At_Open_Flower_P Parameter: Plant Line Value: WS
  misc_feature: MA Experiment 20000264 PARAMETER Experiment Name: At_Open_Flower_P Parameter: Tissue Value: Open Flower vs. Whole Plant
  misc_feature: MA Experiment ID: 20000265 Result: Down-regulated in Transcription
  misc_feature: MA Experiment 20000265 PARAMETER Experiment Name: At_Open_Flower_P Parameter: Age (day) Value: 21
  misc_feature: MA Experiment 20000265 PARAMETER Experiment Name: At_Open_Flower_P Parameter: Plant Line Value: WS
  misc_feature: MA Experiment 20000265 PARAMETER Experiment Name: At_Open_Flower_P Parameter: Tissue Value: Closed Flower vs. Whole Plant
  misc_feature: MA Experiment ID: 20000267 Result: Down-regulated in Transcription
  misc_feature: MA Experiment 20000267 PARAMETER Experiment Name: At_Drought_P Parameter: Age (day) Value: 7
  misc_feature: MA Experiment 20000267 PARAMETER Experiment Name: At_Drought_P Parameter: Organism Value: A. thaliana
  misc_feature: MA Experiment 20000267 PARAMETER Experiment Name: At_Drought_P Parameter: Plant Line Value: WS
  misc_feature: MA Experiment 20000267 PARAMETER Experiment Name: At_Drought_P Parameter: Timepoint (hr) Value: 6
  misc_feature: MA Experiment 20000267 PARAMETER Experiment Name: At_Drought_P Parameter: Tissue Value: Whole Plant
  misc_feature: MA Experiment 20000267 PARAMETER Experiment Name: At_Drought_P Parameter: Treatment Value: Drought vs. No Drought
  misc_feature: MA Experiment ID: 20000268 Result: Down-regulated in Transcription
  misc_feature: MA Experiment 20000268 PARAMETER Experiment Name: At_100mM_NaCl__P Parameter: Age (day) Value: 14
  misc_feature: MA Experiment 20000268 PARAMETER Experiment Name: At_100mM_NaCl__P Parameter: Organism Value: A. thaliana
  misc_feature: MA Experiment 20000268 PARAMETER Experiment Name: At_100mM_NaCl__P Parameter: Plant Line Value: WS
  misc_feature: MA Experiment 20000268 PARAMETER Experiment Name: At_100mM_NaCl__P Parameter: Timepoint (hr) Value: 6
  misc_feature: MA Experiment 20000268 PARAMETER Experiment Name: At_100mM_NaCl__P Parameter: Tissue Value: Whole Plant
  misc_feature: MA Experiment 20000268 PARAMETER Experiment Name: At_100mM_NaCl__P Parameter: Treatment Value: 100mM NaCl vs. No Treatment
  misc_feature: MA Experiment ID: 20000286 Result: Down-regulated in Transcription
  misc_feature: MA Experiment 20000286 PARAMETER Experiment Name: At_Open_Flower_P Parameter: Age (day) Value: 21
  misc_feature: MA Experiment 20000286 PARAMETER Experiment Name: At_Open_Flower_P Parameter: Plant Line Value: WS
  misc_feature: MA Experiment 20000286 PARAMETER Experiment Name: At_Open_Flower_P Parameter: Tissue Value: Half Open vs. Whole Plant
  misc_feature: MA Experiment ID: 20000436 Result: Down-regulated in Transcription
  misc_feature: MA Experiment 20000436 PARAMETER Experiment Name: At_Drought_P Parameter: Age (day) Value: 7
  misc_feature: MA Experiment 20000436 PARAMETER Experiment Name: At_Drought_P Parameter: Organism Value: A. thaliana
  misc_feature: MA Experiment 20000436 PARAMETER Experiment Name: At_Drought_P Parameter: Plant Line Value: WS
  misc_feature: MA Experiment 20000436 PARAMETER Experiment Name: At_Drought_P Parameter: Timepoint (hr) Value: 12
  misc_feature: MA Experiment 20000436 PARAMETER Experiment Name: At_Drought_P Parameter: Tissue Value: Whole Plant
  misc_feature: MA Experiment 20000436 PARAMETER Experiment Name: At_Drought_P Parameter: Treatment Value: Drought vs. No Drought
  misc_feature: MA Experiment ID: 20000437 Result: Down-regulated in Transcription
  misc_feature: MA Experiment 20000437 PARAMETER Experiment Name: At_Drought_P Parameter: Age (day) Value: 8
  misc_feature: MA Experiment 20000437 PARAMETER Experiment Name: At_Drought_P Parameter: Organism Value: A. thaliana
  misc_feature: MA Experiment 20000437 PARAMETER Experiment Name: At_Drought_P Parameter: Plant Line Value: WS
  misc_feature: MA Experiment 20000437 PARAMETER Experiment Name: At_Drought_P Parameter: Timepoint (hr) Value: 24
  misc_feature: MA Experiment 20000437 PARAMETER Experiment Name: At_Drought_P Parameter: Tissue Value: Whole Plant
  misc_feature: MA Experiment 20000437 PARAMETER Experiment Name: At_Drought_P Parameter: Treatment Value: Drought vs. No Drought
  misc_feature: MA Experiment ID: 20000441 Result: Up-regulated in Transcription
  misc_feature: MA Experiment 20000441 PARAMETER Experiment Name: At_1uM_BR-BRZ__P Parameter: Tissue Value: Shoot Apices
  misc_feature: MA Experiment 20000441 PARAMETER Experiment Name: At_1uM_BR-BRZ__P Parameter: Treatment Value: 1uM BR vs. No Treatment
  misc_feature: MA Experiment ID: 20000794 Result: Down-regulated in Transcription
  misc_feature: MA Experiment 20000794 PARAMETER Experiment Name: At_Petals_P Parameter: Age (day) Value: 23-25 days
  misc_feature: MA Experiment 20000794 PARAMETER Experiment Name: At_Petals_P Parameter: Plant Line Value: WS
  misc_feature: MA Experiment 20000794 PARAMETER Experiment Name: At_Petals_P Parameter: Tissue Value: Petals vs. Whole plant
  misc_feature: MA Experiment ID: 20001451 Result: Up-regulated in Transcription
  misc_feature: MA Experiment 20001451 PARAMETER Experiment Name: At_Far-red-induction_P Parameter: Age (day) Value: 7
  misc_feature: MA Experiment 20001451 PARAMETER Experiment Name: At_Far-red-induction_P Parameter: Light Value: Far-red vs. White
  misc_feature: MA Experiment 20001451 PARAMETER Experiment Name: At_Far-red-induction_P Parameter: Organism Value: A. thaliana
  misc_feature: MA Experiment 20001451 PARAMETER Experiment Name: At_Far-red-induction_P Parameter: Plant Line Value: Columbia
  misc_feature: MA Experiment 20001451 PARAMETER Experiment Name: At_Far-red-induction_P Parameter: Timepoint (hr) Value: 24
  misc_feature: MA Experiment 20001451 PARAMETER Experiment Name: At_Far-red-induction_P Parameter: Tissue Value: Whole Plant
  misc_feature: MA Experiment ID: 20001554 Result: Down-regulated in Transcription
  misc_feature: MA Experiment 20001554 PARAMETER Experiment Name: At_Drought_Soil_Dry_P Parameter: Age (day) Value: 21
  misc_feature: MA Experiment 20001554 PARAMETER Experiment Name: At_Drought_Soil_Dry_P Parameter: Organism Value: A. thaliana
  misc_feature: MA Experiment 20001554 PARAMETER Experiment Name: At_Drought_Soil_Dry_P Parameter: Plant Line Value: WS
  misc_feature: MA Experiment 20001554 PARAMETER Experiment Name: At_Drought_Soil_Dry_P Parameter: Post Timepoint (hr) Value: None
  misc_feature: MA Experiment 20001554 PARAMETER Experiment Name: At_Drought_Soil_Dry_P Parameter: Post-Treatment Value: None
  misc_feature: MA Experiment 20001554 PARAMETER Experiment Name: At_Drought_Soil_Dry_P Parameter: Timepoint (day) Value: 7
  misc_feature: MA Experiment 20001554 PARAMETER Experiment Name: At_Drought_Soil_Dry_P Parameter: Treatment Value: Drought vs. No Drought
  misc_feature: MA Experiment ID: 20001555 Result: Down-regulated in Transcription
  misc_feature: MA Experiment 20001555 PARAMETER Experiment Name: At_Drought_Soil_Dry_P Parameter: Age (day) Value: 24
  misc_feature: MA Experiment 20001555 PARAMETER Experiment Name: At_Drought_Soil_Dry_P Parameter: Organism Value: A. thaliana
  misc_feature: MA Experiment 20001555 PARAMETER Experiment Name: At_Drought_Soil_Dry_P Parameter: Plant Line Value: WS
  misc_feature: MA Experiment 20001555 PARAMETER Experiment Name: At_Drought_Soil_Dry_P Parameter: Post Timepoint (hr) Value: None
  misc_feature: MA Experiment 20001555 PARAMETER Experiment Name: At_Drought_Soil_Dry_P Parameter: Post-Treatment Value: None
  misc_feature: MA Experiment 20001555 PARAMETER Experiment Name: At_Drought_Soil_Dry_P Parameter: Timepoint (day) Value: 10
  misc_feature: MA Experiment 20001555 PARAMETER Experiment Name: At_Drought_Soil_Dry_P Parameter: Treatment Value: Drought vs. No Drought
  misc_feature: MA Experiment ID: 20001556 Result: Down-regulated in Transcription
  misc_feature: MA Experiment 20001556 PARAMETER Experiment Name: At_Drought_Soil_Dry_P Parameter: Age (day) Value: 26
  misc_feature: MA Experiment 20001556 PARAMETER Experiment Name: At_Drought_Soil_Dry_P Parameter: Organism Value: A. thaliana
  misc_feature: MA Experiment 20001556 PARAMETER Experiment Name: At_Drought_Soil_Dry_P Parameter: Plant Line Value: WS
  misc_feature: MA Experiment 20001556 PARAMETER Experiment Name: At_Drought_Soil_Dry_P Parameter: Post Timepoint (hr) Value: None
  misc_feature: MA Experiment 20001556 PARAMETER Experiment Name: At_Drought_Soil_Dry_P Parameter: Post-Treatment Value: None
  misc_feature: MA Experiment 20001556 PARAMETER Experiment Name: At_Drought_Soil_Dry_P Parameter: Timepoint (day) Value: 12
  misc_feature: MA Experiment 20001556 PARAMETER Experiment Name: At_Drought_Soil_Dry_P Parameter: Treatment Value: Drought vs. No Drought
  misc_feature: MA Experiment ID: 20001559 Result: Down-regulated in Transcription
  misc_feature: MA Experiment 20001559 PARAMETER Experiment Name: At_Drought_Soil_Dry_P Parameter: Age (day) Value: 28
  misc_feature: MA Experiment 20001559 PARAMETER Experiment Name: At_Drought_Soil_Dry_P Parameter: Organism Value: A. thaliana
  misc_feature: MA Experiment 20001559 PARAMETER Experiment Name: At_Drought_Soil_Dry_P Parameter: Plant Line Value: WS
  misc_feature: MA Experiment 20001559 PARAMETER Experiment Name: At_Drought_Soil_Dry_P Parameter: Post Timepoint (hr) Value: 29
  misc_feature: MA Experiment 20001559 PARAMETER Experiment Name: At_Drought_Soil_Dry_P Parameter: Post-Treatment Value: Re-Water vs. No Drought
  misc_feature: MA Experiment 20001559 PARAMETER Experiment Name: At_Drought_Soil_Dry_P Parameter: Timepoint (day) Value: 14
  misc_feature: MA Experiment 20001559 PARAMETER Experiment Name: At_Drought_Soil_Dry_P Parameter: Treatment Value: Drought vs. No Drought
  misc_feature: MA Experiment ID: 20001755 Result: Down-regulated in Transcription
  misc_feature: MA Experiment 20001755 PARAMETER Experiment Name: At_50mM_NH4NO3_L-to-H_P Parameter: Timepoint (hr) Value: 2
  misc_feature: MA Experiment 20001755 PARAMETER Experiment Name: At_50mM_NH4NO3_L-to-H_P Parameter: Tissue Value: Leaf
  misc_feature: MA Experiment 20001755 PARAMETER Experiment Name: At_50mM_NH4NO3_L-to-H_P Parameter: Treatment Value: 50mM NH4NO3 vs 100mM Mannitol
  misc_feature: MA Experiment ID: 20001757 Result: Up-regulated in Transcription
  misc_feature: MA Experiment 20001757 PARAMETER Experiment Name: At_50mM_NH4NO3_L-to-H_P Parameter: Timepoint (hr) Value: 6
  misc_feature: MA Experiment 20001757 PARAMETER Experiment Name: At_50mM_NH4NO3_L-to-H_P Parameter: Tissue Value: Leaf
  misc_feature: MA Experiment 20001757 PARAMETER Experiment Name: At_50mM_NH4NO3_L-to-H_P Parameter: Treatment Value: 50mM NH4NO3 vs 100mM Mannitol
  misc_feature: MA Experiment ID: 20001761 Result: Up-regulated in Transcription
  misc_feature: MA Experiment 20001761 PARAMETER Experiment Name: At_50mM_NH4NO3_L-to-H_P Parameter: Timepoint (hr) Value: 4
  misc_feature: MA Experiment 20001761 PARAMETER Experiment Name: At_50mM_NH4NO3_L-to-H_P Parameter: Tissue Value: Siliques
  misc_feature: MA Experiment 20001761 PARAMETER Experiment Name: At_50mM_NH4NO3_L-to-H_P Parameter: Treatment Value: 50mM NH4NO3 vs 100mM Mannitol
  misc_feature: MA Experiment ID: 20001904 Result: Down-regulated in Transcription
  misc_feature: MA Experiment 20001904 PARAMETER Experiment Name: At_Drought_Reproduction_P Parameter: Age (day) Value: 37
  misc_feature: MA Experiment 20001904 PARAMETER Experiment Name: At_Drought_Reproduction_P Parameter: Organism Value: A. thaliana
  misc_feature: MA Experiment 20001904 PARAMETER Experiment Name: At_Drought_Reproduction_P Parameter: Plant Line Value: WS
  misc_feature: MA Experiment 20001904 PARAMETER Experiment Name: At_Drought_Reproduction_P Parameter: Timepoint (day) Value: 7
  misc_feature: MA Experiment 20001904 PARAMETER Experiment Name: At_Drought_Reproduction_P Parameter: Tissue Value: Rosettes
  misc_feature: MA Experiment 20001904 PARAMETER Experiment Name: At_Drought_Reproduction_P Parameter: Treatment Value: Drought vs. No Drought
  misc_feature: MA Experiment ID: 20001906 Result: Down-regulated in Transcription
  misc_feature: MA Experiment 20001906 PARAMETER Experiment Name: At_Drought_Reproduction_P Parameter: Age (day) Value: 35
  misc_feature: MA Experiment 20001906 PARAMETER Experiment Name: At_Drought_Reproduction_P Parameter: Organism Value: A. thaliana
  misc_feature: MA Experiment 20001906 PARAMETER Experiment Name: At_Drought_Reproduction_P Parameter: Plant Line Value: WS
  misc_feature: MA Experiment 20001906 PARAMETER Experiment Name: At_Drought_Reproduction_P Parameter: Timepoint (day) Value: 5
  misc_feature: MA Experiment 20001906 PARAMETER Experiment Name: At_Drought_Reproduction_P Parameter: Tissue Value: Siliques
  misc_feature: MA Experiment 20001906 PARAMETER Experiment Name: At_Drought_Reproduction_P Parameter: Treatment Value: Drought vs. No Drought
  misc_feature: MA Experiment ID: 20001910 Result: Down-regulated in Transcription
  misc_feature: MA Experiment 20001910 PARAMETER Experiment Name: At_Drought_Reproduction_P Parameter: Age (day) Value: 37
  misc_feature: MA Experiment 20001910 PARAMETER Experiment Name: At_Drought_Reproduction_P Parameter: Organism Value: A. thaliana
  misc_feature: MA Experiment 20001910 PARAMETER Experiment Name: At_Drought_Reproduction_P Parameter: Plant Line Value: WS
  misc_feature: MA Experiment 20001910 PARAMETER Experiment Name: At_Drought_Reproduction_P Parameter: Timepoint (day) Value: 7
  misc_feature: MA Experiment 20001910 PARAMETER Experiment Name: At_Drought_Reproduction_P Parameter: Tissue Value: Flowers
  misc_feature: MA Experiment 20001910 PARAMETER Experiment Name: At_Drought_Reproduction_P Parameter: Treatment Value: Drought vs. No Drought
aacaccactaataaactcaacatggctagatccttgttgctctcgctaaccctcacattcctcttcgccggaattgtctcagctcgtgactggaacatcctgagccagctcaaaggaaccacaaccaccacgaagactagccaaaccggcgtcacatctttgaaagctcccaacctaaacggatactgtgagagctggagagtcaacgtggagcttaacaacataagggactttaaggtggttccacaggaatgtgtatggttcgtccaaaagtacatgacctcatctcaatacgaagatgacgtggagagagccgtcgatgaagccatcctctacctcggaaaaacttgttgcgagaagaagacatgcgatggcatggatgcttggatctttgacattgatgacactcttctctcaaccattccttaccacaagagcaacggttgtttcggtggtgagcaactgaacacgaccaagttcgaggaatggcaaaattcgggcaaggcaccagcggttccacacatggtgaagttgtaccatgagatcagagagagaggtttcaagatctttttgatctcttctcgtaaagagtatctcagatctgccaccgtcgaaaatcttattgaagccggttaccacagctggtctaacctccttctgaggggagaagatgatgaaaagaagagtgtgagccaatacaaagcagatttgaggacatggcttacaagtcttgggtacagagtttggggagtgatgggtgcacaatggaacagcttctctggttgtccagttcccaagagaaccttcaagctccctaactccatctactatgtcgcctgattaaatcttatttactaacaaaacaataagatcagagtttcattctgattcttgagtcttttttttctctctccctcttttcatttctggtttatataaccaattcaaatgcttatgatccatgcatgaaccatgatcatctttgtgtttttttttccttctgtattaccattttgggcctttgtgaaattgattttgggcttttgttatataatctcctctttctctttc

SEQ ID NO: 36338 - protein, 279 aa, Arabidopsis thaliana
  peptide (1)..(279): Ceres Seq. ID no. 12333127
  misc_feature (47)..(279): Pfam Name: HAD superfamily, subfamily IIIB (Acid phosphatase) Pfam Description: HAD superfamily, subfamily IIIB (Acid
  misc_feature (62)..(278): Homolog of NCBI NO: 15224907 NR Description: putative acid phosphatase; protein id:
  misc_feature (54)..(278): Homolog of NCBI NO: 15233504 NR Description: acid phosphatase-like protein
  misc_feature (58)..(278): Homolog of NCBI NO: 15241412 NR Description: acid phosphatase; protein id: At5g51260.1
  misc_feature (47)..(279): Homolog of NCBI NO: 15233526 NR Description: acid phosphatase-like protein
  misc_feature (63)..(278): Homolog of NCBI NO: 445113 NR Description: acid phosphatase 1
  misc_feature (63)..(278): Homolog of NCBI NO: 130718 NR Description: Acid phosphatase precursor 1
  misc_feature (58)..(278): Homolog of NCBI NO: 15234949 NR Description: acid phosphatase - like protein
  misc_feature (8)..(279): Homolog of NCBI NO: 18379219 NR Description: expressed protein
  misc_feature (8)..(279): Homolog of NCBI NO: 21555213 NR Description: vegetative storage protein-like [Arabidopsis
  misc_feature (8)..(279): Homolog of NCBI NO: 15240067 NR Description: vegetative storage protein-like
NTTNKLNMARSLLLSLTLTFLFAGIVSARDWNILSQLKGTTTTTKTSQTGVTSLKAPNLNGYCESWRVNVELNNIRDFKVVPQECVWFVQKYMTSSQYEDDVERAVDEAILYLGKTCCEKKTCDGMDAWIFDIDDTLLSTIPYHKSNGCFGGEQLNTTKFEEWQNSGKAPAVPHMVKLYHEIRERGFKIFLISSRKEYLRSATVENLIEAGYHSWSNLLLRGEDDEKKSVSQYKADLRTWLTSLGYRVWGVMGAQWNSFSGCPVPKRTFKLPNSIYYVA

SEQ ID NO: 36339 - protein, 272 aa, Arabidopsis thaliana
  peptide (1)..(272): Ceres Seq. ID no. 12333128
  misc_feature (40)..(272): Pfam Name: HAD superfamily, subfamily IIIB (Acid phosphatase) Pfam Description: HAD superfamily, subfamily IIIB (Acid
  misc_feature (55)..(271): Homolog of NCBI NO: 15224907 NR Description: putative acid phosphatase; protein id:
  misc_feature (47)..(271): Homolog of NCBI NO: 15233504 NR Description: acid phosphatase-like protein
  misc_feature (51)..(271): Homolog of NCBI NO: 15241412 NR Description: acid phosphatase; protein id: At5g51260.1
  misc_feature (40)..(272): Homolog of NCBI NO: 15233526 NR Description: acid phosphatase-like protein
  misc_feature (56)..(271): Homolog of NCBI NO: 445113 NR Description: acid phosphatase 1
  misc_feature (56)..(271): Homolog of NCBI NO: 130718 NR Description: Acid phosphatase precursor 1
  misc_feature (51)..(271): Homolog of NCBI NO: 15234949 NR Description: acid phosphatase - like protein
  misc_feature (1)..(272): Homolog of NCBI NO: 18379219 NR Description: expressed protein
  misc_feature (1)..(272): Homolog of NCBI NO: 21555213 NR Description: vegetative storage protein-like [Arabidopsis
  misc_feature (1)..(272): Homolog of NCBI NO: 15240067 NR Description: vegetative storage protein-like
MARSLLLSLTLTFLFAGIVSARDWNILSQLKGTTTTTKTSQTGVTSLKAPNLNGYCESWRVNVELNNIRDFKVVPQECVWFVQKYMTSSQYEDDVERAVDEAILYLGKTCCEKKTCDGMDAWIFDIDDTLLSTIPYHKSNGCFGGEQLNTTKFEEWQNSGKAPAVPHMVKLYHEIRERGFKIFLISSRKEYLRSATVENLIEAGYHSWSNLLLRGEDDEKKSVSQYKADLRTWLTSLGYRVWGVMGAQWNSFSGCPVPKRTFKLPNSIYYVA

SEQ ID NO: 36340 - protein, 187 aa, Arabidopsis thaliana
  peptide (1)..(187): Ceres Seq. ID no. 12333129
  misc_feature (1)..(187): Pfam Name: HAD superfamily, subfamily IIIB (Acid phosphatase) Pfam Description: HAD superfamily, subfamily IIIB (Acid
  misc_feature (1)..(186): Homolog of NCBI NO: 15224907 NR Description: putative acid phosphatase; protein id:
  misc_feature (1)..(186): Homolog of NCBI NO: 15233504 NR Description: acid phosphatase-like protein
  misc_feature (1)..(186): Homolog of NCBI NO: 15241412 NR Description: acid phosphatase; protein id: At5g51260.1
  misc_feature (1)..(187): Homolog of NCBI NO: 15233526 NR Description: acid phosphatase-like protein
  misc_feature (1)..(186): Homolog of NCBI NO: 445113 NR Description: acid phosphatase 1
  misc_feature (1)..(186): Homolog of NCBI NO: 130718 NR Description: Acid phosphatase precursor 1
  misc_feature (1)..(186): Homolog of NCBI NO: 15234949 NR Description: acid phosphatase - like protein
  misc_feature (1)..(187): Homolog of NCBI NO: 18379219 NR Description: expressed protein
  misc_feature (1)..(187): Homolog of NCBI NO: 21555213 NR Description: vegetative storage protein-like [Arabidopsis
  misc_feature (1)..(187): Homolog of NCBI NO: 15240067 NR Description: vegetative storage protein-like
MTSSQYEDDVERAVDEAILYLGKTCCEKKTCDGMDAWIFDIDDTLLSTIPYHKSNGCFGGEQLNTTKFEEWQNSGKAPAVPHMVKLYHEIRERGFKIFLISSRKEYLRSATVENLIEAGYHSWSNLLLRGEDDEKKSVSQYKADLRTWLTSLGYRVWGVMGAQWNSFSGCPVPKRTFKLPNSIYYVA

SEQ ID NO: 36341 - DNA, 1270 bp, Arabidopsis thaliana
  misc_feature (1)..(1270): Ceres Seq. ID no. 13489040
  misc_feature: MA Experiment ID: 20000794 Result: Up-regulated in Transcription
  misc_feature: MA Experiment 20000794 PARAMETER Experiment Name: At_Petals_P Parameter: Age (day) Value: 23-25 days
  misc_feature: MA Experiment 20000794 PARAMETER Experiment Name: At_Petals_P Parameter: Plant Line Value: WS
  misc_feature: MA Experiment 20000794 PARAMETER Experiment Name: At_Petals_P Parameter: Tissue Value: Petals vs. Whole plant
ctctctcgctttctctctataaaaagctcctctttcttcaccataactcttcaaactttactttcttacagaacaagaacataaatatcttaaactcatgtctgaatgtggatgtttttcggcaacaactatgttgagaatttgtgtagtattgataatatgtttgcatatgtgttgtgcctcgagtgattgtacaagtcacgatgatcctgtgtctcaagacgaagcagagaaagcgacgaagctaaagcttggttcgatagctttacttcttgtagccggaggagtcggcgtgagtctaccgttgatcgggaaaaggattccggcgttacaaccggaaaatgatatcttcttcatggtgaaagcttttgctgcaggagtgatcctctgcacaggtttcgttcatatcttaccagacgcgttcgagagattgagctctccatgtcttgaggacactacagctgggaagttcccgtttgctggttttgtagcgatgctgtcggcgatggggactcttatgatcgacacattcgcgacagggtattacaagaggcaacattttagcaataaccatgggagcaagcaagtgaacgtagtagtagatgaagaagagcatgcgggtcatgttcacattcacacgcacgctagtcacggacacacacatggttcgaccgagttgatcagaagacgtatagtgtcgcaggtgcttgagattgggatagttgtgcattcggttattatagggatatcacttggagcttcacagagcatagacaccataaagccactcatggctgcactatctttccatcagttctttgaaggtcttggcctcggtggatgcatctccctggcggatatgaagtcgaaatcgacagtgctaatggcgacatttttctcggtgacggcgccacttgggataggaatagggttggggatgtcaagtggtttaggctacaggaaagagagcaaagaggcaataatggtggaaggaatgttgaatgctgcatctgctgggatactcatatacatgtcacttgttgatcttcttgctactgattttatgaatccaagattgcaatccaatctctggcttcacttggctgcttatctctctctcgtcctaggcgcaggttccatgtctctcctcgccatctgggcctgattcttgatctgaaactaacaaacaaacaaaccaaatgccgctctttttctcgaatctgtaatggtgtttctaatctcagaatcaatactattctatcttgaacac

SEQ ID NO: 36342 - protein, 355 aa, Arabidopsis thaliana
  peptide (1)..(355): Ceres Seq. ID no. 13489041
  misc_feature (48)..(352): Pfam Name: ZIP Zinc transporter Pfam Description: ZIP Zinc transporter
  misc_feature (1)..(355): Homolog of NCBI NO: 15230588 NR Description: zinc transporter (ZIP1) [Arabidopsis thaliana]
MSECGCFSATTMLRICVVLIICLHMCCASSDCTSHDDPVSQDEAEKATKLKLGSIALLLVAGGVGVSLPLIGKRIPALQPENDIFFMVKAFAAGVILCTGFVHILPDAFERLSSPCLEDTTAGKFPFAGFVAMLSAMGTLMIDTFATGYYKRQHFSNNHGSKQVNVVVDEEEHAGHVHIHTHASHGHTHGSTELIRRRIVSQVLEIGIVVHSVIIGISLGASQSIDTIKPLMAALSFHQFFEGLGLGGCISLADMKSKSTVLMATFFSVTAPLGIGIGLGMSSGLGYRKESKEAIMVEGMLNAASAGILIYMSLVDLLATDFMNPRLQSNLWLHLAAYLSLVLGAGSMSLLAIWA

SEQ ID NO: 36343 - protein, 344 aa, Arabidopsis thaliana
  peptide (1)..(344): Ceres Seq. ID no. 13489042
  misc_feature (37)..(341): Pfam Name: ZIP Zinc transporter Pfam Description: ZIP Zinc transporter
  misc_feature (1)..(344): Homolog of NCBI NO: 15230588 NR Description: zinc transporter (ZIP1) [Arabidopsis thaliana]
MLRICVVLIICLHMCCASSDCTSHDDPVSQDEAEKATKLKLGSIALLLVAGGVGVSLPLIGKRIPALQPENDIFFMVKAFAAGVILCTGFVHILPDAFERLSSPCLEDTTAGKFPFAGFVAMLSAMGTLMIDTFATGYYKRQHFSNNHGSKQVNVVVDEEEHAGHVHIHTHASHGHTHGSTELIRRRIVSQVLEIGIVVHSVIIGISLGASQSIDTIKPLMAALSFHQFFEGLGLGGCISLADMKSKSTVLMATFFSVTAPLGIGIGLGMSSGLGYRKESKEAIMVEGMLNAASAGILIYMSLVDLLATDFMNPRLQSNLWLHLAAYLSLVLGAGSMSLLAIWA

SEQ ID NO: 36344 - protein, 331 aa, Arabidopsis thaliana
  peptide (1)..(331): Ceres Seq. ID no. 13489043
  misc_feature (24)..(328): Pfam Name: ZIP Zinc transporter Pfam Description: ZIP Zinc transporter
  misc_feature (1)..(331): Homolog of NCBI NO: 15230588 NR Description: zinc transporter (ZIP1) [Arabidopsis thaliana]
MCCASSDCTSHDDPVSQDEAEKATKLKLGSIALLLVAGGVGVSLPLIGKRIPALQPENDIFFMVKAFAAGVILCTGFVHILPDAFERLSSPCLEDTTAGKFPFAGFVAMLSAMGTLMIDTFATGYYKRQHFSNNHGSKQVNVVVDEEEHAGHVHIHTHASHGHTHGSTELIRRRIVSQVLEIGIVVHSVIIGISLGASQSIDTIKPLMAALSFHQFFEGLGLGGCISLADMKSKSTVLMATFFSVTAPLGIGIGLGMSSGLGYRKESKEAIMVEGMLNAASAGILIYMSLVDLLATDFMNPRLQSNLWLHLAAYLSLVLGAGSMSLLAIWA

SEQ ID NO: 36345 - DNA, 1156 bp, Arabidopsis thaliana
  misc_feature (1)..(1156): Ceres Seq. ID no. 12330381
  misc_feature: MA Experiment ID: 108434 Result: Up-regulated in Transcription
  misc_feature: MA Experiment 108434 PARAMETER Experiment Name: At_Root_Tips_cDNA_P Parameter: Tissue Value: Root Tips
  misc_feature: MA Experiment ID: 108435 Result: Up-regulated in Transcription
  misc_feature: MA Experiment 108435 PARAMETER Experiment Name: At_stm_Mutants_cDNA_P Parameter: Plant Line Value: wt Landsburg vs stm
  misc_feature: MA Experiment 108435 PARAMETER Experiment Name: At_stm_Mutants_cDNA_P Parameter: Tissue Value: Shoot Apical Meristem Region
  misc_feature: MA Experiment ID: 108462 Result: Down-regulated in Transcription
  misc_feature: MA Experiment 108462 PARAMETER Experiment Name: At_Germinating_Seeds_cDNA_P Parameter: Age (day) Value: 2 vs. 0
  misc_feature: MA Experiment 108462 PARAMETER Experiment Name: At_Germinating_Seeds_cDNA_P Parameter: Tissue Value: Germinating Seeds
  misc_feature: MA Experiment ID: 108463 Result: Down-regulated in Transcription
  misc_feature: MA Experiment 108463 PARAMETER Experiment Name: At_Germinating_Seeds_cDNA_P Parameter: Age (day) Value: 3 vs. 0
  misc_feature: MA Experiment 108463 PARAMETER Experiment Name: At_Germinating_Seeds_cDNA_P Parameter: Tissue Value: Germinating Seeds
  misc_feature: MA Experiment ID: 108464 Result: Down-regulated in Transcription
  misc_feature: MA Experiment 108464 PARAMETER Experiment Name: At_Germinating_Seeds_cDNA_P Parameter: Age (day) Value: 4 vs. 0
  misc_feature: MA Experiment 108464 PARAMETER Experiment Name: At_Germinating_Seeds_cDNA_P Parameter: Tissue Value: Germinating Seeds
  misc_feature: MA Experiment ID: 108594 Result: Up-regulated in Transcription
  misc_feature: MA Experiment 108594 PARAMETER Experiment Name: At_Ler-rhl_Root_cDNA_P Parameter: Plant Line Value: null
  misc_feature: MA Experiment ID: 20000069 Result: Down-regulated in Transcription
  misc_feature: MA Experiment 20000069 PARAMETER Experiment Name: At_100uM_ABA_Mutants_cDNA_P Parameter: Plant Line Value: CS23
  misc_feature: MA Experiment 20000069 PARAMETER Experiment Name: At_100uM_ABA_Mutants_cDNA_P Parameter: Timepoint (hr) Value: 6
  misc_feature: MA Experiment 20000069 PARAMETER Experiment Name: At_100uM_ABA_Mutants_cDNA_P Parameter: Tissue Value: Aerial
  misc_feature: MA Experiment 20000069 PARAMETER Experiment Name: At_100uM_ABA_Mutants_cDNA_P Parameter: Treatment Value: 100uM ABA vs. No Treatment
  misc_feature: MA Experiment ID: 20000180 Result: Down-regulated in Transcription
  misc_feature: MA Experiment 20000180 PARAMETER Experiment Name: At_Germinating_Seeds_P Parameter: Age (hr) Value: 24 vs. 0
  misc_feature: MA Experiment 20000180 PARAMETER Experiment Name: At_Germinating_Seeds_P Parameter: Tissue Value: Germinating Seeds
  misc_feature: MA Experiment ID: 20000184 Result: Up-regulated in Transcription
  misc_feature: MA Experiment 20000184 PARAMETER Experiment Name: At_Shoots__P Parameter: Age (day) Value: 7
  misc_feature: MA Experiment 20000184 PARAMETER Experiment Name: At_Shoots__P Parameter: Tissue Value: Shoots vs. Whole Plant
atttttcgtcaaaagaatcagtaaaaactaaacattttgactatatcctacttgaatcaattcttcggctgattttgaagttttgtgacattcagatattctagggttttgtggtaaatggaatcgaatcacgaaggcaacgcgatacaagtgattgaccaagtaacaaccatgacccatctgtctgacccgaatccgaaaaccaaaccgggtatgatgctcatgaaacaagaagacgggtatttgcagccggtgaagactaaaccggctccgaagagaccgacttctaaagaccgtcacacgaaagtagaaggacgaggtcggaggatccgaatgccggcgggttgcgctgctcgggtctttcaattgacccgtgaacttggtcacaaatccgacggagaaacgatacggtggttattggaacgagctgaaccggcgataattgaagcaaccggaaccggaactgtaccggctattgctgtatcggttaacggaactttaaaaatcccgacgagctctccagtgttgaatgacggcggccgtgacggtgacggtgacctaatgaagaaacggaggaagagaaactgtacgagcgatttcgtagacgttaatgacagctgtcatagctccgttacttctgggttagctccgataacggcgtcaaactacggcgttaatatcctgaacgttaatacacaggggtttgtgccgttttggcctatgggtatgggtactgcgtatgttactggtgggccggatcaaatgggccaaatgtgggctattcctaccgttgctacagctccgtttctcaatgttggtgctagaccggtgtctagttatgtctcaaacgcttcagacgctgaggcggagatggaaacgagcggtggcggaacgacgcaaccgctgagggatttttcgttggagatttatgataagagagagcttcagtttttgggtggctcagggaactcatctccgtcttcatgtcatgagacttaaggaattttaactcttagttctagtttctttttagtttttagtaagtttgattcctgatttaggttaagtaagatttgtaaaagaattgggagcacaatttcaattttatgtttctgtcaaacattttggtaattaatgaaactatcctatcattttt

SEQ ID NO: 36346 - protein, 293 aa, Arabidopsis thaliana
  peptide (1)..(293): Ceres Seq. ID no. 12330382
  misc_feature (46)..(252): Pfam Name: TCP family transcription factor Pfam Description: TCP family transcription factor
  misc_feature (52)..(123): Homolog of NCBI NO: 15232059 NR Description: unknown protein; protein id: At3g27010.1
  misc_feature (49)..(148): Homolog of NCBI NO: 15218305 NR Description: unknown protein
  misc_feature (43)..(134): Homolog of NCBI NO: 5731257 NR Description: auxin-induced basic helix-loop-helix
  misc_feature (49)..(134): Homolog of NCBI NO: 18409345 NR Description: expressed protein
  misc_feature (11)..(134): Homolog of NCBI NO: 22331641 NR Description: putative protein
  misc_feature (11)..(134): Homolog of NCBI NO: 11357581 NR Description: hypothetical protein F1P2.170 - Arabidopsis
  misc_feature (49)..(238): Homolog of NCBI NO: 7489534 NR Description: probable DNA binding protein PCF2 - rice
  misc_feature (27)..(235): Homolog of NCBI NO: 15225538 NR Description: putative PCF2-like DNA binding protein
  misc_feature (34)..(293): Homolog of NCBI NO: 21592496 NR Description: unknown [Arabidopsis thaliana]
  misc_feature (1)..(293): Homolog of NCBI NO: 15242216 NR Description: putative protein
MESNHEGNAIQVIDQVTTMTHLSDPNPKTKPGMMLMKQEDGYLQPVKTKPAPKRPTSKDRHTKVEGRGRRIRMPAGCAARVFQLTRELGHKSDGETIRWLLERAEPAIIEATGTGTVPAIAVSVNGTLKIPTSSPVLNDGGRDGDGDLMKKRRKRNCTSDFVDVNDSCHSSVTSGLAPITASNYGVNILNVNTQGFVPFWPMGMGTAYVTGGPDQMGQMWAIPTVATAPFLNVGARPVSSYVSNASDAEAEMETSGGGTTQPLRDFSLEIYDKRELQFLGGSGNSSPSSCHET

SEQ ID NO: 36347 - protein, 275 aa, Arabidopsis thaliana
  peptide (1)..(275): Ceres Seq. ID no. 12330383
  misc_feature (28)..(234): Pfam Name: TCP family transcription factor Pfam Description: TCP family transcription factor
  misc_feature (34)..(105): Homolog of NCBI NO: 15232059 NR Description: unknown protein; protein id: At3g27010.1
  misc_feature (31)..(130): Homolog of NCBI NO: 15218305 NR Description: unknown protein
  misc_feature (25)..(116): Homolog of NCBI NO: 5731257 NR Description: auxin-induced basic helix-loop-helix
  misc_feature (31)..(116): Homolog of NCBI NO: 18409345 NR Description: expressed protein
  misc_feature (1)..(116): Homolog of NCBI NO: 22331641 NR Description: putative protein
  misc_feature (1)..(116): Homolog of NCBI NO: 11357581 NR Description: hypothetical protein F1P2.170 - Arabidopsis
  misc_feature (31)..(220): Homolog of NCBI NO: 7489534 NR Description: probable DNA binding protein PCF2 - rice
  misc_feature (9)..(217): Homolog of NCBI NO: 15225538 NR Description: putative PCF2-like DNA binding protein
  misc_feature (16)..(275): Homolog of NCBI NO: 21592496 NR Description: unknown [Arabidopsis thaliana]
  misc_feature (1)..(275): Homolog of NCBI NO: 15242216 NR Description: putative protein
MTHLSDPNPKTKPGMMLMKQEDGYLQPVKTKPAPKRPTSKDRHTKVEGRGRRIRMPAGCAARVFQLTRELGHKSDGETIRWLLERAEPAIIEATGTGTVPAIAVSVNGTLKIPTSSPVLNDGGRDGDGDLMKKRRKRNCTSDFVDVNDSCHSSVTSGLAPITASNYGVNILNVNTQGFVPFWPMGMGTAYVTGGPDQMGQMWAIPTVATAPFLNVGARPVSSYVSNASDAEAEMETSGGGTTQPLRDFSLEIYDKRELQFLGGSGNSSPSSCHET

SEQ ID NO: 36348 - protein, 261 aa, Arabidopsis thaliana
  peptide (1)..(261): Ceres Seq. ID no. 12330384
  misc_feature (14)..(220): Pfam Name: TCP family transcription factor Pfam Description: TCP family transcription factor
  misc_feature (20)..(91): Homolog of NCBI NO: 15232059 NR Description: unknown protein; protein id: At3g27010.1
  misc_feature (17)..(116): Homolog of NCBI NO: 15218305 NR Description: unknown protein
  misc_feature (11)..(102): Homolog of NCBI NO: 5731257 NR Description: auxin-induced basic helix-loop-helix
  misc_feature (17)..(102): Homolog of NCBI NO: 18409345 NR Description: expressed protein
  misc_feature (1)..(102): Homolog of NCBI NO: 22331641 NR Description: putative protein
  misc_feature (1)..(102): Homolog of NCBI NO: 11357581 NR Description: hypothetical protein F1P2.170 - Arabidopsis
  misc_feature (17)..(206): Homolog of NCBI NO: 7489534 NR Description: probable DNA binding protein PCF2 - rice
  misc_feature (1)..(203): Homolog of NCBI NO: 15225538 NR Description: putative PCF2-like DNA binding protein
  misc_feature (2)..(261): Homolog of NCBI NO: 21592496 NR Description: unknown [Arabidopsis thaliana]
  misc_feature (1)..(261): Homolog of NCBI NO: 15242216 NR Description: putative protein
MMLMKQEDGYLQPVKTKPAPKRPTSKDRHTKVEGRGRRIRMPAGCAARVFQLTRELGHKSDGETIRWLLERAEPAIIEATGTGTVPAIAVSVNGTLKIPTSSPVLNDGGRDGDGDLMKKRRKRNCTSDFVDVNDSCHSSVTSGLAPITASNYGVNILNVNTQGFVPFWPMGMGTAYVTGGPDQMGQMWAIPTVATAPFLNVGARPVSSYVSNASDAEAEMETSGGGTTQPLRDFSLEIYDKRELQFLGGSGNSSPSSCHET

SEQ ID NO: 36349 - DNA, 751 bp, Arabidopsis thaliana
  misc_feature (1)..(751): Ceres Seq. ID no. 12395378
  misc_feature: MA Experiment ID: 108434 Result: Down-regulated in Transcription
  misc_feature: MA Experiment 108434 PARAMETER Experiment Name: At_Root_Tips_cDNA_P Parameter: Tissue Value: Root Tips
  misc_feature: MA Experiment ID: 20000185 Result: Down-regulated in Transcription
  misc_feature: MA Experiment 20000185 PARAMETER Experiment Name: At_Roots__P Parameter: Age (day) Value: 7 vs. 21
  misc_feature: MA Experiment 20000185 PARAMETER Experiment Name: At_Roots__P Parameter: Organism Value: A. thaliana
  misc_feature: MA Experiment 20000185 PARAMETER Experiment Name: At_Roots__P Parameter: Tissue Value: Roots vs. Whole Plant
agatttttgttttgtttttaatcgggaaagatgaaggcggagacgatgacgctgcttctggtgaatctagccggaataatggaaagagccgatgaatctctgcttccaggtgtatacaaagaggtcggtttagctcttcataccgatccaaccggactcgggtcattaacgttgctacgatccatggttcaagccgcttgctatcccttagctgcttacatggccattagacataaccgagctcacgttatagctctgggtgcatttctctggtccgctgctactttccttgtcgctttctcttccactttcttccaggtagcagtgtctagagctctgaatggaattggtcttgctcttgtggctccagctattcagtctctcgttgctgactcaactgatgatgctaaccgtggtactgcttttggatggttacaattaacagcaaatattggttcgattttaggcgggctttgctctgttttaatagctccattaacctttatgggcatacctggttggagagttgctttctatatcgtaggtgtgatcagtgttattgttggtgtgctagttagagttttcgccaatgatccacattttgtgaaggatggtgttgatgtttcgaatcaaccaggttcgaggaaacctttttgtacagaggtgaaggatttggtccgggaagctgatactgtcataaagattcggtcttttcagatcattgtagctcanggagtgacaggatcgtttc

SEQ ID NO: 36350 - protein, 240 aa, Arabidopsis thaliana
  peptide (1)..(240): Ceres Seq. ID no. 12395379
  misc_feature (7)..(239): Pfam Name: Sugar (and other) transporter Pfam Description: Sugar (and other) transporter
  misc_feature (8)..(189): Homolog of NCBI NO: 22987977 NR Description: hypothetical protein [Burkholderia fungorum]
  misc_feature (7)..(193): Homolog of NCBI NO: 23480447 NR Description: major facilitator superfamily protein [Plasmodium
  misc_feature (7)..(193): Homolog of NCBI NO: 23593282 NR Description: hypothetical protein, conserved [Plasmodium
  misc_feature (7)..(193): Homolog of NCBI NO: 7494336 NR Description: membrane transporter PFB0275w - malaria parasite
  misc_feature (16)..(238): Homolog of NCBI NO: 15224194 NR Description: hypothetical protein; protein id: At2g18590.1
  misc_feature (1)..(145): Homolog of NCBI NO: 11358310 NR Description: hypothetical protein T31P16.180 - Arabidopsis
  misc_feature (96)..(239): Homolog of NCBI NO: 11358310 NR Description: hypothetical protein T31P16.180 - Arabidopsis
  misc_feature (1)..(239): Homolog of NCBI NO: 15234530 NR Description: putative protein; protein id: At4g36790.1
  misc_feature (1)..(239): Homolog of NCBI NO: 15238089 NR Description: putative protein
  misc_feature (1)..(239): Homolog of NCBI NO: 15218229 NR Description: putative transporter; protein id: At1g78130.1
  misc_feature (234)..(234): Xaa is any aa, unknown or other
MKAETMTLLLVNLAGIMERADESLLPGVYKEVGLALHTDPTGLGSLTLLRSMVQAACYPLAAYMAIRHNRAHVIALGAFLWSAATFLVAFSSTFFQVAVSRALNGIGLALVAPAIQSLVADSTDDANRGTAFGWLQLTANIGSILGGLCSVLIAPLTFMGIPGWRVAFYIVGVISVIVGVLVRVFANDPHFVKDGVDVSNQPGSRKPFCTEVKDLVREADTVIKIRSFQIIVAXGVTGSF

SEQ ID NO: 36351 - protein, 235 aa, Arabidopsis thaliana
  peptide (1)..(235): Ceres Seq. ID no. 12395380
  misc_feature (2)..(234): Pfam Name: Sugar (and other) transporter Pfam Description: Sugar (and other) transporter
  misc_feature (3)..(184): Homolog of NCBI NO: 22987977 NR Description: hypothetical protein [Burkholderia fungorum]
  misc_feature (2)..(188): Homolog of NCBI NO: 23480447 NR Description: major facilitator superfamily protein [Plasmodium
  misc_feature (2)..(188): Homolog of NCBI NO: 23593282 NR Description: hypothetical protein, conserved [Plasmodium
  misc_feature (2)..(188): Homolog of NCBI NO: 7494336 NR Description: membrane transporter PFB0275w - malaria parasite
  misc_feature (11)..(233): Homolog of NCBI NO: 15224194 NR Description: hypothetical protein; protein id: At2g18590.1
  misc_feature (1)..(140): Homolog of NCBI NO: 11358310 NR Description: hypothetical protein T31P16.180 - Arabidopsis
  misc_feature (91)..(234): Homolog of NCBI NO: 11358310 NR Description: hypothetical protein T31P16.180 - Arabidopsis
  misc_feature (1)..(234): Homolog of NCBI NO: 15234530 NR Description: putative protein; protein id: At4g36790.1
  misc_feature (1)..(234): Homolog of NCBI NO: 15238089 NR Description: putative protein
  misc_feature (1)..(234): Homolog of NCBI NO: 15218229 NR Description: putative transporter; protein id: At1g78130.1
  misc_feature (229)..(229): Xaa is any aa, unknown or other
MTLLLVNLAGIMERADESLLPGVYKEVGLALHTDPTGLGSLTLLRSMVQAACYPLAAYMAIRHNRAHVIALGAFLWSAATFLVAFSSTFFQVAVSRALNGIGLALVAPAIQSLVADSTDDANRGTAFGWLQLTANIGSILGGLCSVLIAPLTFMGIPGWRVAFYIVGVISVIVGVLVRVFANDPHFVKDGVDVSNQPGSRKPFCTEVKDLVREADTVIKIRSFQIIVAXGVTGSF

SEQ ID NO: 36352 - protein, 224 aa, Arabidopsis thaliana
  peptide (1)..(224): Ceres Seq. ID no. 12395381
  misc_feature (1)..(223): Pfam Name: Sugar (and other) transporter Pfam Description: Sugar (and other) transporter
  misc_feature (1)..(173): Homolog of NCBI NO: 22987977 NR Description: hypothetical protein [Burkholderia fungorum]
  misc_feature (1)..(177): Homolog of NCBI NO: 23480447 NR Description: major facilitator superfamily protein [Plasmodium
  misc_feature (1)..(177): Homolog of NCBI NO: 23593282 NR Description: hypothetical protein, conserved [Plasmodium
  misc_feature (1)..(177): Homolog of NCBI NO: 7494336 NR Description: membrane transporter PFB0275w - malaria parasite
  misc_feature (1)..(222): Homolog of NCBI NO: 15224194 NR Description: hypothetical protein; protein id: At2g18590.1
  misc_feature (1)..(129): Homolog of NCBI NO: 11358310 NR Description: hypothetical protein T31P16.180 - Arabidopsis
  misc_feature (80)..(223): Homolog of NCBI NO: 11358310 NR Description: hypothetical protein T31P16.180 - Arabidopsis
  misc_feature (1)..(223): Homolog of NCBI NO: 15234530 NR Description: putative protein; protein id: At4g36790.1
  misc_feature (1)..(223): Homolog of NCBI NO: 15238089 NR Description: putative protein
  misc_feature (1)..(223): Homolog of NCBI NO: 15218229 NR Description: putative transporter; protein id: At1g78130.1
  misc_feature (218)..(218): Xaa is any aa, unknown or other
MERADESLLPGVYKEVGLALHTDPTGLGSLTLLRSMVQAACYPLAAYMAIRHNRAHVIALGAFLWSAATFLVAFSSTFFQVAVSRALNGIGLALVAPAIQSLVADSTDDANRGTAFGWLQLTANIGSILGGLCSVLIAPLTFMGIPGWRVAFYIVGVISVIVGVLVRVFANDPHFVKDGVDVSNQPGSRKPFCTEVKDLVREADTVIKIRSFQIIVAXGVTGSF

SEQ ID NO: 36353 - DNA, 1855 bp, Arabidopsis thaliana
  misc_feature (1)..(1855): Ceres Seq. ID no. 13575995
  misc_feature: MA Experiment ID: 20000179 Result: Down-regulated in Transcription
  misc_feature: MA Experiment 20000179 PARAMETER Experiment Name: At_Germinating_Seeds_P Parameter: Age (hr) Value: 6 vs. 0
  misc_feature: MA Experiment 20000179 PARAMETER Experiment Name: At_Germinating_Seeds_P Parameter: Tissue Value: Germinating Seeds
ggaagaacaaacactgaaacaaaagagaaaaatcccaaagctagaaaccctaatcccaaacgaatcaatggagcgagacgaagaagcgagtggaccgatgatggagatgtgcactaacggcggcgaagagacgtctaatcgaagacctatcataagtggcgaaccgctcgacatcgaggcctacgcggctctctacaaaggtcgcacgaagatcatgcggcttctcttcatcgctaaccactgcggaggaaaccacgcgcttcagtttgacgcgttgaggatggcttacgatgagatcaaaaagggtgagaatacgcagttgttcagagaagtggtcaataagattggcaacaggcttggggaaaagtatgggatggatcttgcttggtgtgaggccgtcgatcgtcgtgctgaacagaagaaagtaaagctggagaatgagctcagttcttatcggacaaatttgatcaaggaaagcatcagaatgggttacaatgactttggagatttctattacgcatgtggtatgctcggagatgctttcaagaactatatccgaacacgcgactactgcactacgacaaagcacatcattcacatgtgtatgaatgcgattcttgtcagcatcgaaatgggtcagtttactcatgttacaagctatgtgaacaaggcagagcagaatcctgaaacccttgaacctatggttaatgcaaaactgcgatgtgcatctggattggctcatttggagttgaagaagtacaagctagctgctcgtaagttcttagatgttaacccagaacttggaaattcctataatgaagtcattgctcctcaagatattgccacctatggtggactctgtgccctggcaagctttgatcgatcagaattgaagcaaaaagtcattgacaatatcaacttccggaatttcttggagctagtgcctgatgtgagggaacttatcaacgatttctattcaagccgctatgcttcctgcctggaatatcttgcaagtctcaaatcgaatctgctgctggacatccatcttcatgatcacgttgacacactatatgatcagataaggaagaaggcactgatccagtacacattgccatttgtctctgttgatttgagcaggatggccgatgcattcaagactagcgtctctggtctagagaaagaacttgaagccttgatcacagacaaccagattcaggcaaggattgattcacacaacaaaatcctctatgcaagacacgcggatcagaggaatgcaactttccaaaaggtacttcagatgggaaacgaattcgatagagatgtcagggcgatgctgttaagagccaacctcctgaaacatgagtatcatgccagatcggcaaggaaactttgatgacatctgctttgctaaactgagaggaatattcaagggtgttttttcaagattcgaaccaaacgagaaattgggcaagattacttttttgtaagaaccaagtgtttcaatgagtcgatgacatttagagtaagtaaaggttttattctaagatggacagtccattattaatcaactattgaatgatattgccttttaaatgagtcttaggtagcatcgcaataactccatgtttactcaaaactcacaaaccatgaagttaagaatccgccaaatttggaagatgggccaactctaaatttactcaccccaatactccatttattttgggttgcattgatgaaagtaatttgtataattgataggttgtgtatcaaaaaccggatctcattatttgtgatctttgcattagttatttttggagactaataaccatctttctaaactgtgagtaatacaaat

SEQ ID NO: 36354 - protein, 463 aa, Arabidopsis thaliana
  peptide (1)..(463): Ceres Seq. ID no. 13575996
  misc_feature (315)..(419): Pfam Name: PCI domain Pfam Description: PCI domain
  misc_feature (315)..(419): Pfam Name: PCI domain Pfam Description: PCI domain
  misc_feature (96)..(459): Homolog of NCBI NO: 7512468 NR Description: fusca protein homolog Gps1 - human
  misc_feature (96)..(459): Homolog of NCBI NO: 20981690 NR Description: COP9 signalosome complex subunit 1 (G protein
  misc_feature (96)..(459): Homolog of NCBI NO: 5713317 NR Description: G protein pathway suppressor 1; Arabidopsis
  misc_feature (96)..(459): Homolog of NCBI NO: 21703742 NR Description: G protein pathway suppressor 1 [Mus musculus]
  misc_feature (23)..(462): Homolog of NCBI NO: 10443485 NR Description: rCOP11 protein [Oryza sativa]
  misc_feature (96)..(459): Homolog of NCBI NO: 7512468 NR Description: fusca protein homolog Gps1 - human
  misc_feature (96)..(459): Homolog of NCBI NO: 5713317 NR Description: G protein pathway suppressor 1; Arabidopsis
  misc_feature (23)..(462): Homolog of NCBI NO: 10443485 NR Description: rCOP11 protein [Oryza sativa]
  misc_feature (23)..(463): Homolog of NCBI NO: 18411857 NR Description: COP9 complex subunit, FUS6 [Arabidopsis thaliana]
  misc_feature (23)..(463): Homolog of NCBI NO: 432446 NR Description: FUS6
  misc_feature (23)..(463): Homolog of NCBI NO: 26450149 NR Description: putative FUSCA protein FUS6 [Arabidopsis thaliana]
  misc_feature (23)..(463): Homolog of NCBI NO: 11282867 NR Description: FUSCA PROTEIN FUS6 - Arabidopsis thaliana
  misc_feature (23)..(462): Homolog of NCBI NO: 7208213 NR Description: constitutive photomorphogenic 11 [Oryza sativa
  misc_feature (96)..(459): Homolog of NCBI NO: 21703742 NR Description: G protein pathway suppressor 1 [Mus musculus]
  misc_feature (96)..(459): Homolog of NCBI NO: 20981690 NR Description: COP9 signalosome complex subunit 1 (G protein
  misc_feature (23)..(462): Homolog of NCBI NO: 7208213 NR Description: constitutive photomorphogenic 11 [Oryza sativa
  misc_feature (23)..(463): Homolog of NCBI NO: 11282867 NR Description: FUSCA PROTEIN FUS6 - Arabidopsis thaliana
  misc_feature (23)..(463): Homolog of NCBI NO: 26450149 NR Description: putative FUSCA protein FUS6 [Arabidopsis thaliana]
  misc_feature (23)..(463): Homolog of NCBI NO: 432446 NR Description: FUS6
  misc_feature (23)..(463): Homolog of NCBI NO: 18411857 NR Description: COP9 complex subunit, FUS6 [Arabidopsis thaliana]
EEQTLKQKRKIPKLETLIPNESMERDEEASGPMMEMCTNGGEETSNRRPIISGEPLDIEAYAALYKGRTKIMRLLFIANHCGGNHALQFDALRMAYDEIKKGENTQLFREVVNKIGNRLGEKYGMDLAWCEAVDRRAEQKKVKLENELSSYRTNLIKESIRMGYNDFGDFYYACGMLGDAFKNYIRTRDYCTTTKHIIHMCMNAILVSIEMGQFTHVTSYVNKAEQNPETLEPMVNAKLRCASGLAHLELKKYKLAARKFLDVNPELGNSYNEVIAPQDIATYGGLCALASFDRSELKQKVIDNINFRNFLELVPDVRELINDFYSSRYASCLEYLASLKSNLLLDIHLHDHVDTLYDQIRKKALIQYTLPFVSVDLSRMADAFKTSVSGLEKELEALITDNQIQARIDSHNKILYARHADQRNATFQKVLQMGNEFDRDVRAMLLRANLLKHEYHARSARKL

SEQ ID NO: 36355 - protein, 441 aa, Arabidopsis thaliana
  peptide (1)..(441): Ceres Seq. ID no. 13575997
  misc_feature (293)..(397): Pfam Name: PCI domain Pfam Description: PCI domain
  misc_feature (293)..(397): Pfam Name: PCI domain Pfam Description: PCI domain
  misc_feature (74)..(437): Homolog of NCBI NO: 20981690 NR Description: COP9 signalosome complex subunit 1 (G protein
  misc_feature (74)..(437): Homolog of NCBI NO: 7512468 NR Description: fusca protein homolog Gps1 - human
  misc_feature (74)..(437): Homolog of NCBI NO: 5713317 NR Description: G protein pathway suppressor 1; Arabidopsis
  misc_feature (74)..(437): Homolog of NCBI NO: 21703742 NR Description: G protein pathway suppressor 1 [Mus musculus]
  misc_feature (1)..(440): Homolog of NCBI NO: 10443485 NR Description: rCOP11 protein [Oryza sativa]
  misc_feature (74)..(437): Homolog of NCBI NO: 20981690 NR Description: COP9 signalosome complex subunit 1 (G protein
  misc_feature (74)..(437): Homolog of NCBI NO: 5713317 NR Description: G protein pathway suppressor 1; Arabidopsis
  misc_feature (1)..(440): Homolog of NCBI NO: 10443485 NR Description: rCOP11 protein [Oryza sativa]
  misc_feature (1)..(441): Homolog of NCBI NO: 18411857 NR Description: COP9 complex subunit, FUS6 [Arabidopsis thaliana]
  misc_feature (1)..(441): Homolog of NCBI NO: 432446 NR Description: FUS6
  misc_feature (1)..(441): Homolog of NCBI NO: 26450149 NR Description: putative FUSCA protein FUS6 [Arabidopsis thaliana]
  misc_feature (1)..(441): Homolog of NCBI NO: 11282867 NR Description: FUSCA PROTEIN FUS6 - Arabidopsis thaliana
  misc_feature (1)..(440): Homolog of NCBI NO: 7208213 NR Description: constitutive photomorphogenic 11 [Oryza sativa
  misc_feature (74)..(437): Homolog of NCBI NO: 21703742 NR Description: G protein pathway suppressor 1 [Mus musculus]
  misc_feature (74)..(437): Homolog of NCBI NO: 7512468 NR Description: fusca protein homolog Gps1 - human
  misc_feature (1)..(440): Homolog of NCBI NO: 7208213 NR Description: constitutive photomorphogenic 11 [Oryza sativa
  misc_feature (1)..(441): Homolog of NCBI NO: 11282867 NR Description: FUSCA PROTEIN FUS6 - Arabidopsis thaliana
  misc_feature (1)..(441): Homolog of NCBI NO: 26450149 NR Description: putative FUSCA protein FUS6 [Arabidopsis thaliana]
  misc_feature (1)..(441): Homolog of NCBI NO: 432446 NR Description: FUS6
  misc_feature (1)..(441): Homolog of NCBI NO: 18411857 NR Description: COP9 complex subunit, FUS6 [Arabidopsis thaliana]
MERDEEASGPMMEMCTNGGEETSNRRPIISGEPLDIEAYAALYKGRTKIMRLLFIANHCGGNHALQFDALRMAYDEIKKGENTQLFREVVNKIGNRLGEKYGMDLAWCEAVDRRAEQKKVKLENELSSYRTNLIKESIRMGYNDFGDFYYACGMLGDAFKNYIRTRDYCTTTKHIIHMCMNAILVSIEMGQFTHVTSYVNKAEQNPETLEPMVNAKLRCASGLAHLELKKYKLAARKFLDVNPELGNSYNEVIAPQDIATYGGLCALASFDRSELKQKVIDNINFRNFLELVPDVRELINDFYSSRYASCLEYLASLKSNLLLDIHLHDHVDTLYDQIRKKALIQYTLPFVSVDLSRMADAFKTSVSGLEKELEALITDNQIQARIDSHNKILYARHADQRNATFQKVLQMGNEFDRDVRAMLLRANLLKHEYHARSARKL

SEQ ID NO: 36356 - protein, 431 aa, Arabidopsis thaliana
  peptide (1)..(431): Ceres Seq. ID no. 13575998
  misc_feature (283)..(387): Pfam Name: PCI domain Pfam Description: PCI domain
  misc_feature (283)..(387): Pfam Name: PCI domain Pfam Description: PCI domain
  misc_feature (64)..(427): Homolog of NCBI NO: 20981690 NR Description: COP9 signalosome complex subunit 1 (G protein
  misc_feature (64)..(427): Homolog of NCBI NO: 7512468 NR Description: fusca protein homolog Gps1 - human
  misc_feature (64)..(427): Homolog of NCBI NO: 5713317 NR Description: G protein pathway suppressor 1; Arabidopsis
  misc_feature (64)..(427): Homolog of NCBI NO: 21703742 NR Description: G protein pathway suppressor 1 [Mus musculus]
  misc_feature (1)..(430): Homolog of NCBI NO: 10443485 NR Description: rCOP11 protein [Oryza sativa]
  misc_feature (64)..(427): Homolog of NCBI NO: 20981690 NR Description: COP9 signalosome complex subunit 1 (G protein
  misc_feature (64)..(427): Homolog of NCBI NO: 5713317 NR Description: G protein pathway suppressor 1; Arabidopsis
  misc_feature (1)..(430): Homolog of NCBI NO: 10443485 NR Description: rCOP11 protein [Oryza sativa]
  misc_feature (1)..(431): Homolog of NCBI NO: 18411857 NR Description: COP9 complex subunit, FUS6 [Arabidopsis thaliana]
  misc_feature (1)..(431): Homolog of NCBI NO: 432446 NR Description: FUS6
  misc_feature (1)..(431): Homolog of NCBI NO: 26450149 NR Description: putative FUSCA protein FUS6 [Arabidopsis thaliana]
  misc_feature (1)..(431): Homolog of NCBI NO: 11282867 NR Description: FUSCA PROTEIN FUS6 - Arabidopsis thaliana
  misc_feature (1)..(430): Homolog of NCBI NO: 7208213 NR Description: constitutive photomorphogenic 11 [Oryza sativa
  misc_feature (64)..(427): Homolog of NCBI NO: 21703742 NR Description: G protein pathway suppressor 1 [Mus musculus]
  misc_feature (64)..(427): Homolog of NCBI NO: 7512468 NR Description: fusca protein homolog Gps1 - human
  misc_feature (1)..(430): Homolog of NCBI NO: 7208213 NR Description: constitutive photomorphogenic 11 [Oryza sativa
  misc_feature (1)..(431): Homolog of NCBI NO: 11282867 NR Description: FUSCA PROTEIN FUS6 - Arabidopsis thaliana
  misc_feature (1)..(431): Homolog of NCBI NO: 26450149 NR Description: putative FUSCA protein FUS6 [Arabidopsis thaliana]
  misc_feature (1)..(431): Homolog of NCBI NO: 432446 NR Description: FUS6
  misc_feature (1)..(431): Homolog of NCBI NO: 18411857 NR Description: COP9 complex subunit, FUS6 [Arabidopsis thaliana]
MMEMCTNGGEETSNRRPIISGEPLDIEAYAALYKGRTKIMRLLFIANHCGGNHALQFDALRMAYDEIKKGENTQLFREVVNKIGNRLGEKYGMDLAWCEAVDRRAEQKKVKLENELSSYRTNLIKESIRMGYNDFGDFYYACGMLGDAFKNYIRTRDYCTTTKHIIHMCMNAILVSIEMGQFTHVTSYVNKAEQNPETLEPMVNAKLRCASGLAHLELKKYKLAARKFLDVNPELGNSYNEVIAPQDIATYGGLCALASFDRSELKQKVIDNINFRNFLELVPDVRELINDFYSSRYASCLEYLASLKSNLLLDIHLHDHVDTLYDQIRKKALIQYTLPFVSVDLSRMADAFKTSVSGLEKELEALITDNQIQARIDSHNKILYARHADQRNATFQKVLQMGNEFDRDVRAMLLRANLLKHEYHARSARKL

SEQ ID NO: 36357 - DNA, 1102 bp, Arabidopsis thaliana
  misc_feature (1)..(1102): Ceres Seq. ID no. 13489044
  misc_feature: MA Experiment ID: 20000227 Result: Down-regulated in Transcription
  misc_feature: MA Experiment 20000227 PARAMETER Experiment Name: At_Root-Tips-vs-Tops_P Parameter: Tissue Value: Root Tips vs. Root Tops
  misc_feature: MA Experiment ID: 20000495 Result: Up-regulated in Transcription
  misc_feature: MA Experiment 20000495 PARAMETER Experiment Name: At_Guard_Cells_P Parameter: Harvest Date Value: 8/2/2002
  misc_feature: MA Experiment 20000495 PARAMETER Experiment Name: At_Guard_Cells_P Parameter: Organism Value: A. thaliana
  misc_feature: MA Experiment 20000495 PARAMETER Experiment Name: At_Guard_Cells_P Parameter: Tissue Value: Guard Cells vs. Leaves
  misc_feature: MA Experiment ID: 20001450 Result: Down-regulated in Transcription
  misc_feature: MA Experiment 20001450 PARAMETER Experiment Name: At_Far-red-induction_P Parameter: Age (day) Value: 7
  misc_feature: MA Experiment 20001450 PARAMETER Experiment Name: At_Far-red-induction_P Parameter: Light Value: Far-red vs. White
  misc_feature: MA Experiment 20001450 PARAMETER Experiment Name: At_Far-red-induction_P Parameter: Organism Value: A. thaliana
  misc_feature: MA Experiment 20001450 PARAMETER Experiment Name: At_Far-red-induction_P Parameter: Plant Line Value: Columbia
  misc_feature: MA Experiment 20001450 PARAMETER Experiment Name: At_Far-red-induction_P Parameter: Timepoint (hr) Value: 8
  misc_feature: MA Experiment 20001450 PARAMETER Experiment Name: At_Far-red-induction_P Parameter: Tissue Value: Whole Plant
  misc_feature: MA Experiment ID: 20001451 Result: Down-regulated in Transcription
  misc_feature: MA Experiment 20001451 PARAMETER Experiment Name: At_Far-red-induction_P Parameter: Age (day) Value: 7
  misc_feature: MA Experiment 20001451 PARAMETER Experiment Name: At_Far-red-induction_P Parameter: Light Value: Far-red vs. White
  misc_feature: MA Experiment 20001451 PARAMETER Experiment Name: At_Far-red-induction_P Parameter: Organism Value: A. thaliana
  misc_feature: MA Experiment 20001451 PARAMETER Experiment Name: At_Far-red-induction_P Parameter: Plant Line Value: Columbia
  misc_feature: MA Experiment 20001451 PARAMETER Experiment Name: At_Far-red-induction_P Parameter: Timepoint (hr) Value: 24
  misc_feature: MA Experiment 20001451 PARAMETER Experiment Name: At_Far-red-induction_P Parameter: Tissue Value: Whole Plant
aaaagaagagatggagaaaagggaagatggagggatcttgacatatgatggtagatatgttatgtacaatgtactcggtaacattttcgagctatcttcaaaatacatccctcctattgaacccatcggccgaggtgcttatggtattgtctgctgtgctacaaactcagagacaaatgaagaggttgctataaagaagatagcaaacgcgtttgacaacagagttgatgctaaaagaactctccgagagatcaagctcctttcccacatggatcatgacaatgttatcaaaattaaagatataattgagctaccagagaaagaaaggttcgaagatgtatatattgtttatgagttgatggatacagatttgcaccagatcattagatccactcaaactctaactgatgaccattgtcagtacttcctttaccaaattttgagaggccttaagtacatacactctgcaaatgttcttcaccgcgatctgaaaccgagcaacttggttctgaatacgaactgtgacctgaaaatctgtgattttgggctagcaagaacgtcgaatgagacagagataatgactgagtatgttgtgacgagatggtaccgtgcacctgaattgcttctcaacagctctgaatacacaggagctattgacatttggtctgttggttgcattttcatggagatacttagaagagagacgcttttccctggtaaagattacgttcagcagctgaaacttattactgagctcttagggtcaccagatgactcggatctcgacttcttgagaagcgataatgcgcggaagtacgtaaaacaactcccacatgttcaaaaacaatcattcagagaaaagtttccaaacatttccccaatggctctagatcttgctgaaaagatgctagttttcgatccttcaaagcgcatcacagtggatgaagcattgaagcagccgtacttggcaagtctccatgagatcaacgaagaaccaacatgtcctactcctttcagctttgactttgaggagacagccttagatgaacaagacatcaaggagcttgtctggagagagtctttacacttcaagaatatgtaa

SEQ ID NO: 36358 - protein, 366 aa, Arabidopsis thaliana
  peptide (1)..(366): Ceres Seq. ID no. 13489045
  misc_feature (36)..(322): Pfam Name: Protein kinase domain Pfam Description: Protein kinase domain
  misc_feature (14)..(363): Homolog of NCBI NO: 25387109 NR Description: probable mitogen-activated protein kinase
  misc_feature (11)..(363): Homolog of NCBI NO: 15234152 NR Description: mitogen-activated protein kinase (MAPK), putative
  misc_feature (12)..(363): Homolog of NCBI NO: 27312014 NR Description: mitogen-activated protein kinase [Malus
  misc_feature (11)..(363): Homolog of NCBI NO: 25052804 NR Description: mitogen-activated protein kinase 4 [Petroselinum
  misc_feature (7)..(363): Homolog of NCBI NO: 21165527 NR Description: mitogen-activated protein kinase [Solanum
  misc_feature (2)..(363): Homolog of NCBI NO: 21165529 NR Description: mitogen-activated protein kinase [Solanum
  misc_feature (2)..(363): Homolog of NCBI NO: 12718824 NR Description: NRK1 MAPK [Nicotiana tabacum]
  misc_feature (2)..(363): Homolog of NCBI NO: 2499616 NR Description: MITOGEN-ACTIVATED PROTEIN KINASE HOMOLOG NTF6
  misc_feature (3)..(363): Homolog of NCBI NO: 4456682 NR Description: MAP kinase [Medicago sativa]
  misc_feature (4)..(366): Homolog of NCBI NO: 15223026 NR Description: mitogen-activated protein kinase (MAPK), putative
KEEMEKREDGGILTYDGRYVMYNVLGNIFELSSKYIPPIEPIGRGAYGIVCCATNSETNEEVAIKKIANAFDNRVDAKRTLREIKLLSHMDHDNVIKIKDIIELPEKERFEDVYIVYELMDTDLHQIIRSTQTLTDDHCQYFLYQILRGLKYIHSANVLHRDLKPSNLVLNTNCDLKICDFGLARTSNETEIMTEYVVTRWYRAPELLLNSSEYTGAIDIWSVGCIFMEILRRETLFPGKDYVQQLKLITELLGSPDDSDLDFLRSDNARKYVKQLPHVQKQSFREKFPNISPMALDLAEKMLVFDPSKRITVDEALKQPYLASLHEINEEPTCPTPFSFDFEETALDEQDIKELVWRESLHFKNM

SEQ ID NO: 36359 - protein, 363 aa, Arabidopsis thaliana
  peptide (1)..(363): Ceres Seq. ID no. 13489046
  misc_feature (33)..(319): Pfam Name: Protein kinase domain Pfam Description: Protein kinase domain
  misc_feature (11)..(360): Homolog of NCBI NO: 25387109 NR Description: probable mitogen-activated protein kinase
  misc_feature (8)..(360): Homolog of NCBI NO: 15234152 NR Description: mitogen-activated protein kinase (MAPK), putative
  misc_feature (9)..(360): Homolog of NCBI NO: 27312014 NR Description: mitogen-activated protein kinase [Malus
  misc_feature (8)..(360): Homolog of NCBI NO: 25052804 NR Description: mitogen-activated protein kinase 4 [Petroselinum
  misc_feature (4)..(360): Homolog of NCBI NO: 21165527 NR Description: mitogen-activated protein kinase [Solanum
  misc_feature (1)..(360): Homolog of NCBI NO: 21165529 NR Description: mitogen-activated protein kinase [Solanum
  misc_feature (1)..(360): Homolog of NCBI NO: 12718824 NR Description: NRK1 MAPK [Nicotiana tabacum]
  misc_feature (1)..(360): Homolog of NCBI NO: 2499616 NR Description: MITOGEN-ACTIVATED PROTEIN KINASE HOMOLOG NTF6
  misc_feature (1)..(360): Homolog of NCBI NO: 4456682 NR Description: MAP kinase [Medicago sativa]
  misc_feature (1)..(363): Homolog of NCBI NO: 15223026 NR Description: mitogen-activated protein kinase (MAPK), putative
MEKREDGGILTYDGRYVMYNVLGNIFELSSKYIPPIEPIGRGAYGIVCCATNSETNEEVAIKKIANAFDNRVDAKRTLREIKLLSHMDHDNVIKIKDIIELPEKERFEDVYIVYELMDTDLHQIIRSTQTLTDDHCQYFLYQILRGLKYIHSANVLHRDLKPSNLVLNTNCDLKICDFGLARTSNETEIMTEYVVTRWYRAPELLLNSSEYTGAIDIWSVGCIFMEILRRETLFPGKDYVQQLKLITELLGSPDDSDLDFLRSDNARKYVKQLPHVQKQSFREKFPNISPMALDLAEKMLVFDPSKRITVDEALKQPYLASLHEINEEPTCPTPFSFDFEETALDEQDIKELVWRESLHFKNM

SEQ ID NO: 36360 - protein, 346 aa, Arabidopsis thaliana
  peptide (1)..(346): Ceres Seq. ID no. 13489047
  misc_feature (16)..(302): Pfam Name: Protein kinase domain Pfam Description: Protein kinase domain
  misc_feature (1)..(343): Homolog of NCBI NO: 25387109 NR Description: probable mitogen-activated protein kinase
  misc_feature (1)..(343): Homolog of NCBI NO: 15234152 NR Description: mitogen-activated protein kinase (MAPK), putative
  misc_feature (1)..(343): Homolog of NCBI NO: 27312014 NR Description: mitogen-activated protein kinase [Malus
  misc_feature (1)..(343): Homolog of NCBI NO: 25052804 NR Description: mitogen-activated protein kinase 4 [Petroselinum
  misc_feature (1)..(343): Homolog of NCBI NO: 21165527 NR Description: mitogen-activated protein kinase [Solanum
  misc_feature (1)..(343): Homolog of NCBI NO: 21165529 NR Description: mitogen-activated protein kinase [Solanum
  misc_feature (1)..(343): Homolog of NCBI NO: 12718824 NR Description: NRK1 MAPK [Nicotiana tabacum]
  misc_feature (1)..(343): Homolog of NCBI NO: 2499616 NR Description: MITOGEN-ACTIVATED PROTEIN KINASE HOMOLOG NTF6
  misc_feature (1)..(343): Homolog of NCBI NO: 4456682 NR Description: MAP kinase [Medicago sativa]
  misc_feature (1)..(346): Homolog of NCBI NO: 15223026 NR Description: mitogen-activated protein kinase (MAPK), putative
MYNVLGNIFELSSKYIPPIEPIGRGAYGIVCCATNSETNEEVAIKKIANAFDNRVDAKRTLREIKLLSHMDHDNVIKIKDIIELPEKERFEDVYIVYELMDTDLHQIIRSTQTLTDDHCQYFLYQILRGLKYIHSANVLHRDLKPSNLVLNTNCDLKICDFGLARTSNETEIMTEYVVTRWYRAPELLLNSSEYTGAIDIWSVGCIFMEILRRETLFPGKDYVQQLKLITELLGSPDDSDLDFLRSDNARKYVKQLPHVQKQSFREKFPNISPMALDLAEKMLVFDPSKRITVDEALKQPYLASLHEINEEPTCPTPFSFDFEETALDEQDIKELVWRESLHFKNM

SEQ ID NO: 36361 - DNA, 1481 bp, Arabidopsis thaliana
  misc_feature (1)..(1481): Ceres Seq. ID no. 13646085
  misc_feature: MA Experiment ID: 20001555 Result: Up-regulated in Transcription
  misc_feature: MA Experiment 20001555 PARAMETER Experiment Name: At_Drought_Soil_Dry_P Parameter: Age (day) Value: 24
  misc_feature: MA Experiment 20001555 PARAMETER Experiment Name: At_Drought_Soil_Dry_P Parameter: Organism Value: A. thaliana
  misc_feature: MA Experiment 20001555 PARAMETER Experiment Name: At_Drought_Soil_Dry_P Parameter: Plant Line Value: WS
  misc_feature: MA Experiment 20001555 PARAMETER Experiment Name: At_Drought_Soil_Dry_P Parameter: Post Timepoint (hr) Value: None
  misc_feature: MA Experiment 20001555 PARAMETER Experiment Name: At_Drought_Soil_Dry_P Parameter: Post-Treatment Value: None
  misc_feature: MA Experiment 20001555 PARAMETER Experiment Name: At_Drought_Soil_Dry_P Parameter: Timepoint (day) Value: 10
  misc_feature: MA Experiment 20001555 PARAMETER Experiment Name: At_Drought_Soil_Dry_P Parameter: Treatment Value: Drought vs. No Drought
  misc_feature: MA Experiment ID: 20001757 Result: Down-regulated in Transcription
  misc_feature: MA Experiment 20001757 PARAMETER Experiment Name: At_50mM_NH4NO3_L-to-H_P Parameter: Timepoint (hr) Value: 6
  misc_feature: MA Experiment 20001757 PARAMETER Experiment Name: At_50mM_NH4NO3_L-to-H_P Parameter: Tissue Value: Leaf
  misc_feature: MA Experiment 20001757 PARAMETER Experiment Name: At_50mM_NH4NO3_L-to-H_P Parameter: Treatment Value: 50mM NH4NO3 vs 100mM Mannitol
  misc_feature: MA Experiment ID: 20001905 Result: Up-regulated in Transcription
  misc_feature: MA Experiment 20001905 PARAMETER Experiment Name: At_Drought_Reproduction_P Parameter: Age (day) Value: 40
  misc_feature: MA Experiment 20001905 PARAMETER Experiment Name: At_Drought_Reproduction_P Parameter: Organism Value: A. thaliana
  misc_feature: MA Experiment 20001905 PARAMETER Experiment Name: At_Drought_Reproduction_P Parameter: Plant Line Value: WS
  misc_feature: MA Experiment 20001905 PARAMETER Experiment Name: At_Drought_Reproduction_P Parameter: Timepoint (day) Value: 10
  misc_feature: MA Experiment 20001905 PARAMETER Experiment Name: At_Drought_Reproduction_P Parameter: Tissue Value: Rosettes
  misc_feature: MA Experiment 20001905 PARAMETER Experiment Name: At_Drought_Reproduction_P Parameter: Treatment Value: Drought vs. No Drought
atctccaccttctatttattccgccaaaagcctttacggttactacaagccatccaacaatgtcttcttcttcttccgtaagaatctctctctccttcattttcttggctctgctaatctcaccggctgtgtcacaaacatgtaagtcacagactttttccggcgataaaacttaccctcactgccttgacctccctcaactcaaagccttccttcattattcctatgatgcctctaacacaactctggccgtcgtcttctctgctccgccggcaaagcctggcggatggatcgcgtgggcgattaatccaaaggctaccggtatggtcggatctcaaacccttgtcgcttacaaggatccaggtaatggtgttgccgtggtgaagacgctaaacattagctcctatagctcgctgattccgtcgaagctggcgtttgatgtttgggatatgaaagccgaggaggcggcgagagatggaggaagtttgagaatctttgctagggttaaggttccggctgatttggtggcaaagggaaaggttaatcaggtttggcaagttggtcctgaattaggtcctggtggaatgattgggaggcacgctttcgactcggcgaatctcgcttctatgagctctcttgatttaaaaggtgacaacagcggtggcacaatctctggaggcgacgaggtaaatgccaagatcaagaacagaaatattcatgggatattaaacgcagtgagttggggaattttgtttccgataggagcaataatagccaggtacatgagagtatttgactcggccgatccggcctggttttacctccacgtttcttgtcaattctctgcttatgtcatcggtgttgccggttgggctaccggacttaagctcggtaacgagtccgagggtattcgcttctccgcccaccgtaacatcggcattgccctcttcacccttgccaccattcagatgtttgcgatgttgttgcggcctaagaaagatcacaagtacagattctattggaatatctaccaccatggagtcggttatgcgatcctcacccttgggatcattaatgtcttcaaaggtctcaacatcttgaaaccacaagacacgtacaagacggcttacattgcagtgattgccgttcttggaggcattgctttgctcttagaagccatcacttgggtcgttgtactcaagagaaaatcaaacaactcaatgaagcctcttaggacctaagccaacaaagatctggtcaacttattaaaggttcatctgcagttgttgttattaatttattatgagctcttgtattattaatgtttatagaacaagggtgtcacatgtattattgttctcttgttttgtagctttttggttttgtttgttgagtatttcttgggttatgaattcttgtaggggatgaatgtttttgaaatagttcttattttactttgaatcaatgagttttttcagttc

SEQ ID NO: 36362 - protein, 412 aa, Arabidopsis thaliana
  peptide (1)..(412): Ceres Seq. ID no. 13646086
  misc_feature (108)..(246): Pfam Name: Protein of unknown function (DUF568) Pfam Description: Protein of unknown function (DUF568)
  misc_feature (31)..(408): Homolog of NCBI NO: 13785207 NR Description: putative membrane protein [Solanum tuberosum]
  misc_feature (31)..(408): Homolog of NCBI NO: 13785213 NR Description: putative membrane protein [Solanum tuberosum]
  misc_feature (20)..(403): Homolog of NCBI NO: 21592781 NR Description: putative membrane protein [Arabidopsis thaliana]
  misc_feature (20)..(403): Homolog of NCBI NO: 18421491 NR Description: auxin-induced protein family [Arabidopsis
  misc_feature (15)..(402): Homolog of NCBI NO: 18086563 NR Description: AT4g17280/dl4675c [Arabidopsis thaliana]
  misc_feature (33)..(409): Homolog of NCBI NO: 24414270 NR Description: Putative membrane protein [Oryza sativa (japonica
  misc_feature (20)..(408): Homolog of NCBI NO: 15238124 NR Description: auxin-induced protein, putative [Arabidopsis
  misc_feature (23)..(411): Homolog of NCBI NO: 21593814 NR Description: unknown [Arabidopsis thaliana]
  misc_feature (23)..(411): Homolog of NCBI NO: 15235545 NR Description: auxin-induced protein, putative [Arabidopsis
  misc_feature (20)..(412): Homolog of NCBI NO: 18404500 NR Description: auxin-induced protein family [Arabidopsis
LHLLFIPPKAFTVTTSHPTMSSSSSVRISLSFIFLALLISPAVSQTCKSQTFSGDKTYPHCLDLPQLKAFLHYSYDASNTTLAVVFSAPPAKPGGWIAWAINPKATGMVGSQTLVAYKDPGNGVAVVKTLNISSYSSLIPSKLAFDVWDMKAEEAARDGGSLRIFARVKVPADLVAKGKVNQVWQVGPELGPGGMIGRHAFDSANLASMSSLDLKGDNSGGTISGGDEVNAKIKNRNIHGILNAVSWGILFPIGAIIARYMRVFDSADPAWFYLHVSCQFSAYVIGVAGWATGLKLGNESEGIRFSAHRNIGIALFTLATIQMFAMLLRPKKDHKYRFYWNIYHHGVGYAILTLGIINVFKGLNILKPQDTYKTAYIAVIAVLGGIALLLEAITWVVVLKRKSNNSMKPLRT

SEQ ID NO: 36363 - protein, 393 aa, Arabidopsis thaliana
  peptide (1)..(393): Ceres Seq. ID no. 13646087
  misc_feature (89)..(227): Pfam Name: Protein of unknown function (DUF568) Pfam Description: Protein of unknown function (DUF568)
  misc_feature (12)..(389): Homolog of NCBI NO: 13785207 NR Description: putative membrane protein [Solanum tuberosum]
  misc_feature (12)..(389): Homolog of NCBI NO: 13785213 NR Description: putative membrane protein [Solanum tuberosum]
  misc_feature (1)..(384): Homolog of NCBI NO: 21592781 NR Description: putative membrane protein [Arabidopsis thaliana]
  misc_feature (1)..(384): Homolog of NCBI NO: 18421491 NR Description: auxin-induced protein family [Arabidopsis
  misc_feature (1)..(383): Homolog of NCBI NO: 18086563 NR Description: AT4g17280/dl4675c [Arabidopsis thaliana]
  misc_feature (14)..(390): Homolog of NCBI NO: 24414270 NR Description: Putative membrane protein [Oryza sativa (japonica
  misc_feature (1)..(389): Homolog of NCBI NO: 15238124 NR Description: auxin-induced protein, putative [Arabidopsis
  misc_feature (4)..(392): Homolog of NCBI NO: 21593814 NR Description: unknown [Arabidopsis thaliana]
  misc_feature (4)..(392): Homolog of NCBI NO: 15235545 NR Description: auxin-induced protein, putative [Arabidopsis
  misc_feature (1)..(393): Homolog of NCBI NO: 18404500 NR Description: auxin-induced protein family [Arabidopsis
MSSSSSVRISLSFIFLALLISPAVSQTCKSQTFSGDKTYPHCLDLPQLKAFLHYSYDASNTTLAVVFSAPPAKPGGWIAWAINPKATGMVGSQTLVAYKDPGNGVAVVKTLNISSYSSLIPSKLAFDVWDMKAEEAARDGGSLRIFARVKVPADLVAKGKVNQVWQVGPELGPGGMIGRHAFDSANLASMSSLDLKGDNSGGTISGGDEVNAKIKNRNIHGILNAVSWGILFPIGAIIARYMRVFDSADPAWFYLHVSCQFSAYVIGVAGWATGLKLGNESEGIRFSAHRNIGIALFTLATIQMFAMLLRPKKDHKYRFYWNIYHHGVGYAILTLGIINVFKGLNILKPQDTYKTAYIAVIAVLGGIALLLEAITWVVVLKRKSNNSMKPLRT

SEQ ID NO: 36364 - protein, 305 aa, Arabidopsis thaliana
  peptide (1)..(305): Ceres Seq. ID no. 13646088
  misc_feature (1)..(139): Pfam Name: Protein of unknown function (DUF568) Pfam Description: Protein of unknown function (DUF568)
  misc_feature (1)..(301): Homolog of NCBI NO: 13785207 NR Description: putative membrane protein [Solanum tuberosum]
  misc_feature (1)..(301): Homolog of NCBI NO: 13785213 NR Description: putative membrane protein [Solanum tuberosum]
  misc_feature (1)..(296): Homolog of NCBI NO: 21592781 NR Description: putative membrane protein [Arabidopsis thaliana]
  misc_feature (1)..(296): Homolog of NCBI NO: 18421491 NR Description: auxin-induced protein family [Arabidopsis
  misc_feature (1)..(295): Homolog of NCBI NO: 18086563 NR Description: AT4g17280/dl4675c [Arabidopsis thaliana]
  misc_feature (1)..(302): Homolog of NCBI NO: 24414270 NR Description: Putative membrane protein [Oryza sativa (japonica
  misc_feature (1)..(301): Homolog of NCBI NO: 15238124 NR Description: auxin-induced protein, putative [Arabidopsis
  misc_feature (1)..(304): Homolog of NCBI NO: 21593814 NR Description: unknown [Arabidopsis thaliana]
  misc_feature (1)..(304): Homolog of NCBI NO: 15235545 NR Description: auxin-induced protein, putative [Arabidopsis
  misc_feature (1)..(305): Homolog of NCBI NO: 18404500 NR Description: auxin-induced protein family [Arabidopsis
MVGSQTLVAYKDPGNGVAVVKTLNISSYSSLIPSKLAFDVWDMKAEEAARDGGSLRIFARVKVPADLVAKGKVNQVWQVGPELGPGGMIGRHAFDSANLASMSSLDLKGDNSGGTISGGDEVNAKIKNRNIHGILNAVSWGILFPIGAIIARYMRVFDSADPAWFYLHVSCQFSAYVIGVAGWATGLKLGNESEGIRFSAHRNIGIALFTLATIQMFAMLLRPKKDHKYRFYWNIYHHGVGYAILTLGIINVFKGLNILKPQDTYKTAYIAVIAVLGGIALLLEAITWVVVLKRKSNNSMKPLRT

SEQ ID NO: 36365 - DNA, 1391 bp, Arabidopsis thaliana
  misc_feature (1)..(1391): Ceres Seq. ID no. 12336525
  misc_feature: MA Experiment ID: 108434 Result: Up-regulated in Transcription
  misc_feature: MA Experiment 108434 PARAMETER Experiment Name: At_Root_Tips_cDNA_P Parameter: Tissue Value: Root Tips
  misc_feature: MA Experiment ID: 108501 Result: Up-regulated in Transcription
  misc_feature: MA Experiment 108501 PARAMETER Experiment Name: At_ap2_floral_buds_cDNA_P Parameter: Plant Line Value: ap2 (Ler.)
  misc_feature: MA Experiment 108501 PARAMETER Experiment Name: At_ap2_floral_buds_cDNA_P Parameter: Tissue Value: Closed Flower
  misc_feature: MA Experiment ID: 108573 Result: Up-regulated in Transcription
  misc_feature: MA Experiment 108573 PARAMETER Experiment Name: At_Drought_cDNA_P Parameter: Timepoint (hr) Value: 6
  misc_feature: MA Experiment 108573 PARAMETER Experiment Name: At_Drought_cDNA_P Parameter: Tissue Value: Aerial
  misc_feature: MA Experiment 108573 PARAMETER Experiment Name: At_Drought_cDNA_P Parameter: Treatment Value: Drought vs. No Drought
  misc_feature: MA Experiment ID: 20000070 Result: Up-regulated in Transcription
  misc_feature: MA Experiment 20000070 PARAMETER Experiment Name: At_100uM_ABA_Mutants_cDNA_P Parameter: Plant Line Value: CS24
  misc_feature: MA Experiment 20000070 PARAMETER Experiment Name: At_100uM_ABA_Mutants_cDNA_P Parameter: Timepoint (hr) Value: 6
  misc_feature: MA Experiment 20000070 PARAMETER Experiment Name: At_100uM_ABA_Mutants_cDNA_P Parameter: Tissue Value: Aerial
  misc_feature: MA Experiment 20000070 PARAMETER Experiment Name: At_100uM_ABA_Mutants_cDNA_P Parameter: Treatment Value: 100uM ABA vs. No Treatment
  misc_feature: MA Experiment ID: 20000436 Result: Up-regulated in Transcription
  misc_feature: MA Experiment 20000436 PARAMETER Experiment Name: At_Drought_P Parameter: Age (day) Value: 7
  misc_feature: MA Experiment 20000436 PARAMETER Experiment Name: At_Drought_P Parameter: Organism Value: A. thaliana
  misc_feature: MA Experiment 20000436 PARAMETER Experiment Name: At_Drought_P Parameter: Plant Line Value: WS
  misc_feature: MA Experiment 20000436 PARAMETER Experiment Name: At_Drought_P Parameter: Timepoint (hr) Value: 12
  misc_feature: MA Experiment 20000436 PARAMETER Experiment Name: At_Drought_P Parameter: Tissue Value: Whole Plant
  misc_feature: MA Experiment 20000436 PARAMETER Experiment Name: At_Drought_P Parameter: Treatment Value: Drought vs. No Drought
  misc_feature: MA Experiment ID: 20000439 Result: Down-regulated in Transcription
  misc_feature: MA Experiment 20000439 PARAMETER Experiment Name: At_Roots__P Parameter: Age (day) Value: 14 vs. 21
  misc_feature: MA Experiment 20000439 PARAMETER Experiment Name: At_Roots__P Parameter: Organism Value: A. thaliana
  misc_feature: MA Experiment 20000439 PARAMETER Experiment Name: At_Roots__P Parameter: Tissue Value: Roots vs. Whole Plant
  misc_feature: MA Experiment ID: 20000495 Result: Up-regulated in Transcription
  misc_feature: MA Experiment 20000495 PARAMETER Experiment Name: At_Guard_Cells_P Parameter: Harvest Date Value: 8/2/2002
  misc_feature: MA Experiment 20000495 PARAMETER Experiment Name: At_Guard_Cells_P Parameter: Organism Value: A. thaliana
  misc_feature: MA Experiment 20000495 PARAMETER Experiment Name: At_Guard_Cells_P Parameter: Tissue Value: Guard Cells vs. Leaves
  misc_feature: MA Experiment ID: 20000574 Result: Down-regulated in Transcription
  misc_feature: MA Experiment 20000574 PARAMETER Experiment Name: At_100uM_ABA_Mutants__P Parameter: Organism Value: A. thaliana
  misc_feature: MA Experiment 20000574 PARAMETER Experiment Name: At_100uM_ABA_Mutants__P Parameter: Plant Line Value: CS23 vs. Ler wt
  misc_feature: MA Experiment 20000574 PARAMETER Experiment Name: At_100uM_ABA_Mutants__P Parameter: Timepoint (hr) Value: N/A
  misc_feature: MA Experiment 20000574 PARAMETER Experiment Name: At_100uM_ABA_Mutants__P Parameter: Tissue Value: Whole Plant
  misc_feature: MA Experiment 20000574 PARAMETER Experiment Name: At_100uM_ABA_Mutants__P Parameter: Treatment Value: None
  misc_feature: MA Experiment ID: 20001554 Result: Up-regulated in Transcription
  misc_feature: MA Experiment 20001554 PARAMETER Experiment Name: At_Drought_Soil_Dry_P Parameter: Age (day) Value: 21
  misc_feature: MA Experiment 20001554 PARAMETER Experiment Name: At_Drought_Soil_Dry_P Parameter: Organism Value: A. thaliana
  misc_feature: MA Experiment 20001554 PARAMETER Experiment Name: At_Drought_Soil_Dry_P Parameter: Plant Line Value: WS
  misc_feature: MA Experiment 20001554 PARAMETER Experiment Name: At_Drought_Soil_Dry_P Parameter: Post Timepoint (hr) Value: None
  misc_feature: MA Experiment 20001554 PARAMETER Experiment Name: At_Drought_Soil_Dry_P Parameter: Post-Treatment Value: None
  misc_feature: MA Experiment 20001554 PARAMETER Experiment Name: At_Drought_Soil_Dry_P Parameter: Timepoint (day) Value: 7
  misc_feature: MA Experiment 20001554 PARAMETER Experiment Name: At_Drought_Soil_Dry_P Parameter: Treatment Value: Drought vs. No Drought
  misc_feature: MA Experiment ID: 20001555 Result: Up-regulated in Transcription
  misc_feature: MA Experiment 20001555 PARAMETER Experiment Name: At_Drought_Soil_Dry_P Parameter: Age (day) Value: 24
  misc_feature: MA Experiment 20001555 PARAMETER Experiment Name: At_Drought_Soil_Dry_P Parameter: Organism Value: A. thaliana
  misc_feature: MA Experiment 20001555 PARAMETER Experiment Name: At_Drought_Soil_Dry_P Parameter: Plant Line Value: WS
  misc_feature: MA Experiment 20001555 PARAMETER Experiment Name: At_Drought_Soil_Dry_P Parameter: Post Timepoint (hr) Value: None
  misc_feature: MA Experiment 20001555 PARAMETER Experiment Name: At_Drought_Soil_Dry_P Parameter: Post-Treatment Value: None
  misc_feature: MA Experiment 20001555 PARAMETER Experiment Name: At_Drought_Soil_Dry_P Parameter: Timepoint (day) Value: 10
  misc_feature: MA Experiment 20001555 PARAMETER Experiment Name: At_Drought_Soil_Dry_P Parameter: Treatment Value: Drought vs. No Drought
  misc_feature: MA Experiment ID: 20001556 Result: Up-regulated in Transcription
  misc_feature: MA Experiment 20001556 PARAMETER Experiment Name: At_Drought_Soil_Dry_P Parameter: Age (day) Value: 26
  misc_feature: MA Experiment 20001556 PARAMETER Experiment Name: At_Drought_Soil_Dry_P Parameter: Organism Value: A. thaliana
  misc_feature: MA Experiment 20001556 PARAMETER Experiment Name: At_Drought_Soil_Dry_P Parameter: Plant Line Value: WS
  misc_feature: MA Experiment 20001556 PARAMETER Experiment Name: At_Drought_Soil_Dry_P Parameter: Post Timepoint (hr) Value: None
  misc_feature: MA Experiment 20001556 PARAMETER Experiment Name: At_Drought_Soil_Dry_P Parameter: Post-Treatment Value: None
  misc_feature: MA Experiment 20001556 PARAMETER Experiment Name: At_Drought_Soil_Dry_P Parameter: Timepoint (day) Value: 12
  misc_feature: MA Experiment 20001556 PARAMETER Experiment Name: At_Drought_Soil_Dry_P Parameter: Treatment Value: Drought vs. No Drought
aggtccgtcgcttctcttccatttcttctcattttcgattttgattcttatttctttccagtagctcctgctctgtgaatttctccgctcacgatagatctgcttatactccttacattcaaccttagatctgaaacatgggtgcaggtggaagaatgccggttcctacttcttccaagaaatcggaaaccgacaccacaaagcgtgtgccgtgcgagaaaccgcctttctcggtgggagatctgaagaaagcaatcccgccgcattgtttcaaacgctcaatccctcgctctttctcctaccttatcagtgacatcattatagcctcatgcttctactacgtcgccaccaattacttctctctcctccctcagcctctctcttacttggcttggccactctattgggcctgtcaaggctgtgtcctaactggtatctgggtcatagcccacgaatgcggtcaccacgcattcagcgactaccaatggctggatgacacagttggtcttatcttccattccttcctcctcgtcccttacttctcctggaagtatagtcatcgccgtcaccattccaacactggatccctcgaaagagatgaagtatttgtcccaaagcagaaatcagcaatcaagtggtacgggaaatacctcaacaaccctcttggacgcatcatgatgttaaccgtccagtttgtcctcgggtggcccttgtacttagcctttaacgtctctggcagaccgtatgacgggttcgcttgccatttcttccccaacgctcccatctacaatgaccgagaacgcctccagatatacctctctgatgcgggtattctagccgtctgttttggtctttaccgttacgctgctgcacaagggatggcctcgatgatctgcctctacggagtaccgcttctgatagtgaatgcgttcctcgtcttgatcacttacttgcagcacactcatccctcgttgcctcactacgattcatcagagtgggactggctcaggggagctttggctaccgtagacagagactacggaatcttgaacaaggtgttccacaacattacagacacacacgtggctcatcacctgttctcgacaatgccgcattataacgcaatggaagctacaaaggcgataaagccaattctggggagaccattaccagttcgatggaacaccgtggtatgtggcgatgtatagggaggcaaaggagtgtatctatgtagaaccggacagggaaggtgacaagaaaggtgtgtactggtacaacaataagttatgaggatgatggtgaagaaattgtcgacttttctcttgtctgtttgtcttttgttaaagaagctatgcttcgttttaataatcttattgtccattttgttgtgc

SEQ ID NO: 36366 - protein, 356 aa, Arabidopsis thaliana
  peptide (1)..(356): Ceres Seq. ID no. 12336526
  misc_feature (89)..(340): Pfam Name: Fatty acid desaturase Pfam Description: Fatty acid desaturase
  misc_feature (1)..(341): Homolog of NCBI NO: 3417601 NR Description: delta-12 fatty acid desaturase [Borago
  misc_feature (1)..(341): Homolog of NCBI NO: 17225582 NR Description: delta-12 fatty acid desaturase [Gossypium
  misc_feature (1)..(341): Homolog of NCBI NO: 27261181 NR Description: delta 12 oleic acid desaturase FAD2 [Vernicia
  misc_feature (1)..(341): Homolog of NCBI NO: 3452129 NR Description: bifunctional oleate 12-hydroxylase:desaturase
  misc_feature (1)..(341): Homolog of NCBI NO: 8705229 NR Description: delta-12 oleate desaturase [Brassica napus]
  misc_feature (1)..(341): Homolog of NCBI NO: 20520624 NR Description: fatty acid desaturase 2 [Brassica rapa]
  misc_feature (1)..(341): Homolog of NCBI NO: 3334184 NR Description: Omega-6 fatty acid desaturase, endoplasmic
  misc_feature (1)..(341): Homolog of NCBI NO: 4378875 NR Description: delta-12 desaturase [Brassica carinata]
  misc_feature (1)..(341): Homolog of NCBI NO: 21536781 NR Description: omega-6 fatty acid desaturase, endoplasmic
  misc_feature (1)..(341): Homolog of NCBI NO: 15229956 NR Description: omega-6 fatty acid desaturase, endoplasmic
MGAGGRMPVPTSSKKSETDTTKRVPCEKPPFSVGDLKKAIPPHCFKRSIPRSFSYLISDIIIASCFYYVATNYFSLLPQPLSYLAWPLYWACQGCVLTGIWVIAHECGHHAFSDYQWLDDTVGLIFHSFLLVPYFSWKYSHRRHHSNTGSLERDEVFVPKQKSAIKWYGKYLNNPLGRIMMLTVQFVLGWPLYLAFNVSGRPYDGFACHFFPNAPIYNDRERLQIYLSDAGILAVCFGLYRYAAAQGMASMICLYGVPLLIVNAFLVLITYLQHTHPSLPHYDSSEWDWLRGALATVDRDYGILNKVFHNITDTHVAHHLFSTMPHYNAMEATKAIKPILGRPLPVRWNTVVCGDV

SEQ ID NO: 36367 - protein, 350 aa, Arabidopsis thaliana
  peptide (1)..(350): Ceres Seq. ID no. 12336527
  misc_feature (83)..(334): Pfam Name: Fatty acid desaturase Pfam Description: Fatty acid desaturase
  misc_feature (1)..(335): Homolog of NCBI NO: 3417601 NR Description: delta-12 fatty acid desaturase [Borago
  misc_feature (1)..(335): Homolog of NCBI NO: 17225582 NR Description: delta-12 fatty acid desaturase [Gossypium
  misc_feature (1)..(335): Homolog of NCBI NO: 27261181 NR Description: delta 12 oleic acid desaturase FAD2 [Vernicia
  misc_feature (1)..(335): Homolog of NCBI NO: 3452129 NR Description: bifunctional oleate 12-hydroxylase:desaturase
  misc_feature (1)..(335): Homolog of NCBI NO: 8705229 NR Description: delta-12 oleate desaturase [Brassica napus]
  misc_feature (1)..(335): Homolog of NCBI NO: 20520624 NR Description: fatty acid desaturase 2 [Brassica rapa]
  misc_feature (1)..(335): Homolog of NCBI NO: 3334184 NR Description: Omega-6 fatty acid desaturase, endoplasmic
  misc_feature (1)..(335): Homolog of NCBI NO: 4378875 NR Description: delta-12 desaturase [Brassica carinata]
  misc_feature (1)..(335): Homolog of NCBI NO: 21536781 NR Description: omega-6 fatty acid desaturase, endoplasmic
  misc_feature (1)..(335): Homolog of NCBI NO: 15229956 NR Description: omega-6 fatty acid desaturase, endoplasmic
MPVPTSSKKSETDTTKRVPCEKPPFSVGDLKKAIPPHCFKRSIPRSFSYLISDIIIASCFYYVATNYFSLLPQPLSYLAWPLYWACQGCVLTGIWVIAHECGHHAFSDYQWLDDTVGLIFHSFLLVPYFSWKYSHRRHHSNTGSLERDEVFVPKQKSAIKWYGKYLNNPLGRIMMLTVQFVLGWPLYLAFNVSGRPYDGFACHFFPNAPIYNDRERLQIYLSDAGILAVCFGLYRYAAAQGMASMICLYGVPLLIVNAFLVLITYLQHTHPSLPHYDSSEWDWLRGALATVDRDYGILNKVFHNITDTHVAHHLFSTMPHYNAMEATKAIKPILGRPLPVRWNTVVCGDV

SEQ ID NO: 36368 - DNA, 1053 bp, Arabidopsis thaliana
  misc_feature (1)..(1053): Ceres Seq. ID no. 13580576
  misc_feature: MA Experiment ID: 20000179 Result: Up-regulated in Transcription
  misc_feature: MA Experiment 20000179 PARAMETER Experiment Name: At_Germinating_Seeds_P Parameter: Age (hr) Value: 6 vs. 0
  misc_feature: MA Experiment 20000179 PARAMETER Experiment Name: At_Germinating_Seeds_P Parameter: Tissue Value: Germinating Seeds
  misc_feature: MA Experiment ID: 20000180 Result: Up-regulated in Transcription
  misc_feature: MA Experiment 20000180 PARAMETER Experiment Name: At_Germinating_Seeds_P Parameter: Age (hr) Value: 24 vs. 0
  misc_feature: MA Experiment 20000180 PARAMETER Experiment Name: At_Germinating_Seeds_P Parameter: Tissue Value: Germinating Seeds
  misc_feature: MA Experiment ID: 20000227 Result: Down-regulated in Transcription
  misc_feature: MA Experiment 20000227 PARAMETER Experiment Name: At_Root-Tips-vs-Tops_P Parameter: Tissue Value: Root Tips vs. Root Tops
  misc_feature: MA Experiment ID: 20000286 Result: Down-regulated in Transcription
  misc_feature: MA Experiment 20000286 PARAMETER Experiment Name: At_Open_Flower_P Parameter: Age (day) Value: 21
  misc_feature: MA Experiment 20000286 PARAMETER Experiment Name: At_Open_Flower_P Parameter: Plant Line Value: WS
  misc_feature: MA Experiment 20000286 PARAMETER Experiment Name: At_Open_Flower_P Parameter: Tissue Value: Half Open vs. Whole Plant
aaaagaggaccaaaaggtcaaaaacgaataaactgtatctctcattcgccggagtttccagccgtttctttccgattctcggatttttcctgggaatcaaacgcatcgccgagaatcggaagagagggataaggttatggctcctcatggagatggattaagtgacatcgaagaacctgaggtcgatgctcaatcggagattcttcgaccgatctcctcagtcgtcttcgtcatcgctatgcaagcggaggctcttcctttggtcaacaagttcggactctctgaaactactgattcgccgcttggtaaaggattgccctgggttctgtatcacggcgtgcataaagatcttcgaatcaatgtagtttgccccggaagagatgcagctttagggatcgatagtgttggaactgttccagcttctctcataacttttgcttccatccaagcattaaaacctgacatcataatcaatgccggaacctgcggtggcttcaaggtcaaaggagccaacataggcgatgtattccttgtatctgatgttgtgtttcatgatagaagaataccaattccgatgtttgatctgtatggagttggtctccgtcaggcattctcgacacccaatctcctcaaggaactcaatttgaagattggcaggttatctactggtgactcgttggatatgtccacgcaagatgaaacattgatcattgccaatgatgctacgctaaaggacatggagggtgctgccgtggcgtatgtggctgatcttctgaaaataccagtcgtgttcctcaaagccgtgaccgatctagtggacggagataaacctacagcagaagagttcttgcagaacttgacagttgtgaccgctgcattagagggaactgctactaaagtgatcaacttcatcaatgggagaaacctttcggacctttaacttctgttctcttccttttttatggagagtgattttttaaaatgcgttcaacgtgcttgttgcagtttcactgatttccagtgatcatatttctcgttaataaatttcaagtt

SEQ ID NO: 36369 - protein, 267 aa, Arabidopsis thaliana
  peptide (1)..(267): Ceres Seq. ID no. 13580577
  misc_feature (28)..(252): Pfam Name: Phosphorylase family Pfam Description: Phosphorylase family
  misc_feature (80)..(232): Homolog of NCBI NO: 24372900 NR Description: 5-methylthioadenosine
  misc_feature (80)..(248): Homolog of NCBI NO: 16273135 NR Description: pfs protein [Haemophilus influenzae Rd]
  misc_feature (81)..(238): Homolog of NCBI NO: 23467396 NR Description: hypothetical protein [Haemophilus somnus 129PT]
  misc_feature (80)..(259): Homolog of NCBI NO: 23037085 NR Description: hypothetical protein [Oenococcus oeni MCW]
  misc_feature (68)..(267): Homolog of NCBI NO: 7486865 NR Description: hypothetical protein T11I11.80 - Arabidopsis
  misc_feature (24)..(267): Homolog of NCBI NO: 30690140 NR Description: expressed protein [Arabidopsis thaliana]
  misc_feature (1)..(267): Homolog of NCBI NO: 18087497 NR Description: methylthioadenosine/S-adenosyl homocysteine
  misc_feature (1)..(267): Homolog of NCBI NO: 34897892 NR Description: ESTs C28489(C61317),AU031689(R0560) correspond to region of the predicted gene.~Similar to Arabidopsis thaliana DNA
  misc_feature (1)..(267): Homolog of NCBI NO: 7406708 NR Description: putative ripening-related protein [Vitis vinifera]
  misc_feature (1)..(267): Homolog of NCBI NO: 15234791 NR Description: expressed protein [Arabidopsis thaliana]
MAPHGDGLSDIEEPEVDAQSEILRPISSVVFVIAMQAEALPLVNKFGLSETTDSPLGKGLPWVLYHGVHKDLRINVVCPGRDAALGIDSVGTVPASLITFASIQALKPDIIINAGTCGGFKVKGANIGDVFLVSDVVFHDRRIPIPMFDLYGVGLRQAFSTPNLLKELNLKIGRLSTGDSLDMSTQDETLIIANDATLKDMEGAAVAYVADLLKIPVVFLKAVTDLVDGDKPTAEEFLQNLTVVTAALEGTATKVINFINGRNLSDL

SEQ ID NO: 36370 - protein, 233 aa, Arabidopsis thaliana
  peptide (1)..(233): Ceres Seq. ID no. 13580578
  misc_feature (1)..(218): Pfam Name: Phosphorylase family Pfam Description: Phosphorylase family
  misc_feature (46)..(198): Homolog of NCBI NO: 24372900 NR Description: 5-methylthioadenosine
  misc_feature (46)..(214): Homolog of NCBI NO: 16273135 NR Description: pfs protein [Haemophilus influenzae Rd]
  misc_feature (47)..(204): Homolog of NCBI NO: 23467396 NR Description: hypothetical protein [Haemophilus somnus 129PT]
  misc_feature (46)..(225): Homolog of NCBI NO: 23037085 NR Description: hypothetical protein [Oenococcus oeni MCW]
  misc_feature (34)..(233): Homolog of NCBI NO: 7486865 NR Description: hypothetical protein T11I11.80 - Arabidopsis
  misc_feature (1)..(233): Homolog of NCBI NO: 30690140 NR Description: expressed protein [Arabidopsis thaliana]
  misc_feature (1)..(233): Homolog of NCBI NO: 18087497 NR Description: methylthioadenosine/S-adenosyl homocysteine
  misc_feature (1)..(233): Homolog of NCBI NO: 34897892 NR Description: ESTs C28489(C61317),AU031689(R0560) correspond to region of the predicted gene.~Similar to Arabidopsis thaliana DNA
  misc_feature (1)..(233): Homolog of NCBI NO: 7406708 NR Description: putative ripening-related protein [Vitis vinifera]
  misc_feature (1)..(233): Homolog of NCBI NO: 15234791 NR Description: expressed protein [Arabidopsis thaliana]
MQAEALPLVNKFGLSETTDSPLGKGLPWVLYHGVHKDLRINVVCPGRDAALGIDSVGTVPASLITFASIQALKPDIIINAGTCGGFKVKGANIGDVFLVSDVVFHDRRIPIPMFDLYGVGLRQAFSTPNLLKELNLKIGRLSTGDSLDMSTQDETLIIANDATLKDMEGAAVAYVADLLKIPVVFLKAVTDLVDGDKPTAEEFLQNLTVVTAALEGTATKVINFINGRNLSDL

SEQ ID NO: 36371 - DNA, 1160 bp, Arabidopsis thaliana
  misc_feature (1)..(1160): Ceres Seq. ID no. 13509186
  misc_feature: MA Experiment ID: 108573 Result: Up-regulated in Transcription
  misc_feature: MA Experiment 108573 PARAMETER Experiment Name: At_Drought_cDNA_P Parameter: Timepoint (hr) Value: 6
  misc_feature: MA Experiment 108573 PARAMETER Experiment Name: At_Drought_cDNA_P Parameter: Tissue Value: Aerial
  misc_feature: MA Experiment 108573 PARAMETER Experiment Name: At_Drought_cDNA_P Parameter: Treatment Value: Drought vs. No Drought
  misc_feature: MA Experiment ID: 108579 Result: Up-regulated in Transcription
  misc_feature: MA Experiment 108579 PARAMETER Experiment Name: At_4deg_Cold_cDNA_P Parameter: Temperature (deg C) Value: 4 vs. 22
  misc_feature: MA Experiment 108579 PARAMETER Experiment Name: At_4deg_Cold_cDNA_P Parameter: Timepoint (hr) Value: 6
  misc_feature: MA Experiment 108579 PARAMETER Experiment Name: At_4deg_Cold_cDNA_P Parameter: Tissue Value: Aerial
  misc_feature: MA Experiment ID: 108585 Result: Up-regulated in Transcription
  misc_feature: MA Experiment 108585 PARAMETER Experiment Name: At_5mM_NaNP_cDNA_P Parameter: Timepoint (hr) Value: 6
  misc_feature: MA Experiment 108585 PARAMETER Experiment Name: At_5mM_NaNP_cDNA_P Parameter: Tissue Value: Aerial
  misc_feature: MA Experiment 108585 PARAMETER Experiment Name: At_5mM_NaNP_cDNA_P Parameter: Treatment Value: null
  misc_feature: MA Experiment ID: 108607 Result: Up-regulated in Transcription
  misc_feature: MA Experiment 108607 PARAMETER Experiment Name: At_100uM_ABA_cDNA_P Parameter: Timepoint (hr) Value: 4
  misc_feature: MA Experiment 108607 PARAMETER Experiment Name: At_100uM_ABA_cDNA_P Parameter: Tissue Value: Aerial
  misc_feature: MA Experiment 108607 PARAMETER Experiment Name: At_100uM_ABA_cDNA_P Parameter: Treatment Value: 100uM ABA vs. No Treatment
  misc_feature: MA Experiment ID: 108608 Result: Up-regulated in Transcription
  misc_feature: MA Experiment 108608 PARAMETER Experiment Name: At_100uM_ABA_cDNA_P Parameter: Timepoint (hr) Value: 1
  misc_feature: MA Experiment 108608 PARAMETER Experiment Name: At_100uM_ABA_cDNA_P Parameter: Tissue Value: Aerial
  misc_feature: MA Experiment 108608 PARAMETER Experiment Name: At_100uM_ABA_cDNA_P Parameter: Treatment Value: 100uM ABA vs. No Treatment
  misc_feature: MA Experiment ID: 108668 Result: Up-regulated in Transcription
  misc_feature: MA Experiment 108668 PARAMETER Experiment Name: At_2mM_SA_cDNA_P Parameter: Plant Line Value: WS
  misc_feature: MA Experiment 108668 PARAMETER Experiment Name: At_2mM_SA_cDNA_P Parameter: Timepoint (hr) Value: 6
  misc_feature: MA Experiment 108668 PARAMETER Experiment Name: At_2mM_SA_cDNA_P Parameter: Treatment Value: 2mM SA vs. No Treatment
  misc_feature: MA Experiment ID: 20000166 Result: Up-regulated in Transcription
  misc_feature: MA Experiment 20000166 PARAMETER Experiment Name: At_100uM_ABA_P Parameter: Age (day) Value: 14
  misc_feature: MA Experiment 20000166 PARAMETER Experiment Name: At_100uM_ABA_P Parameter: Organism Value: A. thaliana
  misc_feature: MA Experiment 20000166 PARAMETER Experiment Name: At_100uM_ABA_P Parameter: Plant Line Value: WS
  misc_feature: MA Experiment 20000166 PARAMETER Experiment Name: At_100uM_ABA_P Parameter: Timepoint (hr) Value: 1
  misc_feature: MA Experiment 20000166 PARAMETER Experiment Name: At_100uM_ABA_P Parameter: Tissue Value: Aerial
  misc_feature: MA Experiment 20000166 PARAMETER Experiment Name: At_100uM_ABA_P Parameter: Treatment Value: 100uM ABA vs. No Treatment
  misc_feature: MA Experiment ID: 20000173 Result: Up-regulated in Transcription
  misc_feature: MA Experiment 20000173 PARAMETER Experiment Name: At_42deg_Heat_P Parameter: Age (day) Value: 14
  misc_feature: MA Experiment 20000173 PARAMETER Experiment Name: At_42deg_Heat_P Parameter: Organism Value: A. thaliana
  misc_feature: MA Experiment 20000173 PARAMETER Experiment Name: At_42deg_Heat_P Parameter: Plant Line Value: WS
  misc_feature: MA Experiment 20000173 PARAMETER Experiment Name: At_42deg_Heat_P Parameter: Temperature (deg C) Value: 42 vs. 22
  misc_feature: MA Experiment 20000173 PARAMETER Experiment Name: At_42deg_Heat_P Parameter: Timepoint (hr) Value: 6
  misc_feature: MA Experiment 20000173 PARAMETER Experiment Name: At_42deg_Heat_P Parameter: Tissue Value: Aerial
  misc_feature: MA Experiment ID: 20000182 Result: Up-regulated in Transcription
  misc_feature: MA Experiment 20000182 PARAMETER Experiment Name: At_2mM_SA_P Parameter: Age (day) Value: 14
  misc_feature: MA Experiment 20000182 PARAMETER Experiment Name: At_2mM_SA_P Parameter: Organism Value: A. thaliana
  misc_feature: MA Experiment 20000182 PARAMETER Experiment Name: At_2mM_SA_P Parameter: Plant Line Value: WS
  misc_feature: MA Experiment 20000182 PARAMETER Experiment Name: At_2mM_SA_P Parameter: Timepoint (hr) Value: 6
  misc_feature: MA Experiment 20000182 PARAMETER Experiment Name: At_2mM_SA_P Parameter: Tissue Value: Aerial
  misc_feature: MA Experiment 20000182 PARAMETER Experiment Name: At_2mM_SA_P Parameter: Treatment Value: 2mM SA vs. No Treatment
  misc_feature: MA Experiment ID: 20000436 Result: Up-regulated in Transcription
  misc_feature: MA Experiment 20000436 PARAMETER Experiment Name: At_Drought_P Parameter: Age (day) Value: 7
  misc_feature: MA Experiment 20000436 PARAMETER Experiment Name: At_Drought_P Parameter: Organism Value: A. thaliana
  misc_feature: MA Experiment 20000436 PARAMETER Experiment Name: At_Drought_P Parameter: Plant Line Value: WS
  misc_feature: MA Experiment 20000436 PARAMETER Experiment Name: At_Drought_P Parameter: Timepoint (hr) Value: 12
  misc_feature: MA Experiment 20000436 PARAMETER Experiment Name: At_Drought_P Parameter: Tissue Value: Whole Plant
  misc_feature: MA Experiment 20000436 PARAMETER Experiment Name: At_Drought_P Parameter: Treatment Value: Drought vs. No Drought
  misc_feature: MA Experiment ID: 20000437 Result: Up-regulated in Transcription
  misc_feature: MA Experiment 20000437 PARAMETER Experiment Name: At_Drought_P Parameter: Age (day) Value: 8
  misc_feature: MA Experiment 20000437 PARAMETER Experiment Name: At_Drought_P Parameter: Organism Value: A. thaliana
  misc_feature: MA Experiment 20000437 PARAMETER Experiment Name: At_Drought_P Parameter: Plant Line Value: WS
  misc_feature: MA Experiment 20000437 PARAMETER Experiment Name: At_Drought_P Parameter: Timepoint (hr) Value: 24
  misc_feature: MA Experiment 20000437 PARAMETER Experiment Name: At_Drought_P Parameter: Tissue Value: Whole Plant
  misc_feature: MA Experiment 20000437 PARAMETER Experiment Name: At_Drought_P Parameter: Treatment Value: Drought vs. No Drought
  misc_feature: MA Experiment ID: 20001905 Result: Up-regulated in Transcription
  misc_feature: MA Experiment 20001905 PARAMETER Experiment Name: At_Drought_Reproduction_P Parameter: Age (day) Value: 40
  misc_feature: MA Experiment 20001905 PARAMETER Experiment Name: At_Drought_Reproduction_P Parameter: Organism Value: A. thaliana
  misc_feature: MA Experiment 20001905 PARAMETER Experiment Name: At_Drought_Reproduction_P Parameter: Plant Line Value: WS
  misc_feature: MA Experiment 20001905 PARAMETER Experiment Name: At_Drought_Reproduction_P Parameter: Timepoint (day) Value: 10
  misc_feature: MA Experiment 20001905 PARAMETER Experiment Name: At_Drought_Reproduction_P Parameter: Tissue Value: Rosettes
  misc_feature: MA Experiment 20001905 PARAMETER Experiment Name: At_Drought_Reproduction_P Parameter: Treatment Value: Drought vs. No Drought
  misc_feature: MA Experiment ID: 20001911 Result: Up-regulated in Transcription
  misc_feature: MA Experiment 20001911 PARAMETER Experiment Name: At_Drought_Reproduction_P Parameter: Age (day) Value: 40
  misc_feature: MA Experiment 20001911 PARAMETER Experiment Name: At_Drought_Reproduction_P Parameter: Organism Value: A. thaliana
  misc_feature: MA Experiment 20001911 PARAMETER Experiment Name: At_Drought_Reproduction_P Parameter: Plant Line Value: WS
  misc_feature: MA Experiment 20001911 PARAMETER Experiment Name: At_Drought_Reproduction_P Parameter: Timepoint (day) Value: 10
  misc_feature: MA Experiment 20001911 PARAMETER Experiment Name: At_Drought_Reproduction_P Parameter: Tissue Value: Flowers
  misc_feature: MA Experiment 20001911 PARAMETER Experiment Name: At_Drought_Reproduction_P Parameter: Treatment Value: Drought vs. No Drought
aaaaactttgggaagcagctaaaatactgtgttctttatttcttccatcgaaatcgaaaaaagctaagatctttgcgttttgaaacgatggcggaagaacataagcatgatgaatctgtgatcgctcctgagccagctgttgaggttgtggagagagaatcgttgatggataagaagaagaagactaagaagccctcttctccttcgtcttctatgaaatcgaaagtttaccgcttgttcggacgagagcagcctgttcataaggttctcggcggtggaaagccggctgatatattcatgtggaagaacaagaagatgtctggtggtgtacttggtggtgctacagctgctttggttgtgtttgaattgatggagtaccatcttctcactctgctttgccacgtgatgattgttgttctcgctgtgctgtttttgtggtctaatgccgctatgttcattaacaagtccccaccaaagattcctgaagttcatatccctgaagaacctattcttcagcttgcgtctgggctcagaatcgagatcaaccgtggattctcttctctccgtgaaattgcatcaggaagggatctcaagaaattcctcattgctattgccgggttatgggttctctcaatcttgggcggttgcttcaacttcttgacattggcatacatagctcttgtgttgctcttcacggttcctcttgcctacgacaagtatgaagacaaagtcgacccattaggtgagaaagcaatgatcgagctcaagaagcagtatgcagtgttggatgagaaggtgttgagcaagatcccacttgggccgttgaagaacaagaagaaagattaggggtttacacaaggttgtccgtggctagcaaaacgggtgttgtgaaatggtatcgaagtaatgtgttttgggcgtttttttaggtggctctttcggttatgtgaatgaacttggaattttcctgactggtttgttctgttgtttatgtcattgttgatcagcgtcgagggataaaagtagtgatatttcttctctctctaagcctctatataactaagaatttcaagatatttgaattttgcaatctcgtggttaatgttgttctttctctatattctcctctttcattacatttgtaaaatggaatcaatgtc

SEQ ID NO: 36372 - protein, 281 aa, Arabidopsis thaliana
  peptide (1)..(281): Ceres Seq. ID no. 13509187
  misc_feature (41)..(271): Homolog of NCBI NO: 15234108 NR Description: hypothetical protein [Arabidopsis thaliana]
  misc_feature (30)..(280): Homolog of NCBI NO: 18406991 NR Description: expressed protein [Arabidopsis thaliana]
  misc_feature (31)..(279): Homolog of NCBI NO: 34904202 NR Description: P0492F05.25 [Oryza sativa (japonica
  misc_feature (33)..(279): Homolog of NCBI NO: 34909318 NR Description: OSJNBb0021A09.5 [Oryza sativa (japonica
  misc_feature (30)..(281): Homolog of NCBI NO: 15222616 NR Description: expressed protein [Arabidopsis thaliana]
  misc_feature (30)..(281): Homolog of NCBI NO: 15238125 NR Description: expressed protein [Arabidopsis thaliana]
  misc_feature (30)..(71): Homolog of NCBI NO: 15237093 NR Description: expressed protein [Arabidopsis thaliana]
  misc_feature (57)..(281): Homolog of NCBI NO: 15237093 NR Description: expressed protein [Arabidopsis thaliana]
  misc_feature (30)..(74): Homolog of NCBI NO: 15236556 NR Description: expressed protein [Arabidopsis thaliana]
  misc_feature (57)..(281): Homolog of NCBI NO: 15236556 NR Description: expressed protein [Arabidopsis thaliana]
KNFGKQLKYCVLYFFHRNRKKLRSLRFETMAEEHKHDESVIAPEPAVEVVERESLMDKKKKTKKPSSPSSSMKSKVYRLFGREQPVHKVLGGGKPADIFMWKNKKMSGGVLGGATAALVVFELMEYHLLTLLCHVMIVVLAVLFLWSNAAMFINKSPPKIPEVHIPEEPILQLASGLRIEINRGFSSLREIASGRDLKKFLIAIAGLWVLSILGGCFNFLTLAYIALVLLFTVPLAYDKYEDKVDPLGEKAMIELKKQYAVLDEKVLSKIPLGPLKNKKKD

SEQ ID NO: 36373 - protein, 252 aa, Arabidopsis thaliana
  peptide (1)..(252): Ceres Seq. ID no. 13509188
  misc_feature (12)..(242): Homolog of NCBI NO: 15234108 NR Description: hypothetical protein [Arabidopsis thaliana]
  misc_feature (1)..(251): Homolog of NCBI NO: 18406991 NR Description: expressed protein [Arabidopsis thaliana]
  misc_feature (2)..(250): Homolog of NCBI NO: 34904202 NR Description: P0492F05.25 [Oryza sativa (japonica
  misc_feature (4)..(250): Homolog of NCBI NO: 34909318 NR Description: OSJNBb0021A09.5 [Oryza sativa (japonica
  misc_feature (1)..(252): Homolog of NCBI NO: 15222616 NR Description: expressed protein [Arabidopsis thaliana]
  misc_feature (1)..(252): Homolog of NCBI NO: 15238125 NR Description: expressed protein [Arabidopsis thaliana]
  misc_feature (1)..(42): Homolog of NCBI NO: 15237093 NR Description: expressed protein [Arabidopsis thaliana]
  misc_feature (28)..(252): Homolog of NCBI NO: 15237093 NR Description: expressed protein [Arabidopsis thaliana]
  misc_feature (1)..(45): Homolog of NCBI NO: 15236556 NR Description: expressed protein [Arabidopsis thaliana]
  misc_feature (28)..(252): Homolog of NCBI NO: 15236556 NR Description: expressed protein [Arabidopsis thaliana]
MAEEHKHDESVIAPEPAVEVVERESLMDKKKKTKKPSSPSSSMKSKVYRLFGREQPVHKVLGGGKPADIFMWKNKKMSGGVLGGATAALVVFELMEYHLLTLLCHVMIVVLAVLFLWSNAAMFINKSPPKIPEVHIPEEPILQLASGLRIEINRGFSSLREIASGRDLKKFLIAIAGLWVLSILGGCFNFLTLAYIALVLLFTVPLAYDKYEDKVDPLGEKAMIELKKQYAVLDEKVLSKIPLGPLKNKKKD

SEQ ID NO: 36374 - protein, 226 aa, Arabidopsis thaliana
  peptide (1)..(226): Ceres Seq. ID no. 13509189
  misc_feature (1)..(216): Homolog of NCBI NO: 15234108 NR Description: hypothetical protein [Arabidopsis thaliana]
  misc_feature (1)..(225): Homolog of NCBI NO: 18406991 NR Description: expressed protein [Arabidopsis thaliana]
  misc_feature (1)..(224): Homolog of NCBI NO: 34904202 NR Description: P0492F05.25 [Oryza sativa (japonica
  misc_feature (1)..(224): Homolog of NCBI NO: 34909318 NR Description: OSJNBb0021A09.5 [Oryza sativa (japonica
  misc_feature (1)..(226): Homolog of NCBI NO: 15222616 NR Description: expressed protein [Arabidopsis thaliana]
  misc_feature (1)..(226): Homolog of NCBI NO: 15238125 NR Description: expressed protein [Arabidopsis thaliana]
  misc_feature (1)..(16): Homolog of NCBI NO: 15237093 NR Description: expressed protein [Arabidopsis thaliana]
  misc_feature (2)..(226): Homolog of NCBI NO: 15237093 NR Description: expressed protein [Arabidopsis thaliana]
  misc_feature (1)..(19): Homolog of NCBI NO: 15236556 NR Description: expressed protein [Arabidopsis thaliana]
  misc_feature (2)..(226): Homolog of NCBI NO: 15236556 NR Description: expressed protein [Arabidopsis thaliana]
MDKKKKTKKPSSPSSSMKSKVYRLFGREQPVHKVLGGGKPADIFMWKNKKMSGGVLGGATAALVVFELMEYHLLTLLCHVMIVVLAVLFLWSNAAMFINKSPPKIPEVHIPEEPILQLASGLRIEINRGFSSLREIASGRDLKKFLIAIAGLWVLSILGGCFNFLTLAYIALVLLFTVPLAYDKYEDKVDPLGEKAMIELKKQYAVLDEKVLSKIPLGPLKNKKKD

SEQ ID NO: 36375 - DNA, 892 bp, Arabidopsis thaliana
  misc_feature (1)..(892): Ceres Seq. ID no. 12558745
  misc_feature: MA Experiment ID: 20000180 Result: Up-regulated in Transcription
  misc_feature: MA Experiment 20000180 PARAMETER Experiment Name: At_Germinating_Seeds_P Parameter: Age (hr) Value: 24 vs. 0
  misc_feature: MA Experiment 20000180 PARAMETER Experiment Name: At_Germinating_Seeds_P Parameter: Tissue Value: Germinating Seeds
  misc_feature: MA Experiment ID: 20000182 Result: Down-regulated in Transcription
  misc_feature: MA Experiment 20000182 PARAMETER Experiment Name: At_2mM_SA_P Parameter: Age (day) Value: 14
  misc_feature: MA Experiment 20000182 PARAMETER Experiment Name: At_2mM_SA_P Parameter: Organism Value: A. thaliana
  misc_feature: MA Experiment 20000182 PARAMETER Experiment Name: At_2mM_SA_P Parameter: Plant Line Value: WS
  misc_feature: MA Experiment 20000182 PARAMETER Experiment Name: At_2mM_SA_P Parameter: Timepoint (hr) Value: 6
  misc_feature: MA Experiment 20000182 PARAMETER Experiment Name: At_2mM_SA_P Parameter: Tissue Value: Aerial
  misc_feature: MA Experiment 20000182 PARAMETER Experiment Name: At_2mM_SA_P Parameter: Treatment Value: 2mM SA vs. No Treatment
  misc_feature: MA Experiment ID: 20000234 Result: Down-regulated in Transcription
  misc_feature: MA Experiment 20000234 PARAMETER Experiment Name: At_Siliques_P Parameter: Age (day) Value: 21
  misc_feature: MA Experiment 20000234 PARAMETER Experiment Name: At_Siliques_P Parameter: Organism Value: A. thaliana
  misc_feature: MA Experiment 20000234 PARAMETER Experiment Name: At_Siliques_P Parameter: Plant Line Value: WS
  misc_feature: MA Experiment 20000234 PARAMETER Experiment Name: At_Siliques_P Parameter: Tissue Value: Less Than 5mm Siliques vs. Whole Plant
  misc_feature: MA Experiment ID: 20000264 Result: Down-regulated in Transcription
  misc_feature: MA Experiment 20000264 PARAMETER Experiment Name: At_Open_Flower_P Parameter: Age (day) Value: 21
  misc_feature: MA Experiment 20000264 PARAMETER Experiment Name: At_Open_Flower_P Parameter: Plant Line Value: WS
  misc_feature: MA Experiment 20000264 PARAMETER Experiment Name: At_Open_Flower_P Parameter: Tissue Value: Open Flower vs. Whole Plant
  misc_feature: MA Experiment ID: 20000265 Result: Down-regulated in Transcription
  misc_feature: MA Experiment 20000265 PARAMETER Experiment Name: At_Open_Flower_P Parameter: Age (day) Value: 21
  misc_feature: MA Experiment 20000265 PARAMETER Experiment Name: At_Open_Flower_P Parameter: Plant Line Value: WS
  misc_feature: MA Experiment 20000265 PARAMETER Experiment Name: At_Open_Flower_P Parameter: Tissue Value: Closed Flower vs. Whole Plant
  misc_feature: MA Experiment ID: 20000268 Result: Down-regulated in Transcription
  misc_feature: MA Experiment 20000268 PARAMETER Experiment Name: At_100mM_NaCl__P Parameter: Age (day) Value: 14
  misc_feature: MA Experiment 20000268 PARAMETER Experiment Name: At_100mM_NaCl__P Parameter: Organism Value: A. thaliana
  misc_feature: MA Experiment 20000268 PARAMETER Experiment Name: At_100mM_NaCl__P Parameter: Plant Line Value: WS
  misc_feature: MA Experiment 20000268 PARAMETER Experiment Name: At_100mM_NaCl__P Parameter: Timepoint (hr) Value: 6
  misc_feature: MA Experiment 20000268 PARAMETER Experiment Name: At_100mM_NaCl__P Parameter: Tissue Value: Whole Plant
  misc_feature: MA Experiment 20000268 PARAMETER Experiment Name: At_100mM_NaCl__P Parameter: Treatment Value: 100mM NaCl vs. No Treatment
  misc_feature: MA Experiment ID: 20000286 Result: Down-regulated in Transcription
  misc_feature: MA Experiment 20000286 PARAMETER Experiment Name: At_Open_Flower_P Parameter: Age (day) Value: 21
  misc_feature: MA Experiment 20000286 PARAMETER Experiment Name: At_Open_Flower_P Parameter: Plant Line Value: WS
  misc_feature: MA Experiment 20000286 PARAMETER Experiment Name: At_Open_Flower_P Parameter: Tissue Value: Half Open vs. Whole Plant
  misc_feature: MA Experiment ID: 20000308 Result: Down-regulated in Transcription
  misc_feature: MA Experiment 20000308 PARAMETER Experiment Name: At_100mM_NaCl__P Parameter: Age (day) Value: 17
  misc_feature: MA Experiment 20000308 PARAMETER Experiment Name: At_100mM_NaCl__P Parameter: Organism Value: A. thaliana
  misc_feature: MA Experiment 20000308 PARAMETER Experiment Name: At_100mM_NaCl__P Parameter: Plant Line Value: WS
  misc_feature: MA Experiment 20000308 PARAMETER Experiment Name: At_100mM_NaCl__P Parameter: Timepoint (hr) Value: 72
  misc_feature: MA Experiment 20000308 PARAMETER Experiment Name: At_100mM_NaCl__P Parameter: Tissue Value: Whole Plant
  misc_feature: MA Experiment 20000308 PARAMETER Experiment Name: At_100mM_NaCl__P Parameter: Treatment Value: 100mM NaCl vs. No Treatment
  misc_feature: MA Experiment ID: 20000437 Result: Down-regulated in Transcription
  misc_feature: MA Experiment 20000437 PARAMETER Experiment Name: At_Drought_P Parameter: Age (day) Value: 8
  misc_feature: MA Experiment 20000437 PARAMETER Experiment Name: At_Drought_P Parameter: Organism Value: A. thaliana
  misc_feature: MA Experiment 20000437 PARAMETER Experiment Name: At_Drought_P Parameter: Plant Line Value: WS
  misc_feature: MA Experiment 20000437 PARAMETER Experiment Name: At_Drought_P Parameter: Timepoint (hr) Value: 24
  misc_feature: MA Experiment 20000437 PARAMETER Experiment Name: At_Drought_P Parameter: Tissue Value: Whole Plant
  misc_feature: MA Experiment 20000437 PARAMETER Experiment Name: At_Drought_P Parameter: Treatment Value: Drought vs. No Drought
  misc_feature: MA Experiment ID: 20000439 Result: Down-regulated in Transcription
  misc_feature: MA Experiment 20000439 PARAMETER Experiment Name: At_Roots__P Parameter: Age (day) Value: 14 vs. 21
  misc_feature: MA Experiment 20000439 PARAMETER Experiment Name: At_Roots__P Parameter: Organism Value: A. thaliana
  misc_feature: MA Experiment 20000439 PARAMETER Experiment Name: At_Roots__P Parameter: Tissue Value: Roots vs. Whole Plant
  misc_feature: MA Experiment ID: 20000441 Result: Up-regulated in Transcription
  misc_feature: MA Experiment 20000441 PARAMETER Experiment Name: At_1uM_BR-BRZ__P Parameter: Tissue Value: Shoot Apices
  misc_feature: MA Experiment 20000441 PARAMETER Experiment Name: At_1uM_BR-BRZ__P Parameter: Treatment Value: 1uM BR vs. No Treatment
  misc_feature: MA Experiment ID: 20000794 Result: Down-regulated in Transcription
  misc_feature: MA Experiment 20000794 PARAMETER Experiment Name: At_Petals_P Parameter: Age (day) Value: 23-25 days
  misc_feature: MA Experiment 20000794 PARAMETER Experiment Name: At_Petals_P Parameter: Plant Line Value: WS
  misc_feature: MA Experiment 20000794 PARAMETER Experiment Name: At_Petals_P Parameter: Tissue Value: Petals vs. Whole plant
  misc_feature: MA Experiment ID: 20001247 Result: Up-regulated in Transcription
  misc_feature: MA Experiment 20001247 PARAMETER Experiment Name: At_Far-red-induction_P Parameter: Age (day) Value: 7
  misc_feature: MA Experiment 20001247 PARAMETER Experiment Name: At_Far-red-induction_P Parameter: Light Value: Far-red vs. White
  misc_feature: MA Experiment 20001247 PARAMETER Experiment Name: At_Far-red-induction_P Parameter: Organism Value: A. thaliana
  misc_feature: MA Experiment 20001247 PARAMETER Experiment Name: At_Far-red-induction_P Parameter: Plant Line Value: Columbia
  misc_feature: MA Experiment 20001247 PARAMETER Experiment Name: At_Far-red-induction_P Parameter: Timepoint (hr) Value: 1
  misc_feature: MA Experiment 20001247 PARAMETER Experiment Name: At_Far-red-induction_P Parameter: Tissue Value: Whole Plant
  misc_feature: MA Experiment ID: 20001554 Result: Down-regulated in Transcription
  misc_feature: MA Experiment 20001554 PARAMETER Experiment Name: At_Drought_Soil_Dry_P Parameter: Age (day) Value: 21
  misc_feature: MA Experiment 20001554 PARAMETER Experiment Name: At_Drought_Soil_Dry_P Parameter: Organism Value: A. thaliana
  misc_feature: MA Experiment 20001554 PARAMETER Experiment Name: At_Drought_Soil_Dry_P Parameter: Plant Line Value: WS
  misc_feature: MA Experiment 20001554 PARAMETER Experiment Name: At_Drought_Soil_Dry_P Parameter: Post Timepoint (hr) Value: None
  misc_feature: MA Experiment 20001554 PARAMETER Experiment Name: At_Drought_Soil_Dry_P Parameter: Post-Treatment Value: None
  misc_feature: MA Experiment 20001554 PARAMETER Experiment Name: At_Drought_Soil_Dry_P Parameter: Timepoint (day) Value: 7
  misc_feature: MA Experiment 20001554 PARAMETER Experiment Name: At_Drought_Soil_Dry_P Parameter: Treatment Value: Drought vs. No Drought
  misc_feature: MA Experiment ID: 20001555 Result: Down-regulated in Transcription
  misc_feature: MA Experiment 20001555 PARAMETER Experiment Name: At_Drought_Soil_Dry_P Parameter: Age (day) Value: 24
  misc_feature: MA Experiment 20001555 PARAMETER Experiment Name: At_Drought_Soil_Dry_P Parameter: Organism Value: A. thaliana
  misc_feature: MA Experiment 20001555 PARAMETER Experiment Name: At_Drought_Soil_Dry_P Parameter: Plant Line Value: WS
  misc_feature: MA Experiment 20001555 PARAMETER Experiment Name: At_Drought_Soil_Dry_P Parameter: Post Timepoint (hr) Value: None
  misc_feature: MA Experiment 20001555 PARAMETER Experiment Name: At_Drought_Soil_Dry_P Parameter: Post-Treatment Value: None
  misc_feature: MA Experiment 20001555 PARAMETER Experiment Name: At_Drought_Soil_Dry_P Parameter: Timepoint (day) Value: 10
  misc_feature: MA Experiment 20001555 PARAMETER Experiment Name: At_Drought_Soil_Dry_P Parameter: Treatment Value: Drought vs. No Drought
  misc_feature: MA Experiment ID: 20001556 Result: Down-regulated in Transcription
  misc_feature: MA Experiment 20001556 PARAMETER Experiment Name: At_Drought_Soil_Dry_P Parameter: Age (day) Value: 26
  misc_feature: MA Experiment 20001556 PARAMETER Experiment Name: At_Drought_Soil_Dry_P Parameter: Organism Value: A. thaliana
  misc_feature: MA Experiment 20001556 PARAMETER Experiment Name: At_Drought_Soil_Dry_P Parameter: Plant Line Value: WS
  misc_feature: MA Experiment 20001556 PARAMETER Experiment Name: At_Drought_Soil_Dry_P Parameter: Post Timepoint (hr) Value: None
  misc_feature: MA Experiment 20001556 PARAMETER Experiment Name: At_Drought_Soil_Dry_P Parameter: Post-Treatment Value: None
  misc_feature: MA Experiment 20001556 PARAMETER Experiment Name: At_Drought_Soil_Dry_P Parameter: Timepoint (day) Value: 12
  misc_feature: MA Experiment 20001556 PARAMETER Experiment Name: At_Drought_Soil_Dry_P Parameter: Treatment Value: Drought vs. No Drought
  misc_feature: MA Experiment ID: 20001557 Result: Up-regulated in Transcription
  misc_feature: MA Experiment 20001557 PARAMETER Experiment Name: At_Drought_Soil_Dry_P Parameter: Age (day) Value: 27
  misc_feature: MA Experiment 20001557 PARAMETER Experiment Name: At_Drought_Soil_Dry_P Parameter: Organism Value: A. thaliana
  misc_feature: MA Experiment 20001557 PARAMETER Experiment Name: At_Drought_Soil_Dry_P Parameter: Plant Line Value: WS
  misc_feature: MA Experiment 20001557 PARAMETER Experiment Name: At_Drought_Soil_Dry_P Parameter: Post Timepoint (hr) Value: 3
  misc_feature: MA Experiment 20001557 PARAMETER Experiment Name: At_Drought_Soil_Dry_P Parameter: Post-Treatment Value: Re-Water vs. No Drought
  misc_feature: MA Experiment 20001557 PARAMETER Experiment Name: At_Drought_Soil_Dry_P Parameter: Timepoint (day) Value: 13
  misc_feature: MA Experiment 20001557 PARAMETER Experiment Name: At_Drought_Soil_Dry_P Parameter: Treatment Value: Drought vs. No Drought
  misc_feature: MA Experiment ID: 20001558 Result: Up-regulated in Transcription
  misc_feature: MA Experiment 20001558 PARAMETER Experiment Name: At_Drought_Soil_Dry_P Parameter: Age (day) Value: 27
  misc_feature: MA Experiment 20001558 PARAMETER Experiment Name: At_Drought_Soil_Dry_P Parameter: Organism Value: A. thaliana
  misc_feature: MA Experiment 20001558 PARAMETER Experiment Name: At_Drought_Soil_Dry_P Parameter: Plant Line Value: WS
  misc_feature: MA Experiment 20001558 PARAMETER Experiment Name: At_Drought_Soil_Dry_P Parameter: Post Timepoint (hr) Value: 6
  misc_feature: MA Experiment 20001558 PARAMETER Experiment Name: At_Drought_Soil_Dry_P Parameter: Post-Treatment Value: Re-Water vs. No Drought
  misc_feature: MA Experiment 20001558 PARAMETER Experiment Name: At_Drought_Soil_Dry_P Parameter: Timepoint (day) Value: 13
  misc_feature: MA Experiment 20001558 PARAMETER Experiment Name: At_Drought_Soil_Dry_P Parameter: Treatment Value: Drought vs. No Drought
  misc_feature: MA Experiment ID: 20001559 Result: Down-regulated in Transcription
  misc_feature: MA Experiment 20001559 PARAMETER Experiment Name: At_Drought_Soil_Dry_P Parameter: Age (day) Value: 28
  misc_feature: MA Experiment 20001559 PARAMETER Experiment Name: At_Drought_Soil_Dry_P Parameter: Organism Value: A. thaliana
  misc_feature: MA Experiment 20001559 PARAMETER Experiment Name: At_Drought_Soil_Dry_P Parameter: Plant Line Value: WS
  misc_feature: MA Experiment 20001559 PARAMETER Experiment Name: At_Drought_Soil_Dry_P Parameter: Post Timepoint (hr) Value: 29
  misc_feature: MA Experiment 20001559 PARAMETER Experiment Name: At_Drought_Soil_Dry_P Parameter: Post-Treatment Value: Re-Water vs. No Drought
  misc_feature: MA Experiment 20001559 PARAMETER Experiment Name: At_Drought_Soil_Dry_P Parameter: Timepoint (day) Value: 14
  misc_feature: MA Experiment 20001559 PARAMETER Experiment Name: At_Drought_Soil_Dry_P Parameter: Treatment Value: Drought vs. No Drought
  misc_feature: MA Experiment ID: 20001560 Result: Up-regulated in Transcription
  misc_feature: MA Experiment 20001560 PARAMETER Experiment Name: At_Drought_Soil_Dry_P Parameter: Age (day) Value: 28
  misc_feature: MA Experiment 20001560 PARAMETER Experiment Name: At_Drought_Soil_Dry_P Parameter: Organism Value: A. thaliana
  misc_feature: MA Experiment 20001560 PARAMETER Experiment Name: At_Drought_Soil_Dry_P Parameter: Plant Line Value: WS
  misc_feature: MA Experiment 20001560 PARAMETER Experiment Name: At_Drought_Soil_Dry_P Parameter: Post Timepoint (hr) Value: None
  misc_feature: MA Experiment 20001560 PARAMETER Experiment Name: At_Drought_Soil_Dry_P Parameter: Post-Treatment Value: None
  misc_feature: MA Experiment 20001560 PARAMETER Experiment Name: At_Drought_Soil_Dry_P Parameter: Timepoint (day) Value: 14
  misc_feature: MA Experiment 20001560 PARAMETER Experiment Name: At_Drought_Soil_Dry_P Parameter: Treatment Value: Drought vs. No Drought
  misc_feature: MA Experiment ID: 20001757 Result: Up-regulated in Transcription
  misc_feature: MA Experiment 20001757 PARAMETER Experiment Name: At_50mM_NH4NO3_L-to-H_P Parameter: Timepoint (hr) Value: 6
  misc_feature: MA Experiment 20001757 PARAMETER Experiment Name: At_50mM_NH4NO3_L-to-H_P Parameter: Tissue Value: Leaf
  misc_feature: MA Experiment 20001757 PARAMETER Experiment Name: At_50mM_NH4NO3_L-to-H_P Parameter: Treatment Value: 50mM NH4NO3 vs 100mM Mannitol
  misc_feature: MA Experiment ID: 20001904 Result: Down-regulated in Transcription
  misc_feature: MA Experiment 20001904 PARAMETER Experiment Name: At_Drought_Reproduction_P Parameter: Age (day) Value: 37
  misc_feature: MA Experiment 20001904 PARAMETER Experiment Name: At_Drought_Reproduction_P Parameter: Organism Value: A. thaliana
  misc_feature: MA Experiment 20001904 PARAMETER Experiment Name: At_Drought_Reproduction_P Parameter: Plant Line Value: WS
  misc_feature: MA Experiment 20001904 PARAMETER Experiment Name: At_Drought_Reproduction_P Parameter: Timepoint (day) Value: 7
  misc_feature: MA Experiment 20001904 PARAMETER Experiment Name: At_Drought_Reproduction_P Parameter: Tissue Value: Rosettes
  misc_feature: MA Experiment 20001904 PARAMETER Experiment Name: At_Drought_Reproduction_P Parameter: Treatment Value: Drought vs. No Drought
  misc_feature: MA Experiment ID: 20001905 Result: Down-regulated in Transcription
  misc_feature: MA Experiment 20001905 PARAMETER Experiment Name: At_Drought_Reproduction_P Parameter: Age (day) Value: 40
  misc_feature: MA Experiment 20001905 PARAMETER Experiment Name: At_Drought_Reproduction_P Parameter: Organism Value: A. thaliana
  misc_feature: MA Experiment 20001905 PARAMETER Experiment Name: At_Drought_Reproduction_P Parameter: Plant Line Value: WS
  misc_feature: MA Experiment 20001905 PARAMETER Experiment Name: At_Drought_Reproduction_P Parameter: Timepoint (day) Value: 10
  misc_feature: MA Experiment 20001905 PARAMETER Experiment Name: At_Drought_Reproduction_P Parameter: Tissue Value: Rosettes
  misc_feature: MA Experiment 20001905 PARAMETER Experiment Name: At_Drought_Reproduction_P Parameter: Treatment Value: Drought vs. No Drought
  misc_feature: MA Experiment ID: 20001906 Result: Down-regulated in Transcription
  misc_feature: MA Experiment 20001906 PARAMETER Experiment Name: At_Drought_Reproduction_P Parameter: Age (day) Value: 35
  misc_feature: MA Experiment 20001906 PARAMETER Experiment Name: At_Drought_Reproduction_P Parameter: Organism Value: A. thaliana
  misc_feature: MA Experiment 20001906 PARAMETER Experiment Name: At_Drought_Reproduction_P Parameter: Plant Line Value: WS
  misc_feature: MA Experiment 20001906 PARAMETER Experiment Name: At_Drought_Reproduction_P Parameter: Timepoint (day) Value: 5
  misc_feature: MA Experiment 20001906 PARAMETER Experiment Name: At_Drought_Reproduction_P Parameter: Tissue Value: Siliques
  misc_feature: MA Experiment 20001906 PARAMETER Experiment Name: At_Drought_Reproduction_P Parameter: Treatment Value: Drought vs. No Drought
  misc_feature: MA Experiment ID: 20001908 Result: Down-regulated in Transcription
  misc_feature: MA Experiment 20001908 PARAMETER Experiment Name: At_Drought_Reproduction_P Parameter: Age (day) Value: 40
  misc_feature: MA Experiment 20001908 PARAMETER Experiment Name: At_Drought_Reproduction_P Parameter: Organism Value: A. thaliana
  misc_feature: MA Experiment 20001908 PARAMETER Experiment Name: At_Drought_Reproduction_P Parameter: Plant Line Value: WS
  misc_feature: MA Experiment 20001908 PARAMETER Experiment Name: At_Drought_Reproduction_P Parameter: Timepoint (day) Value: 10
  misc_feature: MA Experiment 20001908 PARAMETER Experiment Name: At_Drought_Reproduction_P Parameter: Tissue Value: Siliques
  misc_feature: MA Experiment 20001908 PARAMETER Experiment Name: At_Drought_Reproduction_P Parameter: Treatment Value: Drought vs. No Drought
  misc_feature: MA Experiment ID: 20001910 Result: Down-regulated in Transcription
  misc_feature: MA Experiment 20001910 PARAMETER Experiment Name: At_Drought_Reproduction_P Parameter: Age (day) Value: 37
  misc_feature: MA Experiment 20001910 PARAMETER Experiment Name: At_Drought_Reproduction_P Parameter: Organism Value: A. thaliana
  misc_feature: MA Experiment 20001910 PARAMETER Experiment Name: At_Drought_Reproduction_P Parameter: Plant Line Value: WS
  misc_feature: MA Experiment 20001910 PARAMETER Experiment Name: At_Drought_Reproduction_P Parameter: Timepoint (day) Value: 7
  misc_feature: MA Experiment 20001910 PARAMETER Experiment Name: At_Drought_Reproduction_P Parameter: Tissue Value: Flowers
  misc_feature: MA Experiment 20001910 PARAMETER Experiment Name: At_Drought_Reproduction_P Parameter: Treatment Value: Drought vs. No Drought
  misc_feature: MA Experiment ID: 20001911 Result: Down-regulated in Transcription
  misc_feature: MA Experiment 20001911 PARAMETER Experiment Name: At_Drought_Reproduction_P Parameter: Age (day) Value: 40
  misc_feature: MA Experiment 20001911 PARAMETER Experiment Name: At_Drought_Reproduction_P Parameter: Organism Value: A. thaliana
  misc_feature: MA Experiment 20001911 PARAMETER Experiment Name: At_Drought_Reproduction_P Parameter: Plant Line Value: WS
  misc_feature: MA Experiment 20001911 PARAMETER Experiment Name: At_Drought_Reproduction_P Parameter: Timepoint (day) Value: 10
  misc_feature: MA Experiment 20001911 PARAMETER Experiment Name: At_Drought_Reproduction_P Parameter: Tissue Value: Flowers
  misc_feature: MA Experiment 20001911 PARAMETER Experiment Name: At_Drought_Reproduction_P Parameter: Treatment Value: Drought vs. No Drought
actatactcaaaacacataaactcatcttcaaaactcaatggccaccactcctctcctcctccttctcctcaccgccgtcttcctctccacggagataaccgctcaacgcgctgctccggctcctggcccggctggtcccatcaacatcacggcaatcctcgaaaaaggcggacaatttgttactcttatccgtcttttaaacacaactcaaataggaaaccagataaacatccaaatcaacagttcatcagaaggcatgaccgtgttagcaccaacagacaacgctttccaaaaccttaaacccggaaccctaaacaaactaagcccggacgaccaagtcaaactcattctttaccatgtcagtcccaaattctacacattggaagatcttctctctgtaagtaacccggtcagaactcaggcttcaggtcgagacgttggtggggtttacggacttaacttcaccggtcaagggaatcaagtcaatgtatctactggtgtcgttgagacacgtctcagtacttcattgagacaagaacgtcctcttgcggtttacgtggtggacatggtattgttgccggaagagatgtttggagaacgtaagatctcaccgatggcgcctccaccaaaatcaaaatctcctgatgtctcagatgattcagagtcctctaagaaagcggctgctccgtcagagtcagagaagtctggctccggtgagatgaatactggattagggcttggtcttggacttgttgtgttgtgtttgaaattcctcctttgagtttgtttatatatattgatttaattgtgcgggttgtaataagaaatttctatatgtttattatgatgcatgatttgaaaactgaaataagagattattatttcgtgtgc

SEQ ID NO: 36376 - protein, 247 aa, Arabidopsis thaliana
  peptide (1)..(247): Ceres Seq. ID no. 12558746
  misc_feature (39)..(181): Pfam Name: Fasciclin domain Pfam Description: Fasciclin domain
  misc_feature (4)..(243): Homolog of NCBI NO: 30841338 NR Description: arabinogalactan protein [Gossypium hirsutum]
  misc_feature (13)..(241): Homolog of NCBI NO: 2129473 NR Description: arabinogalactan-like protein - loblolly pine
  misc_feature (1)..(241): Homolog of NCBI NO: 21553523 NR Description: arabinogalactan protein-like [Arabidopsis
  misc_feature (1)..(241): Homolog of NCBI NO: 15242651 NR Description: fasciclin-like arabinogalactan-protein (FLA11)
  misc_feature (6)..(243): Homolog of NCBI NO: 34910950 NR Description: putative arabinogalactan-like protein
  misc_feature (26)..(242): Homolog of NCBI NO: 25350183 NR Description: probable surface protein [imported] - Arabidopsis
  misc_feature (8)..(242): Homolog of NCBI NO: 18399381 NR Description: fasciclin-like arabinogalactan-protein (FLA6)
  misc_feature (1)..(246): Homolog of NCBI NO: 24417458 NR Description: unknown [Arabidopsis thaliana]
  misc_feature (1)..(246): Homolog of NCBI NO: 18379157 NR Description: fasciclin-like arabinogalactan-protein (FLA9)
  misc_feature (1)..(247): Homolog of NCBI NO: 15241423 NR Description: fasciclin-like arabinogalactan-protein, putative
MATTPLLLLLLTAVFLSTEITAQRAAPAPGPAGPINITAILEKGGQFVTLIRLLNTTQIGNQINIQINSSSEGMTVLAPTDNAFQNLKPGTLNKLSPDDQVKLILYHVSPKFYTLEDLLSVSNPVRTQASGRDVGGVYGLNFTGQGNQVNVSTGVVETRLSTSLRQERPLAVYVVDMVLLPEEMFGERKISPMAPPPKSKSPDVSDDSESSKKAAAPSESEKSGSGEMNTGLGLGLGLVVLCLKFLL

SEQ ID NO: 36377 - protein, 174 aa, Arabidopsis thaliana
  peptide (1)..(174): Ceres Seq. ID no. 12558747
  misc_feature (1)..(108): Pfam Name: Fasciclin domain Pfam Description: Fasciclin domain
  misc_feature (1)..(170): Homolog of NCBI NO: 30841338 NR Description: arabinogalactan protein [Gossypium hirsutum]
  misc_feature (1)..(168): Homolog of NCBI NO: 2129473 NR Description: arabinogalactan-like protein - loblolly pine
  misc_feature (1)..(168): Homolog of NCBI NO: 21553523 NR Description: arabinogalactan protein-like [Arabidopsis
  misc_feature (1)..(168): Homolog of NCBI NO: 15242651 NR Description: fasciclin-like arabinogalactan-protein (FLA11)
  misc_feature (1)..(170): Homolog of NCBI NO: 34910950 NR Description: putative arabinogalactan-like protein
  misc_feature (1)..(169): Homolog of NCBI NO: 25350183 NR Description: probable surface protein [imported] - Arabidopsis
  misc_feature (1)..(169): Homolog of NCBI NO: 18399381 NR Description: fasciclin-like arabinogalactan-protein (FLA6)
  misc_feature (1)..(173): Homolog of NCBI NO: 24417458 NR Description: unknown [Arabidopsis thaliana]
  misc_feature (1)..(173): Homolog of NCBI NO: 18379157 NR Description: fasciclin-like arabinogalactan-protein (FLA9)
  misc_feature (1)..(174): Homolog of NCBI NO: 15241423 NR Description: fasciclin-like arabinogalactan-protein, putative
MTVLAPTDNAFQNLKPGTLNKLSPDDQVKLILYHVSPKFYTLEDLLSVSNPVRTQASGRDVGGVYGLNFTGQGNQVNVSTGVVETRLSTSLRQERPLAVYVVDMVLLPEEMFGERKISPMAPPPKSKSPDVSDDSESSKKAAAPSESEKSGSGEMNTGLGLGLGLVVLCLKFLL

SEQ ID NO: 36378 - DNA, 811 bp, Arabidopsis thaliana
  misc_feature (1)..(811): Ceres Seq. ID no. 12579903
  misc_feature: MA Experiment ID: 108434 Result: Up-regulated in Transcription
  misc_feature: MA Experiment 108434 PARAMETER Experiment Name: At_Root_Tips_cDNA_P Parameter: Tissue Value: Root Tips
  misc_feature: MA Experiment ID: 108489 Result: Down-regulated in Transcription
  misc_feature: MA Experiment ID: 108576 Result: Up-regulated in Transcription
  misc_feature: MA Experiment 108576 PARAMETER Experiment Name: At_42deg_Heat_cDNA_P Parameter: Temperature (deg C) Value: 42 vs. 22
  misc_feature: MA Experiment 108576 PARAMETER Experiment Name: At_42deg_Heat_cDNA_P Parameter: Timepoint (hr) Value: 1
  misc_feature: MA Experiment 108576 PARAMETER Experiment Name: At_42deg_Heat_cDNA_P Parameter: Tissue Value: Aerial
  misc_feature: MA Experiment ID: 108577 Result: Up-regulated in Transcription
  misc_feature: MA Experiment 108577 PARAMETER Experiment Name: At_42deg_Heat_cDNA_P Parameter: Temperature (deg C) Value: 42 vs. 22
  misc_feature: MA Experiment 108577 PARAMETER Experiment Name: At_42deg_Heat_cDNA_P Parameter: Timepoint (hr) Value: 6
  misc_feature: MA Experiment 108577 PARAMETER Experiment Name: At_42deg_Heat_cDNA_P Parameter: Tissue Value: Aerial
  misc_feature: MA Experiment ID: 108595 Result: Up-regulated in Transcription
  misc_feature: MA Experiment 108595 PARAMETER Experiment Name: At_Ler-pi_Ovule_cDNA_P Parameter: Plant Line Value: null
  misc_feature: MA Experiment ID: 20000093 Result: Up-regulated in Transcription
  misc_feature: MA Experiment 20000093 PARAMETER Experiment Name: At_42deg_Heat_cDNA_P Parameter: Temperature (deg C) Value: 42 vs. 22
  misc_feature: MA Experiment 20000093 PARAMETER Experiment Name: At_42deg_Heat_cDNA_P Parameter: Timepoint (hr) Value: 0.5
  misc_feature: MA Experiment 20000093 PARAMETER Experiment Name: At_42deg_Heat_cDNA_P Parameter: Tissue Value: Aerial
  misc_feature: MA Experiment ID: 20000111 Result: Up-regulated in Transcription
  misc_feature: MA Experiment 20000111 PARAMETER Experiment Name: At_42deg_Heat_cDNA_P Parameter: Temperature (deg C) Value: 42 vs. 22
  misc_feature: MA Experiment 20000111 PARAMETER Experiment Name: At_42deg_Heat_cDNA_P Parameter: Timepoint (hr) Value: 6
  misc_feature: MA Experiment 20000111 PARAMETER Experiment Name: At_42deg_Heat_cDNA_P Parameter: Tissue Value: Aerial
  misc_feature: MA Experiment ID: 20000112 Result: Up-regulated in Transcription
  misc_feature: MA Experiment 20000112 PARAMETER Experiment Name: At_42deg_Heat_cDNA_P Parameter: Temperature (deg C) Value: 42 vs. 22
  misc_feature: MA Experiment 20000112 PARAMETER Experiment Name: At_42deg_Heat_cDNA_P Parameter: Timepoint (hr) Value: 2
  misc_feature: MA Experiment 20000112 PARAMETER Experiment Name: At_42deg_Heat_cDNA_P Parameter: Tissue Value: Aerial
  misc_feature: MA Experiment ID: 20000113 Result: Up-regulated in Transcription
  misc_feature: MA Experiment 20000113 PARAMETER Experiment Name: At_42deg_Heat_cDNA_P Parameter: Temperature (deg C) Value: 42 vs. 22
  misc_feature: MA Experiment 20000113 PARAMETER Experiment Name: At_42deg_Heat_cDNA_P Parameter: Timepoint (hr) Value: 8
  misc_feature: MA Experiment 20000113 PARAMETER Experiment Name: At_42deg_Heat_cDNA_P Parameter: Tissue Value: Aerial
  misc_feature: MA Experiment ID: 20000144 Result: Up-regulated in Transcription
  misc_feature: MA Experiment 20000144 PARAMETER Experiment Name: At_42deg_Heat_cDNA_P Parameter: Temperature (deg C) Value: 42 vs. 22
  misc_feature: MA Experiment 20000144 PARAMETER Experiment Name: At_42deg_Heat_cDNA_P Parameter: Timepoint (hr) Value: 1
  misc_feature: MA Experiment 20000144 PARAMETER Experiment Name: At_42deg_Heat_cDNA_P Parameter: Tissue Value: Aerial
  misc_feature: MA Experiment ID: 20000171 Result: Up-regulated in Transcription
  misc_feature: MA Experiment 20000171 PARAMETER Experiment Name: At_42deg_Heat_P Parameter: Age (day) Value: 14
  misc_feature: MA Experiment 20000171 PARAMETER Experiment Name: At_42deg_Heat_P Parameter: Organism Value: A. thaliana
  misc_feature: MA Experiment 20000171 PARAMETER Experiment Name: At_42deg_Heat_P Parameter: Plant Line Value: WS
  misc_feature: MA Experiment 20000171 PARAMETER Experiment Name: At_42deg_Heat_P Parameter: Temperature (deg C) Value: 42 vs. 22
  misc_feature: MA Experiment 20000171 PARAMETER Experiment Name: At_42deg_Heat_P Parameter: Timepoint (hr) Value: 1
  misc_feature: MA Experiment 20000171 PARAMETER Experiment Name: At_42deg_Heat_P Parameter: Tissue Value: Aerial
  misc_feature: MA Experiment ID: 20000173 Result: Up-regulated in Transcription
  misc_feature: MA Experiment 20000173 PARAMETER Experiment Name: At_42deg_Heat_P Parameter: Age (day) Value: 14
  misc_feature: MA Experiment 20000173 PARAMETER Experiment Name: At_42deg_Heat_P Parameter: Organism Value: A. thaliana
  misc_feature: MA Experiment 20000173 PARAMETER Experiment Name: At_42deg_Heat_P Parameter: Plant Line Value: WS
  misc_feature: MA Experiment 20000173 PARAMETER Experiment Name: At_42deg_Heat_P Parameter: Temperature (deg C) Value: 42 vs. 22
  misc_feature: MA Experiment 20000173 PARAMETER Experiment Name: At_42deg_Heat_P Parameter: Timepoint (hr) Value: 6
  misc_feature: MA Experiment 20000173 PARAMETER Experiment Name: At_42deg_Heat_P Parameter: Tissue Value: Aerial
  misc_feature: MA Experiment ID: 20000182 Result: Up-regulated in Transcription
  misc_feature: MA Experiment 20000182 PARAMETER Experiment Name: At_2mM_SA_P Parameter: Age (day) Value: 14
  misc_feature: MA Experiment 20000182 PARAMETER Experiment Name: At_2mM_SA_P Parameter: Organism Value: A. thaliana
  misc_feature: MA Experiment 20000182 PARAMETER Experiment Name: At_2mM_SA_P Parameter: Plant Line Value: WS
  misc_feature: MA Experiment 20000182 PARAMETER Experiment Name: At_2mM_SA_P Parameter: Timepoint (hr) Value: 6
  misc_feature: MA Experiment 20000182 PARAMETER Experiment Name: At_2mM_SA_P Parameter: Tissue Value: Aerial
  misc_feature: MA Experiment 20000182 PARAMETER Experiment Name: At_2mM_SA_P Parameter: Treatment Value: 2mM SA vs. No Treatment
  misc_feature: MA Experiment ID: 20001247 Result: Down-regulated in Transcription
  misc_feature: MA Experiment 20001247 PARAMETER Experiment Name: At_Far-red-induction_P Parameter: Age (day) Value: 7
  misc_feature: MA Experiment 20001247 PARAMETER Experiment Name: At_Far-red-induction_P Parameter: Light Value: Far-red vs. White
  misc_feature: MA Experiment 20001247 PARAMETER Experiment Name: At_Far-red-induction_P Parameter: Organism Value: A. thaliana
  misc_feature: MA Experiment 20001247 PARAMETER Experiment Name: At_Far-red-induction_P Parameter: Plant Line Value: Columbia
  misc_feature: MA Experiment 20001247 PARAMETER Experiment Name: At_Far-red-induction_P Parameter: Timepoint (hr) Value: 1
  misc_feature: MA Experiment 20001247 PARAMETER Experiment Name: At_Far-red-induction_P Parameter: Tissue Value: Whole Plant
  misc_feature: MA Experiment ID: 20001248 Result: Down-regulated in Transcription
  misc_feature: MA Experiment 20001248 PARAMETER Experiment Name: At_Far-red-induction_P Parameter: Age (day) Value: 7
  misc_feature: MA Experiment 20001248 PARAMETER Experiment Name: At_Far-red-induction_P Parameter: Light Value: Far-red vs. White
  misc_feature: MA Experiment 20001248 PARAMETER Experiment Name: At_Far-red-induction_P Parameter: Organism Value: A. thaliana
  misc_feature: MA Experiment 20001248 PARAMETER Experiment Name: At_Far-red-induction_P Parameter: Plant Line Value: Columbia
  misc_feature: MA Experiment 20001248 PARAMETER Experiment Name: At_Far-red-induction_P Parameter: Timepoint (hr) Value: 4
  misc_feature: MA Experiment 20001248 PARAMETER Experiment Name: At_Far-red-induction_P Parameter: Tissue Value: Whole Plant
  misc_feature: MA Experiment ID: 20001450 Result: Down-regulated in Transcription
  misc_feature: MA Experiment 20001450 PARAMETER Experiment Name: At_Far-red-induction_P Parameter: Age (day) Value: 7
  misc_feature: MA Experiment 20001450 PARAMETER Experiment Name: At_Far-red-induction_P Parameter: Light Value: Far-red vs. White
  misc_feature: MA Experiment 20001450 PARAMETER Experiment Name: At_Far-red-induction_P Parameter: Organism Value: A. thaliana
  misc_feature: MA Experiment 20001450 PARAMETER Experiment Name: At_Far-red-induction_P Parameter: Plant Line Value: Columbia
  misc_feature: MA Experiment 20001450 PARAMETER Experiment Name: At_Far-red-induction_P Parameter: Timepoint (hr) Value: 8
  misc_feature: MA Experiment 20001450 PARAMETER Experiment Name: At_Far-red-induction_P Parameter: Tissue Value: Whole Plant
  misc_feature: MA Experiment ID: 20001451 Result: Down-regulated in Transcription
  misc_feature: MA Experiment 20001451 PARAMETER Experiment Name: At_Far-red-induction_P Parameter: Age (day) Value: 7
  misc_feature: MA Experiment 20001451 PARAMETER Experiment Name: At_Far-red-induction_P Parameter: Light Value: Far-red vs. White
  misc_feature: MA Experiment 20001451 PARAMETER Experiment Name: At_Far-red-induction_P Parameter: Organism Value: A. thaliana
  misc_feature: MA Experiment 20001451 PARAMETER Experiment Name: At_Far-red-induction_P Parameter: Plant Line Value: Columbia
  misc_feature: MA Experiment 20001451 PARAMETER Experiment Name: At_Far-red-induction_P Parameter: Timepoint (hr) Value: 24
  misc_feature: MA Experiment 20001451 PARAMETER Experiment Name: At_Far-red-induction_P Parameter: Tissue Value: Whole Plant
accaacataaactaaacttcactgacattaaaaaaaattcaaaacctttcaaaaaaaccaaaacatcaacaatgttcggcgtcgtcttccccaatcgaagtttccctatagacatctcaaccttcactcaaatcgacacattccactgggttctcgacatgaaccacttcgtcggtgaagcttatgatcaaatctcagagatgtgtatcttcttgttaaacaatttcaatcttccaccagataaagctttagctgtttatgttcaatctccaggatcagcttttgtgttctgtggtgctgtaactttagctagaccatctgctgttttatcactccaatggcctgaacctggtagtgctgcaaagatgcaactcacggcgggtgattcgagttccttatcggcgaagatcggtgtttcggtggaggatgtagcaacgttgaggtcgttggatgttgttgcggagaggaggattgagaaattggctatgaaagttggagagaatttgtttaactttatgcagtctttttgtggtgttgatggaagtaaattggttgttcctatggatattttggatcgttggtttaagaagtttcaggagaaagctaaacgtgatcctgatttcctcaaaagctttgctttgtaaggttagcgtttttgtaaaatttgatcttgtggttctatgtgatgaattgaacaagagattgtagttttactttgtttgtcaatgtttattaactagttgatcatactctgcttttaagcaatttaaagtgttgaactttaaaaaaaaaaaaaaacttgagtcctgtg

SEQ ID NO: 36379 - protein, 213 aa, Arabidopsis thaliana
  peptide (1)..(213): Ceres Seq. ID no. 12579904
  misc_feature (24)..(210): Pfam Name: Protein of unknown function (DUF775) Pfam Description: Protein of unknown function (DUF775)
  misc_feature (24)..(210): Pfam Name: Protein of unknown function (DUF775) Pfam Description: Protein of unknown function (DUF775)
  misc_feature (24)..(211): Homolog of NCBI NO: 27357983 NR Description: Hypothetical protein [Oryza sativa (japonica
  misc_feature (24)..(211): Homolog of NCBI NO: 27357983 NR Description: Hypothetical protein [Oryza sativa (japonica
  misc_feature (24)..(213): Homolog of NCBI NO: 15218916 NR Description: hypothetical protein; protein id: At1g66080.1
  misc_feature (24)..(213): Homolog of NCBI NO: 15218916 NR Description: hypothetical protein; protein id: At1g66080.1
QHKLNFTDIKKNSKPFKKTKTSTMFGVVFPNRSFPIDISTFTQIDTFHWVLDMNHFVGEAYDQISEMCIFLLNNFNLPPDKALAVYVQSPGSAFVFCGAVTLARPSAVLSLQWPEPGSAAKMQLTAGDSSSLSAKIGVSVEDVATLRSLDVVAERRIEKLAMKVGENLFNFMQSFCGVDGSKLVVPMDILDRWFKKFQEKAKRDPDFLKSFAL

SEQ ID NO: 36380 - protein, 190 aa, Arabidopsis thaliana
  peptide (1)..(190): Ceres Seq. ID no. 12579905
  misc_feature (1)..(187): Pfam Name: Protein of unknown function (DUF775) Pfam Description: Protein of unknown function (DUF775)
  misc_feature (1)..(187): Pfam Name: Protein of unknown function (DUF775) Pfam Description: Protein of unknown function (DUF775)
  misc_feature (1)..(188): Homolog of NCBI NO: 27357983 NR Description: Hypothetical protein [Oryza sativa (japonica
  misc_feature (1)..(188): Homolog of NCBI NO: 27357983 NR Description: Hypothetical protein [Oryza sativa (japonica
  misc_feature (1)..(190): Homolog of NCBI NO: 15218916 NR Description: hypothetical protein; protein id: At1g66080.1
  misc_feature (1)..(190): Homolog of NCBI NO: 15218916 NR Description: hypothetical protein; protein id: At1g66080.1
MFGVVFPNRSFPIDISTFTQIDTFHWVLDMNHFVGEAYDQISEMCIFLLNNFNLPPDKALAVYVQSPGSAFVFCGAVTLARPSAVLSLQWPEPGSAAKMQLTAGDSSSLSAKIGVSVEDVATLRSLDVVAERRIEKLAMKVGENLFNFMQSFCGVDGSKLVVPMDILDRWFKKFQEKAKRDPDFLKSFAL

SEQ ID NO: 36381 - protein, 161 aa, Arabidopsis thaliana
  peptide (1)..(161): Ceres Seq. ID no. 12579906
  misc_feature (1)..(158): Pfam Name: Protein of unknown function (DUF775) Pfam Description: Protein of unknown function (DUF775)
  misc_feature (1)..(158): Pfam Name: Protein of unknown function (DUF775) Pfam Description: Protein of unknown function (DUF775)
  misc_feature (1)..(159): Homolog of NCBI NO: 27357983 NR Description: Hypothetical protein [Oryza sativa (japonica
  misc_feature (1)..(159): Homolog of NCBI NO: 27357983 NR Description: Hypothetical protein [Oryza sativa (japonica
  misc_feature (1)..(161): Homolog of NCBI NO: 15218916 NR Description: hypothetical protein; protein id: At1g66080.1
  misc_feature (1)..(161): Homolog of NCBI NO: 15218916 NR Description: hypothetical protein; protein id: At1g66080.1
MNHFVGEAYDQISEMCIFLLNNFNLPPDKALAVYVQSPGSAFVFCGAVTLARPSAVLSLQWPEPGSAAKMQLTAGDSSSLSAKIGVSVEDVATLRSLDVVAERRIEKLAMKVGENLFNFMQSFCGVDGSKLVVPMDILDRWFKKFQEKAKRDPDFLKSFAL

SEQ ID NO: 36382 - DNA, 1245 bp, Arabidopsis thaliana
  misc_feature (1)..(1245): Ceres Seq. ID no. 12600816
  misc_feature: MA Experiment ID: 20000173 Result: Down-regulated in Transcription
  misc_feature: MA Experiment 20000173 PARAMETER Experiment Name: At_42deg_Heat_P Parameter: Age (day) Value: 14
  misc_feature: MA Experiment 20000173 PARAMETER Experiment Name: At_42deg_Heat_P Parameter: Organism Value: A. thaliana
  misc_feature: MA Experiment 20000173 PARAMETER Experiment Name: At_42deg_Heat_P Parameter: Plant Line Value: WS
  misc_feature: MA Experiment 20000173 PARAMETER Experiment Name: At_42deg_Heat_P Parameter: Temperature (deg C) Value: 42 vs. 22
  misc_feature: MA Experiment 20000173 PARAMETER Experiment Name: At_42deg_Heat_P Parameter: Timepoint (hr) Value: 6
  misc_feature: MA Experiment 20000173 PARAMETER Experiment Name: At_42deg_Heat_P Parameter: Tissue Value: Aerial
  misc_feature: MA Experiment ID: 20000180 Result: Up-regulated in Transcription
  misc_feature: MA Experiment 20000180 PARAMETER Experiment Name: At_Germinating_Seeds_P Parameter: Age (hr) Value: 24 vs. 0
  misc_feature: MA Experiment 20000180 PARAMETER Experiment Name: At_Germinating_Seeds_P Parameter: Tissue Value: Germinating Seeds
  misc_feature: MA Experiment ID: 20000184 Result: Down-regulated in Transcription
  misc_feature: MA Experiment 20000184 PARAMETER Experiment Name: At_Shoots__P Parameter: Age (day) Value: 7
  misc_feature: MA Experiment 20000184 PARAMETER Experiment Name: At_Shoots__P Parameter: Tissue Value: Shoots vs. Whole Plant
  misc_feature: MA Experiment ID: 20000185 Result: Down-regulated in Transcription
  misc_feature: MA Experiment 20000185 PARAMETER Experiment Name: At_Roots__P Parameter: Age (day) Value: 7 vs. 21
  misc_feature: MA Experiment 20000185 PARAMETER Experiment Name: At_Roots__P Parameter: Organism Value: A. thaliana
  misc_feature: MA Experiment 20000185 PARAMETER Experiment Name: At_Roots__P Parameter: Tissue Value: Roots vs. Whole Plant
  misc_feature: MA Experiment ID: 20000227 Result: Up-regulated in Transcription
  misc_feature: MA Experiment 20000227 PARAMETER Experiment Name: At_Root-Tips-vs-Tops_P Parameter: Tissue Value: Root Tips vs. Root Tops
  misc_feature: MA Experiment ID: 20000234 Result: Down-regulated in Transcription
  misc_feature: MA Experiment 20000234 PARAMETER Experiment Name: At_Siliques_P Parameter: Age (day) Value: 21
  misc_feature: MA Experiment 20000234 PARAMETER Experiment Name: At_Siliques_P Parameter: Organism Value: A. thaliana
  misc_feature: MA Experiment 20000234 PARAMETER Experiment Name: At_Siliques_P Parameter: Plant Line Value: WS
  misc_feature: MA Experiment 20000234 PARAMETER Experiment Name: At_Siliques_P Parameter: Tissue Value: Less Than 5mm Siliques vs. Whole Plant
  misc_feature: MA Experiment ID: 20000265 Result: Down-regulated in Transcription
  misc_feature: MA Experiment 20000265 PARAMETER Experiment Name: At_Open_Flower_P Parameter: Age (day) Value: 21
  misc_feature: MA Experiment 20000265 PARAMETER Experiment Name: At_Open_Flower_P Parameter: Plant Line Value: WS
  misc_feature: MA Experiment 20000265 PARAMETER Experiment Name: At_Open_Flower_P Parameter: Tissue Value: Closed Flower vs. Whole Plant
  misc_feature: MA Experiment ID: 20000438 Result: Down-regulated in Transcription
  misc_feature: MA Experiment 20000438 PARAMETER Experiment Name: At_Shoots__P Parameter: Age (day) Value: 14
  misc_feature: MA Experiment 20000438 PARAMETER Experiment Name: At_Shoots__P Parameter: Tissue Value: Shoots vs. Whole Plant
  misc_feature: MA Experiment ID: 20000439 Result: Down-regulated in Transcription
  misc_feature: MA Experiment 20000439 PARAMETER Experiment Name: At_Roots__P Parameter: Age (day) Value: 14 vs. 21
  misc_feature: MA Experiment 20000439 PARAMETER Experiment Name: At_Roots__P Parameter: Organism Value: A. thaliana
  misc_feature: MA Experiment 20000439 PARAMETER Experiment Name: At_Roots__P Parameter: Tissue Value: Roots vs. Whole Plant
  misc_feature: MA Experiment ID: 20000451 Result: Down-regulated in Transcription
  misc_feature: MA Experiment 20000451 PARAMETER Experiment Name: At_CS6879_Shoots-Roots_P Parameter: Age (day) Value: 14
  misc_feature: MA Experiment 20000451 PARAMETER Experiment Name: At_CS6879_Shoots-Roots_P Parameter: Organism Value: A. thaliana
  misc_feature: MA Experiment 20000451 PARAMETER Experiment Name: At_CS6879_Shoots-Roots_P Parameter: Plant Line Value: CS6879 vs. WS
  misc_feature: MA Experiment 20000451 PARAMETER Experiment Name: At_CS6879_Shoots-Roots_P Parameter: Tissue Value: Roots
  misc_feature: MA Experiment ID: 20000453 Result: Up-regulated in Transcription
  misc_feature: MA Experiment 20000453 PARAMETER Experiment Name: At_100uM_ABA_P Parameter: Age (day) Value: 15
  misc_feature: MA Experiment 20000453 PARAMETER Experiment Name: At_100uM_ABA_P Parameter: Organism Value: A. thaliana
  misc_feature: MA Experiment 20000453 PARAMETER Experiment Name: At_100uM_ABA_P Parameter: Plant Line Value: WS
  misc_feature: MA Experiment 20000453 PARAMETER Experiment Name: At_100uM_ABA_P Parameter: Timepoint (hr) Value: 24
  misc_feature: MA Experiment 20000453 PARAMETER Experiment Name: At_100uM_ABA_P Parameter: Tissue Value: Aerial
  misc_feature: MA Experiment 20000453 PARAMETER Experiment Name: At_100uM_ABA_P Parameter: Treatment Value: 100uM ABA vs. No Treatment
  misc_feature: MA Experiment ID: 20001248 Result: Up-regulated in Transcription
  misc_feature: MA Experiment 20001248 PARAMETER Experiment Name: At_Far-red-induction_P Parameter: Age (day) Value: 7
  misc_feature: MA Experiment 20001248 PARAMETER Experiment Name: At_Far-red-induction_P Parameter: Light Value: Far-red vs. White
  misc_feature: MA Experiment 20001248 PARAMETER Experiment Name: At_Far-red-induction_P Parameter: Organism Value: A. thaliana
  misc_feature: MA Experiment 20001248 PARAMETER Experiment Name: At_Far-red-induction_P Parameter: Plant Line Value: Columbia
  misc_feature: MA Experiment 20001248 PARAMETER Experiment Name: At_Far-red-induction_P Parameter: Timepoint (hr) Value: 4
  misc_feature: MA Experiment 20001248 PARAMETER Experiment Name: At_Far-red-induction_P Parameter: Tissue Value: Whole Plant
  misc_feature: MA Experiment ID: 20001558 Result: Down-regulated in Transcription
  misc_feature: MA Experiment 20001558 PARAMETER Experiment Name: At_Drought_Soil_Dry_P Parameter: Age (day) Value: 27
  misc_feature: MA Experiment 20001558 PARAMETER Experiment Name: At_Drought_Soil_Dry_P Parameter: Organism Value: A. thaliana
  misc_feature: MA Experiment 20001558 PARAMETER Experiment Name: At_Drought_Soil_Dry_P Parameter: Plant Line Value: WS
  misc_feature: MA Experiment 20001558 PARAMETER Experiment Name: At_Drought_Soil_Dry_P Parameter: Post Timepoint (hr) Value: 6
  misc_feature: MA Experiment 20001558 PARAMETER Experiment Name: At_Drought_Soil_Dry_P Parameter: Post-Treatment Value: Re-Water vs. No Drought
  misc_feature: MA Experiment 20001558 PARAMETER Experiment Name: At_Drought_Soil_Dry_P Parameter: Timepoint (day) Value: 13
  misc_feature: MA Experiment 20001558 PARAMETER Experiment Name: At_Drought_Soil_Dry_P Parameter: Treatment Value: Drought vs. No Drought
  misc_feature: MA Experiment ID: 20001560 Result: Down-regulated in Transcription
  misc_feature: MA Experiment 20001560 PARAMETER Experiment Name: At_Drought_Soil_Dry_P Parameter: Age (day) Value: 28
  misc_feature: MA Experiment 20001560 PARAMETER Experiment Name: At_Drought_Soil_Dry_P Parameter: Organism Value: A. thaliana
  misc_feature: MA Experiment 20001560 PARAMETER Experiment Name: At_Drought_Soil_Dry_P Parameter: Plant Line Value: WS
  misc_feature: MA Experiment 20001560 PARAMETER Experiment Name: At_Drought_Soil_Dry_P Parameter: Post Timepoint (hr) Value: None
  misc_feature: MA Experiment 20001560 PARAMETER Experiment Name: At_Drought_Soil_Dry_P Parameter: Post-Treatment Value: None
  misc_feature: MA Experiment 20001560 PARAMETER Experiment Name: At_Drought_Soil_Dry_P Parameter: Timepoint (day) Value: 14
  misc_feature: MA Experiment 20001560 PARAMETER Experiment Name: At_Drought_Soil_Dry_P Parameter: Treatment Value: Drought vs. No Drought
  misc_feature: MA Experiment ID: 20001905 Result: Down-regulated in Transcription
  misc_feature: MA Experiment 20001905 PARAMETER Experiment Name: At_Drought_Reproduction_P Parameter: Age (day) Value: 40
  misc_feature: MA Experiment 20001905 PARAMETER Experiment Name: At_Drought_Reproduction_P Parameter: Organism Value: A. thaliana
  misc_feature: MA Experiment 20001905 PARAMETER Experiment Name: At_Drought_Reproduction_P Parameter: Plant Line Value: WS
  misc_feature: MA Experiment 20001905 PARAMETER Experiment Name: At_Drought_Reproduction_P Parameter: Timepoint (day) Value: 10
  misc_feature: MA Experiment 20001905 PARAMETER Experiment Name: At_Drought_Reproduction_P Parameter: Tissue Value: Rosettes
  misc_feature: MA Experiment 20001905 PARAMETER Experiment Name: At_Drought_Reproduction_P Parameter: Treatment Value: Drought vs. No Drought
gtcgtgccattagcctttgatttcagaaaaaacacttacaaagctgatatctttcttactacttcgaagaaatcttcttctcccttccaaaaaaacaatccctaaacccggaaccaaagatcgacattcatggctctcttcgacactcataacacatgggcctttgttttcggcttgctcggaaacctcatttcctttgctgttttcctctctcccgtgccaacgttctataggatttgtaagaagaaaaccacagaaggatttcaatctattccctatgtggtggcgctcttcagcgcgatgctttggctctactacgctactcagaagaaagatgtcttccttctcgtcaccatcaacagctttggttgcttcattgaaaccatatacatctccatctttgttgccttcgcatccaagaaagcccgaatgctaacggtgaagctcttgttgctaatgaactttggagggttctgtttgattctcctcctctgccaattcttggcaaaaggaaccacacgtgcgaagatcattggaggtatctgtgtcggattctctgtctgcgtttttgctgcgccgcttagcattatcagaacggtgataaagacgaaaagtgtggagtacatgccgtttagcttatccttgactcttaccatcagtgcggtcatatggctcctttatggtcttgctcttaaggatatctatgttgccttcccaaacgtgattgggtttgttctaggtgcacttcaaatgatactctatgtggtttacaaatactgcaaaacgccgtcggatttggttgagaaagaacttgaggctgcgaaattgccagaagtgagcatcgatatggtgaagttaggtacactcacatctcctgaaccagtagcgatcaccgtcgtccgatcggtgaacacatgtaactgtaacgatcgaaatgctgagattgaaaatggtcagggagttagaaacagtgctgcaactacttgagtttgcccaagaaaccctaataagaaacctatttgttgactattttgactttgtacccttcttgatatacctatcaatcaccattgtccacgtgtactagtttcgttgtagtaattttcaaagtttatcgaagtatgcgtattcgaggattaattaaatcgggaattacattttcctgagttaattttttctctttttcttttacttatgggacaatgtaatgaaactatctgttgcatataaatattttccaagttg

SEQ ID NO: 36383 - protein, 285 aa, Arabidopsis thaliana
  peptide (1)..(285): Ceres Seq. ID no. 12600817
  misc_feature (12)..(99): Pfam Name: MtN3/saliva family Pfam Description: MtN3/saliva family
  misc_feature (12)..(99): Pfam Name: MtN3/saliva family Pfam Description: MtN3/saliva family
  misc_feature (11)..(246): Homolog of NCBI NO: 15241265 NR Description: MtN3-like protein
  misc_feature (1)..(276): Homolog of NCBI NO: 15240040 NR Description: senescence-associated protein (SAG29)
  misc_feature (1)..(232): Homolog of NCBI NO: 21593422 NR Description: senescence-associated protein (SAG29)
  misc_feature (6)..(245): Homolog of NCBI NO: 14715258 NR Description: N3 like protein [Medicago truncatula]
  misc_feature (6)..(238): Homolog of NCBI NO: 1619602 NR Description: MtN3 [Medicago truncatula]
  misc_feature (11)..(246): Homolog of NCBI NO: 15241265 NR Description: MtN3-like protein
  misc_feature (1)..(232): Homolog of NCBI NO: 21593422 NR Description: senescence-associated protein (SAG29)
  misc_feature (6)..(238): Homolog of NCBI NO: 1619602 NR Description: MtN3 [Medicago truncatula]
  misc_feature (1)..(285): Homolog of NCBI NO: 15237803 NR Description: MtN3-like protein
  misc_feature (1)..(276): Homolog of NCBI NO: 15229019 NR Description: MTN3-like protein
  misc_feature (1)..(246): Homolog of NCBI NO: 21593109 NR Description: MtN3-like protein [Arabidopsis thaliana]
  misc_feature (1)..(246): Homolog of NCBI NO: 15241278 NR Description: MtN3-like protein
  misc_feature (6)..(261): Homolog of NCBI NO: 15234863 NR Description: MtN3 - like protein; protein id: At4g25010.1
  misc_feature (6)..(245): Homolog of NCBI NO: 14715258 NR Description: N3 like protein [Medicago truncatula]
  misc_feature (1)..(276): Homolog of NCBI NO: 15240040 NR Description: senescence-associated protein (SAG29)
  misc_feature (6)..(261): Homolog of NCBI NO: 15234863 NR Description: MtN3 - like protein; protein id: At4g25010.1
  misc_feature (1)..(246): Homolog of NCBI NO: 15241278 NR Description: MtN3-like protein
  misc_feature (1)..(246): Homolog of NCBI NO: 21593109 NR Description: MtN3-like protein [Arabidopsis thaliana]
  misc_feature (1)..(276): Homolog of NCBI NO: 15229019 NR Description: MTN3-like protein
  misc_feature (1)..(285): Homolog of NCBI NO: 15237803 NR Description: MtN3-like protein
MALFDTHNTWAFVFGLLGNLISFAVFLSPVPTFYRICKKKTTEGFQSIPYVVALFSAMLWLYYATQKKDVFLLVTINSFGCFIETIYISIFVAFASKKARMLTVKLLLLMNFGGFCLILLLCQFLAKGTTRAKIIGGICVGFSVCVFAAPLSIIRTVIKTKSVEYMPFSLSLTLTISAVIWLLYGLALKDIYVAFPNVIGFVLGALQMILYVVYKYCKTPSDLVEKELEAAKLPEVSIDMVKLGTLTSPEPVAITVVRSVNTCNCNDRNAEIENGQGVRNSAATT

SEQ ID NO: 36384 - protein, 228 aa, Arabidopsis thaliana
  peptide (1)..(228): Ceres Seq. ID no. 12600818
  misc_feature (1)..(189): Homolog of NCBI NO: 15241265 NR Description: MtN3-like protein
  misc_feature (1)..(219): Homolog of NCBI NO: 15240040 NR Description: senescence-associated protein (SAG29)
  misc_feature (1)..(175): Homolog of NCBI NO: 21593422 NR Description: senescence-associated protein (SAG29)
  misc_feature (1)..(188): Homolog of NCBI NO: 14715258 NR Description: N3 like protein [Medicago truncatula]
  misc_feature (1)..(181): Homolog of NCBI NO: 1619602 NR Description: MtN3 [Medicago truncatula]
  misc_feature (1)..(204): Homolog of NCBI NO: 15234863 NR Description: MtN3 - like protein; protein id: At4g25010.1
  misc_feature (1)..(189): Homolog of NCBI NO: 15241278 NR Description: MtN3-like protein
  misc_feature (1)..(189): Homolog of NCBI NO: 21593109 NR Description: MtN3-like protein [Arabidopsis thaliana]
  misc_feature (1)..(219): Homolog of NCBI NO: 15229019 NR Description: MTN3-like protein
  misc_feature (1)..(228): Homolog of NCBI NO: 15237803 NR Description: MtN3-like protein
  misc_feature (1)..(189): Homolog of NCBI NO: 15241265 NR Description: MtN3-like protein
  misc_feature (1)..(219): Homolog of NCBI NO: 15240040 NR Description: senescence-associated protein (SAG29)
  misc_feature (1)..(175): Homolog of NCBI NO: 21593422 NR Description: senescence-associated protein (SAG29)
  misc_feature (1)..(188): Homolog of NCBI NO: 14715258 NR Description: N3 like protein [Medicago truncatula]
  misc_feature (1)..(181): Homolog of NCBI NO: 1619602 NR Description: MtN3 [Medicago truncatula]
  misc_feature (1)..(204): Homolog of NCBI NO: 15234863 NR Description: MtN3 - like protein; protein id: At4g25010.1
  misc_feature (1)..(189): Homolog of NCBI NO: 15241278 NR Description: MtN3-like protein
  misc_feature (1)..(189): Homolog of NCBI NO: 21593109 NR Description: MtN3-like protein [Arabidopsis thaliana]
  misc_feature (1)..(219): Homolog of NCBI NO: 15229019 NR Description: MTN3-like protein
  misc_feature (1)..(228): Homolog of NCBI NO: 15237803 NR Description: MtN3-like protein
MLWLYYATQKKDVFLLVTINSFGCFIETIYISIFVAFASKKARMLTVKLLLLMNFGGFCLILLLCQFLAKGTTRAKIIGGICVGFSVCVFAAPLSIIRTVIKTKSVEYMPFSLSLTLTISAVIWLLYGLALKDIYVAFPNVIGFVLGALQMILYVVYKYCKTPSDLVEKELEAAKLPEVSIDMVKLGTLTSPEPVAITVVRSVNTCNCNDRNAEIENGQGVRNSAATT

SEQ ID NO: 36385 - protein, 185 aa, Arabidopsis thaliana
  peptide (1)..(185): Ceres Seq. ID no. 12600819
  misc_feature (1)..(146): Homolog of NCBI NO: 15241265 NR Description: MtN3-like protein
  misc_feature (1)..(176): Homolog of NCBI NO: 15240040 NR Description: senescence-associated protein (SAG29)
  misc_feature (1)..(132): Homolog of NCBI NO: 21593422 NR Description: senescence-associated protein (SAG29)
  misc_feature (1)..(145): Homolog of NCBI NO: 14715258 NR Description: N3 like protein [Medicago truncatula]
  misc_feature (1)..(138): Homolog of NCBI NO: 1619602 NR Description: MtN3 [Medicago truncatula]
  misc_feature (1)..(161): Homolog of NCBI NO: 15234863 NR Description: MtN3 - like protein; protein id: At4g25010.1
  misc_feature (1)..(146): Homolog of NCBI NO: 15241278 NR Description: MtN3-like protein
  misc_feature (1)..(146): Homolog of NCBI NO: 21593109 NR Description: MtN3-like protein [Arabidopsis thaliana]
  misc_feature (1)..(176): Homolog of NCBI NO: 15229019 NR Description: MTN3-like protein
  misc_feature (1)..(185): Homolog of NCBI NO: 15237803 NR Description: MtN3-like protein
  misc_feature (1)..(146): Homolog of NCBI NO: 15241265 NR Description: MtN3-like protein
  misc_feature (1)..(176): Homolog of NCBI NO: 15240040 NR Description: senescence-associated protein (SAG29)
  misc_feature (1)..(132): Homolog of NCBI NO: 21593422 NR Description: senescence-associated protein (SAG29)
  misc_feature (1)..(145): Homolog of NCBI NO: 14715258 NR Description: N3 like protein [Medicago truncatula]
  misc_feature (1)..(138): Homolog of NCBI NO: 1619602 NR Description: MtN3 [Medicago truncatula]
  misc_feature (1)..(161): Homolog of NCBI NO: 15234863 NR Description: MtN3 - like protein; protein id: At4g25010.1
  misc_feature (1)..(146): Homolog of NCBI NO: 15241278 NR Description: MtN3-like protein
  misc_feature (1)..(146): Homolog of NCBI NO: 21593109 NR Description: MtN3-like protein [Arabidopsis thaliana]
  misc_feature (1)..(176): Homolog of NCBI NO: 15229019 NR Description: MTN3-like protein
  misc_feature (1)..(185): Homolog of NCBI NO: 15237803 NR Description: MtN3-like protein
MLTVKLLLLMNFGGFCLILLLCQFLAKGTTRAKIIGGICVGFSVCVFAAPLSIIRTVIKTKSVEYMPFSLSLTLTISAVIWLLYGLALKDIYVAFPNVIGFVLGALQMILYVVYKYCKTPSDLVEKELEAAKLPEVSIDMVKLGTLTSPEPVAITVVRSVNTCNCNDRNAEIENGQGVRNSAATT

SEQ ID NO: 36386 - DNA, 1060 bp, Arabidopsis thaliana
  misc_feature (1)..(1060): Ceres Seq. ID no. 12330580
  misc_feature: MA Experiment ID: 108461 Result: Up-regulated in Transcription
  misc_feature: MA Experiment 108461 PARAMETER Experiment Name: At_Germinating_Seeds_cDNA_P Parameter: Age (day) Value: 1 vs. 0
  misc_feature: MA Experiment 108461 PARAMETER Experiment Name: At_Germinating_Seeds_cDNA_P Parameter: Tissue Value: Germinating Seeds
  misc_feature: MA Experiment ID: 108462 Result: Up-regulated in Transcription
  misc_feature: MA Experiment 108462 PARAMETER Experiment Name: At_Germinating_Seeds_cDNA_P Parameter: Age (day) Value: 2 vs. 0
  misc_feature: MA Experiment 108462 PARAMETER Experiment Name: At_Germinating_Seeds_cDNA_P Parameter: Tissue Value: Germinating Seeds
  misc_feature: MA Experiment ID: 108463 Result: Up-regulated in Transcription
  misc_feature: MA Experiment 108463 PARAMETER Experiment Name: At_Germinating_Seeds_cDNA_P Parameter: Age (day) Value: 3 vs. 0
  misc_feature: MA Experiment 108463 PARAMETER Experiment Name: At_Germinating_Seeds_cDNA_P Parameter: Tissue Value: Germinating Seeds
  misc_feature: MA Experiment ID: 108464 Result: Up-regulated in Transcription
  misc_feature: MA Experiment 108464 PARAMETER Experiment Name: At_Germinating_Seeds_cDNA_P Parameter: Age (day) Value: 4 vs. 0
  misc_feature: MA Experiment 108464 PARAMETER Experiment Name: At_Germinating_Seeds_cDNA_P Parameter: Tissue Value: Germinating Seeds
  misc_feature: MA Experiment ID: 108488 Result: Down-regulated in Transcription
  misc_feature: MA Experiment ID: 108668 Result: Up-regulated in Transcription
  misc_feature: MA Experiment 108668 PARAMETER Experiment Name: At_2mM_SA_cDNA_P Parameter: Plant Line Value: WS
  misc_feature: MA Experiment 108668 PARAMETER Experiment Name: At_2mM_SA_cDNA_P Parameter: Timepoint (hr) Value: 6
  misc_feature: MA Experiment 108668 PARAMETER Experiment Name: At_2mM_SA_cDNA_P Parameter: Treatment Value: 2mM SA vs. No Treatment
  misc_feature: MA Experiment ID: 20000089 Result: Down-regulated in Transcription
  misc_feature: MA Experiment ID: 20000113 Result: Down-regulated in Transcription
  misc_feature: MA Experiment 20000113 PARAMETER Experiment Name: At_42deg_Heat_cDNA_P Parameter: Temperature (deg C) Value: 42 vs. 22
  misc_feature: MA Experiment 20000113 PARAMETER Experiment Name: At_42deg_Heat_cDNA_P Parameter: Timepoint (hr) Value: 8
  misc_feature: MA Experiment 20000113 PARAMETER Experiment Name: At_42deg_Heat_cDNA_P Parameter: Tissue Value: Aerial
cataaacatcaaatggttctaattggtctttgatcttaaacccatttgattatggtatctaaagtttgatccttttgatgcactctcatcgcagtttctcgtgattttaatattattgaactcttttgatttgtggtgaagcaaaccttctctgtcacaactagctccattagaagccattctgtttgatgttgatggaacactctgtgactcagatcccatccaccttattgccttccaagaactgcttcaagagattggttttaacaatggggtcccaatcgatgagaaattctttgttgagaacattgctggaaaacacaattctgaaattgctctacttctgttccctgatgatgtttcaagagggttaaaattctgtgatgaaaaggaagctctttaccgcaaaattgttgcagagaagataaagccacttgatgggcttataaaactgaccaaatggatcgaagatcgtggattgaaacgagctgcggtaacaaacgctccaaaagaaaacgcagagctcatgatatcgaaacttggtctgactgatttctttcaagcagtgattcttggctctgaatgtgaatttcccaaaccacaccctggaccttacttgaaggctcttgaagtgcttaacgtgtcaaaggagcacacgctagttttcgaagactcgatctctgggataaaagctggagttgcagctggaatgccagtgattggactgactacagggaatccagcaagcctgcttatgcaagcaaaacccgcttttctcatcgagaactatgcggatccaaaactgtgggctgtgttggaagaacttgataacaagtcttaagtctcacttgtttggcttatggaaacccacacatgcatgagcagcctctgaagtttaccttatgtcttagatgatcattgttgaataattcattgggagtttatgacaatgggagctttcaaatatctgattattttgtattgatacatgcacaatgctagatttgtatccaggagatagttgcataaaccaatatactataccctcggatcttagctc

SEQ ID NO: 36387 - protein, 104 aa, Arabidopsis thaliana
  peptide (1)..(104): Ceres Seq. ID no. 12330581
  misc_feature (1)..(70): Pfam Name: haloacid dehalogenase-like hydrolase Pfam Description: haloacid dehalogenase-like hydrolase
  misc_feature (1)..(97): Homolog of NCBI NO: 27377543 NR Description: blr2432 [Bradyrhizobium japonicum]
  misc_feature (1)..(93): Homolog of NCBI NO: 23042473 NR Description: hypothetical protein [Trichodesmium erythraeum
  misc_feature (1)..(97): Homolog of NCBI NO: 37521914 NR Description: hypothetical protein glr2345 [Gloeobacter
  misc_feature (1)..(100): Homolog of NCBI NO: 17228223 NR Description: hypothetical protein [Nostoc sp. PCC 7120]
  misc_feature (1)..(100): Homolog of NCBI NO: 23127812 NR Description: hypothetical protein [Nostoc punctiforme]
  misc_feature (1)..(101): Homolog of NCBI NO: 37700485 NR Description: putative beta-phosphoglucomutase [Oryza sativa]
  misc_feature (1)..(100): Homolog of NCBI NO: 34897820 NR Description: P0514G12.30 [Oryza sativa (japonica
  misc_feature (1)..(101): Homolog of NCBI NO: 37536998 NR Description: putative beta-phosphoglucomutase
  misc_feature (1)..(104): Homolog of NCBI NO: 25408616 NR Description: hypothetical protein At2g38740 [imported] -
  misc_feature (1)..(104): Homolog of NCBI NO: 18404847 NR Description: expressed protein
MISKLGLTDFFQAVILGSECEFPKPHPGPYLKALEVLNVSKEHTLVFEDSISGIKAGVAAGMPVIGLTTGNPASLLMQAKPAFLIENYADPKLWAVLEELDNKS

SEQ ID NO: 36388 - protein, 61 aa, Arabidopsis thaliana
  peptide (1)..(61): Ceres Seq. ID no. 12330582
MLMEHSVTQIPSTLLPSKNCFKRLVLTMGSQSMRNSLLRTLLENTILKLLYFCSLMMFQEG

SEQ ID NO: 36389 - protein, 59 aa, Arabidopsis thaliana
  peptide (1)..(59): Ceres Seq. ID no. 12330583
MEHSVTQIPSTLLPSKNCFKRLVLTMGSQSMRNSLLRTLLENTILKLLYFCSLMMFQEG

SEQ ID NO: 36390 - DNA, 1538 bp, Arabidopsis thaliana; identical to SEQ ID NO: 29845
  misc_feature (1)..(1538): Ceres Seq. ID no. 12580443
  misc_feature: MA Experiment ID: 108462 Result: Up-regulated in Transcription
  misc_feature: MA Experiment 108462 PARAMETER Experiment Name: At_Germinating_Seeds_cDNA_P Parameter: Age (day) Value: 2 vs. 0
  misc_feature: MA Experiment 108462 PARAMETER Experiment Name: At_Germinating_Seeds_cDNA_P Parameter: Tissue Value: Germinating Seeds
  misc_feature: MA Experiment ID: 108463 Result: Up-regulated in Transcription
  misc_feature: MA Experiment 108463 PARAMETER Experiment Name: At_Germinating_Seeds_cDNA_P Parameter: Age (day) Value: 3 vs. 0
  misc_feature: MA Experiment 108463 PARAMETER Experiment Name: At_Germinating_Seeds_cDNA_P Parameter: Tissue Value: Germinating Seeds
  misc_feature: MA Experiment ID: 108464 Result: Up-regulated in Transcription
  misc_feature: MA Experiment 108464 PARAMETER Experiment Name: At_Germinating_Seeds_cDNA_P Parameter: Age (day) Value: 4 vs. 0
  misc_feature: MA Experiment 108464 PARAMETER Experiment Name: At_Germinating_Seeds_cDNA_P Parameter: Tissue Value: Germinating Seeds
  misc_feature: MA Experiment ID: 108488 Result: Down-regulated in Transcription
  misc_feature: MA Experiment ID: 108572 Result: Down-regulated in Transcription
  misc_feature: MA Experiment 108572 PARAMETER Experiment Name: At_Drought_cDNA_P Parameter: Timepoint (hr) Value: 1
  misc_feature: MA Experiment 108572 PARAMETER Experiment Name: At_Drought_cDNA_P Parameter: Tissue Value: Aerial
  misc_feature: MA Experiment 108572 PARAMETER Experiment Name: At_Drought_cDNA_P Parameter: Treatment Value: Drought vs. No Drought
  misc_feature: MA Experiment ID: 108573 Result: Down-regulated in Transcription
  misc_feature: MA Experiment 108573 PARAMETER Experiment Name: At_Drought_cDNA_P Parameter: Timepoint (hr) Value: 6
  misc_feature: MA Experiment 108573 PARAMETER Experiment Name: At_Drought_cDNA_P Parameter: Tissue Value: Aerial
  misc_feature: MA Experiment 108573 PARAMETER Experiment Name: At_Drought_cDNA_P Parameter: Treatment Value: Drought vs. No Drought
  misc_feature: MA Experiment ID: 20000087 Result: Up-regulated in Transcription
  misc_feature: MA Experiment 20000087 PARAMETER Experiment Name: At_100uM_ABA_Mutants_cDNA_P Parameter: Plant Line Value: WS
  misc_feature: MA Experiment 20000087 PARAMETER Experiment Name: At_100uM_ABA_Mutants_cDNA_P Parameter: Timepoint (hr) Value: 6
  misc_feature: MA Experiment 20000087 PARAMETER Experiment Name: At_100uM_ABA_Mutants_cDNA_P Parameter: Tissue Value: Aerial
  misc_feature: MA Experiment 20000087 PARAMETER Experiment Name: At_100uM_ABA_Mutants_cDNA_P Parameter: Treatment Value: 100uM ABA vs. No Treatment
  misc_feature: MA Experiment ID: 20000117 Result: Up-regulated in Transcription
  misc_feature: MA Experiment 20000117 PARAMETER Experiment Name: At_100uM_ABA_Mutants_cDNA_P Parameter: Plant Line Value: Columbia
  misc_feature: MA Experiment 20000117 PARAMETER Experiment Name: At_100uM_ABA_Mutants_cDNA_P Parameter: Timepoint (hr) Value: 6
  misc_feature: MA Experiment 20000117 PARAMETER Experiment Name: At_100uM_ABA_Mutants_cDNA_P Parameter: Tissue Value: Aerial
  misc_feature: MA Experiment 20000117 PARAMETER Experiment Name: At_100uM_ABA_Mutants_cDNA_P Parameter: Treatment Value: 100uM ABA vs. No Treatment
  misc_feature: MA Experiment ID: 20000179 Result: Up-regulated in Transcription
  misc_feature: MA Experiment 20000179 PARAMETER Experiment Name: At_Germinating_Seeds_P Parameter: Age (hr) Value: 6 vs. 0
  misc_feature: MA Experiment 20000179 PARAMETER Experiment Name: At_Germinating_Seeds_P Parameter: Tissue Value: Germinating Seeds
  misc_feature: MA Experiment ID: 20000180 Result: Up-regulated in Transcription
  misc_feature: MA Experiment 20000180 PARAMETER Experiment Name: At_Germinating_Seeds_P Parameter: Age (hr) Value: 24 vs. 0
  misc_feature: MA Experiment 20000180 PARAMETER Experiment Name: At_Germinating_Seeds_P Parameter: Tissue Value: Germinating Seeds
  misc_feature: MA Experiment ID: 20000185 Result: Up-regulated in Transcription
  misc_feature: MA Experiment 20000185 PARAMETER Experiment Name: At_Roots__P Parameter: Age (day) Value: 7 vs. 21
  misc_feature: MA Experiment 20000185 PARAMETER Experiment Name: At_Roots__P Parameter: Organism Value: A. thaliana
  misc_feature: MA Experiment 20000185 PARAMETER Experiment Name: At_Roots__P Parameter: Tissue Value: Roots vs. Whole Plant
  misc_feature: MA Experiment ID: 20000234 Result: Down-regulated in Transcription
  misc_feature: MA Experiment 20000234 PARAMETER Experiment Name: At_Siliques_P Parameter: Age (day) Value: 21
  misc_feature: MA Experiment 20000234 PARAMETER Experiment Name: At_Siliques_P Parameter: Organism Value: A. thaliana
  misc_feature: MA Experiment 20000234 PARAMETER Experiment Name: At_Siliques_P Parameter: Plant Line Value: WS
  misc_feature: MA Experiment 20000234 PARAMETER Experiment Name: At_Siliques_P Parameter: Tissue Value: Less Than 5mm Siliques vs. Whole Plant
  misc_feature: MA Experiment ID: 20000235 Result: Down-regulated in Transcription
  misc_feature: MA Experiment 20000235 PARAMETER Experiment Name: At_Siliques_P Parameter: Age (day) Value: 21
  misc_feature: MA Experiment 20000235 PARAMETER Experiment Name: At_Siliques_P Parameter: Organism Value: A. thaliana
  misc_feature: MA Experiment 20000235 PARAMETER Experiment Name: At_Siliques_P Parameter: Plant Line Value: WS
  misc_feature: MA Experiment 20000235 PARAMETER Experiment Name: At_Siliques_P Parameter: Tissue Value: 5-10mm Siliques vs. Whole Plant
  misc_feature: MA Experiment ID: 20000264 Result: Down-regulated in Transcription
  misc_feature: MA Experiment 20000264 PARAMETER Experiment Name: At_Open_Flower_P Parameter: Age (day) Value: 21
  misc_feature: MA Experiment 20000264 PARAMETER Experiment Name: At_Open_Flower_P Parameter: Plant Line Value: WS
  misc_feature: MA Experiment 20000264 PARAMETER Experiment Name: At_Open_Flower_P Parameter: Tissue Value: Open Flower vs. Whole Plant
  misc_feature: MA Experiment ID: 20000265 Result: Down-regulated in Transcription
  misc_feature: MA Experiment 20000265 PARAMETER Experiment Name: At_Open_Flower_P Parameter: Age (day) Value: 21
  misc_feature: MA Experiment 20000265 PARAMETER Experiment Name: At_Open_Flower_P Parameter: Plant Line Value: WS
  misc_feature: MA Experiment 20000265 PARAMETER Experiment Name: At_Open_Flower_P Parameter: Tissue Value: Closed Flower vs. Whole Plant
  misc_feature: MA Experiment ID: 20000286 Result: Down-regulated in Transcription
  misc_feature: MA Experiment 20000286 PARAMETER Experiment Name: At_Open_Flower_P Parameter: Age (day) Value: 21
  misc_feature: MA Experiment 20000286 PARAMETER Experiment Name: At_Open_Flower_P Parameter: Plant Line Value: WS
  misc_feature: MA Experiment 20000286 PARAMETER Experiment Name: At_Open_Flower_P Parameter: Tissue Value: Half Open vs. Whole Plant
  misc_feature: MA Experiment ID: 20000439 Result: Up-regulated in Transcription
  misc_feature: MA Experiment 20000439 PARAMETER Experiment Name: At_Roots__P Parameter: Age (day) Value: 14 vs. 21
  misc_feature: MA Experiment 20000439 PARAMETER Experiment Name: At_Roots__P Parameter: Organism Value: A. thaliana
  misc_feature: MA Experiment 20000439 PARAMETER Experiment Name: At_Roots__P Parameter: Tissue Value: Roots vs. Whole Plant
  misc_feature: MA Experiment ID: 20001905 Result: Up-regulated in Transcription
  misc_feature: MA Experiment 20001905 PARAMETER Experiment Name: At_Drought_Reproduction_P Parameter: Age (day) Value: 40
  misc_feature: MA Experiment 20001905 PARAMETER Experiment Name: At_Drought_Reproduction_P Parameter: Organism Value: A. thaliana
  misc_feature: MA Experiment 20001905 PARAMETER Experiment Name: At_Drought_Reproduction_P Parameter: Plant Line Value: WS
  misc_feature: MA Experiment 20001905 PARAMETER Experiment Name: At_Drought_Reproduction_P Parameter: Timepoint (day) Value: 10
  misc_feature: MA Experiment 20001905 PARAMETER Experiment Name: At_Drought_Reproduction_P Parameter: Tissue Value: Rosettes
  misc_feature: MA Experiment 20001905 PARAMETER Experiment Name: At_Drought_Reproduction_P Parameter: Treatment Value: Drought vs. No Drought

SEQ ID NO: 36391 - protein, 356 aa, Arabidopsis thaliana; identical to SEQ ID NO: 29846
  peptide (1)..(356): Ceres Seq. ID no. 12580444
  misc_feature (45)..(339): Homolog of NCBI NO: 38346715 NR Description: OSJNBa0086O06.13 [Oryza sativa (japonica
  misc_feature (53)..(308): Homolog of NCBI NO: 14326504 NR Description: At2g33620/F4P9.39 [Arabidopsis thaliana]
  misc_feature (53)..(308): Homolog of NCBI NO: 37537056 NR Description: putative AT-Hook DNA-binding protein
  misc_feature (5)..(300): Homolog of NCBI NO: 8809639 NR Description: contains similarity to DNA-binding
  misc_feature (38)..(115): Homolog of NCBI NO: 15242131 NR Description: putative protein; protein id: At5g51590.1
  misc_feature (150)..(331): Homolog of NCBI NO: 15242131 NR Description: putative protein; protein id: At5g51590.1
  misc_feature (23)..(321): Homolog of NCBI NO: 15235023 NR Description: putative protein
  misc_feature (5)..(356): Homolog of NCBI NO: 15235790 NR Description: putative DNA binding protein
  misc_feature (5)..(356): Homolog of NCBI NO: 7485570 NR Description: hypothetical protein F16J13.150 - Arabidopsis
  misc_feature (1)..(356): Homolog of NCBI NO: 22328578 NR Description: putative DNA-binding protein
  misc_feature (45)..(339): Homolog of NCBI NO: 38346715 NR Description: OSJNBa0086O06.13 [Oryza sativa (japonica
  misc_feature (53)..(308): Homolog of NCBI NO: 14326504 NR Description: At2g33620/F4P9.39 [Arabidopsis thaliana]
  misc_feature (53)..(308): Homolog of NCBI NO: 37537056 NR Description: putative AT-Hook DNA-binding protein
  misc_feature (5)..(300): Homolog of NCBI NO: 8809639 NR Description: contains similarity to DNA-binding
  misc_feature (38)..(115): Homolog of NCBI NO: 15242131 NR Description: putative protein; protein id: At5g51590.1
  misc_feature (150)..(331): Homolog of NCBI NO: 15242131 NR Description: putative protein; protein id: At5g51590.1
  misc_feature (23)..(321): Homolog of NCBI NO: 15235023 NR Description: putative protein
  misc_feature (5)..(356): Homolog of NCBI NO: 15235790 NR Description: putative DNA binding protein
  misc_feature (5)..(356): Homolog of NCBI NO: 7485570 NR Description: hypothetical protein F16J13.150 - Arabidopsis
  misc_feature (1)..(356): Homolog of NCBI NO: 22328578 NR Description: putative DNA-binding protein

SEQ ID NO: 36392 - protein, 352 aa, Arabidopsis thaliana; identical to SEQ ID NO: 29847
  peptide (1)..(352): Ceres Seq. ID no. 12580445
  misc_feature (41)..(335): Homolog of NCBI NO: 38346715 NR Description: OSJNBa0086O06.13 [Oryza sativa (japonica
  misc_feature (49)..(304): Homolog of NCBI NO: 14326504 NR Description: At2g33620/F4P9.39 [Arabidopsis thaliana]
  misc_feature (49)..(304): Homolog of NCBI NO: 37537056 NR Description: putative AT-Hook DNA-binding protein
  misc_feature (1)..(296): Homolog of NCBI NO: 8809639 NR Description: contains similarity to DNA-binding
  misc_feature (34)..(111): Homolog of NCBI NO: 15242131 NR Description: putative protein; protein id: At5g51590.1
  misc_feature (146)..(327): Homolog of NCBI NO: 15242131 NR Description: putative protein; protein id: At5g51590.1
  misc_feature (19)..(317): Homolog of NCBI NO: 15235023 NR Description: putative protein
  misc_feature (1)..(352): Homolog of NCBI NO: 15235790 NR Description: putative DNA binding protein
  misc_feature (1)..(352): Homolog of NCBI NO: 7485570 NR Description: hypothetical protein F16J13.150 - Arabidopsis
  misc_feature (1)..(352): Homolog of NCBI NO: 22328578 NR Description: putative DNA-binding protein
  misc_feature (41)..(335): Homolog of NCBI NO: 38346715 NR Description: OSJNBa0086O06.13 [Oryza sativa (japonica
  misc_feature (49)..(304): Homolog of NCBI NO: 14326504 NR Description: At2g33620/F4P9.39 [Arabidopsis thaliana]
  misc_feature (49)..(304): Homolog of NCBI NO: 37537056 NR Description: putative AT-Hook DNA-binding protein
  misc_feature (1)..(296): Homolog of NCBI NO: 8809639 NR Description: contains similarity to DNA-binding
  misc_feature (34)..(111): Homolog of NCBI NO: 15242131 NR Description: putative protein; protein id: At5g51590.1
  misc_feature (146)..(327): Homolog of NCBI NO: 15242131 NR Description: putative protein; protein id: At5g51590.1
  misc_feature (19)..(317): Homolog of NCBI NO: 15235023 NR Description: putative protein
  misc_feature (1)..(352): Homolog of NCBI NO: 15235790 NR Description: putative DNA binding protein
  misc_feature (1)..(352): Homolog of NCBI NO: 7485570 NR Description: hypothetical protein F16J13.150 - Arabidopsis
  misc_feature (1)..(352): Homolog of NCBI NO: 22328578 NR Description: putative DNA-binding protein

SEQ ID NO: 36393 - protein, 277 aa, Arabidopsis thaliana; identical to SEQ ID NO: 29848
  peptide (1)..(277): Ceres Seq. ID no. 12580446
  misc_feature (1)..(260): Homolog of NCBI NO: 38346715 NR Description: OSJNBa0086O06.13 [Oryza sativa (japonica
  misc_feature (1)..(229): Homolog of NCBI NO: 14326504 NR Description: At2g33620/F4P9.39 [Arabidopsis thaliana]
  misc_feature (1)..(229): Homolog of NCBI NO: 37537056 NR Description: putative AT-Hook DNA-binding protein
  misc_feature (1)..(221): Homolog of NCBI NO: 8809639 NR Description: contains similarity to DNA-binding
  misc_feature (1)..(36): Homolog of NCBI NO: 15242131 NR Description: putative protein; protein id: At5g51590.1
  misc_feature (71)..(252): Homolog of NCBI NO: 15242131 NR Description: putative protein; protein id: At5g51590.1
  misc_feature (1)..(242): Homolog of NCBI NO: 15235023 NR Description: putative protein
  misc_feature (1)..(277): Homolog of NCBI NO: 15235790 NR Description: putative DNA binding protein
  misc_feature (1)..(277): Homolog of NCBI NO: 7485570 NR Description: hypothetical protein F16J13.150 - Arabidopsis
  misc_feature (1)..(277): Homolog of NCBI NO: 22328578 NR Description: putative DNA-binding protein
  misc_feature (1)..(260): Homolog of NCBI NO: 38346715 NR Description: OSJNBa0086O06.13 [Oryza sativa (japonica
  misc_feature (1)..(229): Homolog of NCBI NO: 14326504 NR Description: At2g33620/F4P9.39 [Arabidopsis thaliana]
  misc_feature (1)..(229): Homolog of NCBI NO: 37537056 NR Description: putative AT-Hook DNA-binding protein
  misc_feature (1)..(221): Homolog of NCBI NO: 8809639 NR Description: contains similarity to DNA-binding
  misc_feature (1)..(36): Homolog of NCBI NO: 15242131 NR Description: putative protein; protein id: At5g51590.1
  misc_feature (71)..(252): Homolog of NCBI NO: 15242131 NR Description: putative protein; protein id: At5g51590.1
  misc_feature (1)..(242): Homolog of NCBI NO: 15235023 NR Description: putative protein
  misc_feature (1)..(277): Homolog of NCBI NO: 15235790 NR Description: putative DNA binding protein
  misc_feature (1)..(277): Homolog of NCBI NO: 7485570 NR Description: hypothetical protein F16J13.150 - Arabidopsis
  misc_feature (1)..(277): Homolog of NCBI NO: 22328578 NR Description: putative DNA-binding protein

SEQ ID NO: 36394 - DNA, 1296 bp, Arabidopsis thaliana
  misc_feature (1)..(1296): Ceres Seq. ID no. 13489389
  misc_feature: MA Experiment ID: 108435 Result: Down-regulated in Transcription
  misc_feature: MA Experiment 108435 PARAMETER Experiment Name: At_stm_Mutants_cDNA_P Parameter: Plant Line Value: wt Landsburg vs stm
  misc_feature: MA Experiment 108435 PARAMETER Experiment Name: At_stm_Mutants_cDNA_P Parameter: Tissue Value: Shoot Apical Meristem Region
  misc_feature: MA Experiment ID: 108462 Result: Up-regulated in Transcription
  misc_feature: MA Experiment 108462 PARAMETER Experiment Name: At_Germinating_Seeds_cDNA_P Parameter: Age (day) Value: 2 vs. 0
  misc_feature: MA Experiment 108462 PARAMETER Experiment Name: At_Germinating_Seeds_cDNA_P Parameter: Tissue Value: Germinating Seeds
  misc_feature: MA Experiment ID: 108463 Result: Up-regulated in Transcription
  misc_feature: MA Experiment 108463 PARAMETER Experiment Name: At_Germinating_Seeds_cDNA_P Parameter: Age (day) Value: 3 vs. 0
  misc_feature: MA Experiment 108463 PARAMETER Experiment Name: At_Germinating_Seeds_cDNA_P Parameter: Tissue Value: Germinating Seeds
  misc_feature: MA Experiment ID: 108464 Result: Up-regulated in Transcription
  misc_feature: MA Experiment 108464 PARAMETER Experiment Name: At_Germinating_Seeds_cDNA_P Parameter: Age (day) Value: 4 vs. 0
  misc_feature: MA Experiment 108464 PARAMETER Experiment Name: At_Germinating_Seeds_cDNA_P Parameter: Tissue Value: Germinating Seeds
  misc_feature: MA Experiment ID: 108488 Result: Down-regulated in Transcription
  misc_feature: MA Experiment ID: 108489 Result: Up-regulated in Transcription
  misc_feature: MA Experiment ID: 108501 Result: Up-regulated in Transcription
  misc_feature: MA Experiment 108501 PARAMETER Experiment Name: At_ap2_floral_buds_cDNA_P Parameter: Plant Line Value: ap2 (Ler.)
  misc_feature: MA Experiment 108501 PARAMETER Experiment Name: At_ap2_floral_buds_cDNA_P Parameter: Tissue Value: Closed Flower
  misc_feature: MA Experiment ID: 108573 Result: Up-regulated in Transcription
  misc_feature: MA Experiment 108573 PARAMETER Experiment Name: At_Drought_cDNA_P Parameter: Timepoint (hr) Value: 6
  misc_feature: MA Experiment 108573 PARAMETER Experiment Name: At_Drought_cDNA_P Parameter: Tissue Value: Aerial
  misc_feature: MA Experiment 108573 PARAMETER Experiment Name: At_Drought_cDNA_P Parameter: Treatment Value: Drought vs. No Drought
  misc_feature: MA Experiment ID: 108579 Result: Up-regulated in Transcription
  misc_feature: MA Experiment 108579 PARAMETER Experiment Name: At_4deg_Cold_cDNA_P Parameter: Temperature (deg C) Value: 4 vs. 22
  misc_feature: MA Experiment 108579 PARAMETER Experiment Name: At_4deg_Cold_cDNA_P Parameter: Timepoint (hr) Value: 6
  misc_feature: MA Experiment 108579 PARAMETER Experiment Name: At_4deg_Cold_cDNA_P Parameter: Tissue Value: Aerial
  misc_feature: MA Experiment ID: 108595 Result: Down-regulated in Transcription
  misc_feature: MA Experiment 108595 PARAMETER Experiment Name: At_Ler-pi_Ovule_cDNA_P Parameter: Plant Line Value: null
  misc_feature: MA Experiment ID: 20000030 Result: Up-regulated in Transcription
  misc_feature: MA Experiment 20000030 PARAMETER Experiment Name: At_CS6630_Roots_cDNA_P Parameter: Plant Line Value: CS6630 vs. WS
  misc_feature: MA Experiment 20000030 PARAMETER Experiment Name: At_CS6630_Roots_cDNA_P Parameter: Tissue Value: Roots
  misc_feature: MA Experiment ID: 20000069 Result: Down-regulated in Transcription
  misc_feature: MA Experiment 20000069 PARAMETER Experiment Name: At_100uM_ABA_Mutants_cDNA_P Parameter: Plant Line Value: CS23
  misc_feature: MA Experiment 20000069 PARAMETER Experiment Name: At_100uM_ABA_Mutants_cDNA_P Parameter: Timepoint (hr) Value: 6
  misc_feature: MA Experiment 20000069 PARAMETER Experiment Name: At_100uM_ABA_Mutants_cDNA_P Parameter: Tissue Value: Aerial
  misc_feature: MA Experiment 20000069 PARAMETER Experiment Name: At_100uM_ABA_Mutants_cDNA_P Parameter: Treatment Value: 100uM ABA vs. No Treatment
  misc_feature: MA Experiment ID: 20000070 Result: Down-regulated in Transcription
  misc_feature: MA Experiment 20000070 PARAMETER Experiment Name: At_100uM_ABA_Mutants_cDNA_P Parameter: Plant Line Value: CS24
  misc_feature: MA Experiment 20000070 PARAMETER Experiment Name: At_100uM_ABA_Mutants_cDNA_P Parameter: Timepoint (hr) Value: 6
  misc_feature: MA Experiment 20000070 PARAMETER Experiment Name: At_100uM_ABA_Mutants_cDNA_P Parameter: Tissue Value: Aerial
  misc_feature: MA Experiment 20000070 PARAMETER Experiment Name: At_100uM_ABA_Mutants_cDNA_P Parameter: Treatment Value: 100uM ABA vs. No Treatment
  misc_feature: MA Experiment ID: 20000071 Result: Down-regulated in Transcription
  misc_feature: MA Experiment 20000071 PARAMETER Experiment Name: At_100uM_ABA_Mutants_cDNA_P Parameter: Plant Line Value: CS8104
  misc_feature: MA Experiment 20000071 PARAMETER Experiment Name: At_100uM_ABA_Mutants_cDNA_P Parameter: Timepoint (hr) Value: 6
  misc_feature: MA Experiment 20000071 PARAMETER Experiment Name: At_100uM_ABA_Mutants_cDNA_P Parameter: Tissue Value: Aerial
  misc_feature: MA Experiment 20000071 PARAMETER Experiment Name: At_100uM_ABA_Mutants_cDNA_P Parameter: Treatment Value: 100uM ABA vs. No Treatment
  misc_feature: MA Experiment ID: 20000072 Result: Down-regulated in Transcription
  misc_feature: MA Experiment 20000072 PARAMETER Experiment Name: At_100uM_ABA_Mutants_cDNA_P Parameter: Plant Line Value: CS8105
  misc_feature: MA Experiment 20000072 PARAMETER Experiment Name: At_100uM_ABA_Mutants_cDNA_P Parameter: Timepoint (hr) Value: 6
  misc_feature: MA Experiment 20000072 PARAMETER Experiment Name: At_100uM_ABA_Mutants_cDNA_P Parameter: Tissue Value: Aerial
  misc_feature: MA Experiment 20000072 PARAMETER Experiment Name: At_100uM_ABA_Mutants_cDNA_P Parameter: Treatment Value: 100uM ABA vs. No Treatment
  misc_feature: MA Experiment ID: 20000086 Result: Down-regulated in Transcription
  misc_feature: MA Experiment 20000086 PARAMETER Experiment Name: At_100uM_ABA_Mutants_cDNA_P Parameter: Plant Line Value: CS22
  misc_feature: MA Experiment 20000086 PARAMETER Experiment Name: At_100uM_ABA_Mutants_cDNA_P Parameter: Timepoint (hr) Value: 6
  misc_feature: MA Experiment 20000086 PARAMETER Experiment Name: At_100uM_ABA_Mutants_cDNA_P Parameter: Tissue Value: Aerial
  misc_feature: MA Experiment 20000086 PARAMETER Experiment Name: At_100uM_ABA_Mutants_cDNA_P Parameter: Treatment Value: 100uM ABA vs. No Treatment
  misc_feature: MA Experiment ID: 20000087 Result: Down-regulated in Transcription
  misc_feature: MA Experiment 20000087 PARAMETER Experiment Name: At_100uM_ABA_Mutants_cDNA_P Parameter: Plant Line Value: WS
  misc_feature: MA Experiment 20000087 PARAMETER Experiment Name: At_100uM_ABA_Mutants_cDNA_P Parameter: Timepoint (hr) Value: 6
  misc_feature: MA Experiment 20000087 PARAMETER Experiment Name: At_100uM_ABA_Mutants_cDNA_P Parameter: Tissue Value: Aerial
  misc_feature: MA Experiment 20000087 PARAMETER Experiment Name: At_100uM_ABA_Mutants_cDNA_P Parameter: Treatment Value: 100uM ABA vs. No Treatment
  misc_feature: MA Experiment ID: 20000088 Result: Down-regulated in Transcription
  misc_feature: MA Experiment 20000088 PARAMETER Experiment Name: At_100uM_ABA_Mutants_cDNA_P Parameter: Plant Line Value: Landsberg
  misc_feature: MA Experiment 20000088 PARAMETER Experiment Name: At_100uM_ABA_Mutants_cDNA_P Parameter: Timepoint (hr) Value: 6
  misc_feature: MA Experiment 20000088 PARAMETER Experiment Name: At_100uM_ABA_Mutants_cDNA_P Parameter: Tissue Value: Aerial
  misc_feature: MA Experiment 20000088 PARAMETER Experiment Name: At_100uM_ABA_Mutants_cDNA_P Parameter: Treatment Value: 100uM ABA vs. No Treatment
  misc_feature: MA Experiment ID: 20000090 Result: Down-regulated in Transcription
  misc_feature: MA Experiment ID: 20000117 Result: Down-regulated in Transcription
  misc_feature: MA Experiment 20000117 PARAMETER Experiment Name: At_100uM_ABA_Mutants_cDNA_P Parameter: Plant Line Value: Columbia
  misc_feature: MA Experiment 20000117 PARAMETER Experiment Name: At_100uM_ABA_Mutants_cDNA_P Parameter: Timepoint (hr) Value: 6
  misc_feature: MA Experiment 20000117 PARAMETER Experiment Name: At_100uM_ABA_Mutants_cDNA_P Parameter: Tissue Value: Aerial
  misc_feature: MA Experiment 20000117 PARAMETER Experiment Name: At_100uM_ABA_Mutants_cDNA_P Parameter: Treatment Value: 100uM ABA vs. No Treatment
  misc_feature: MA Experiment ID: 20000144 Result: Down-regulated in Transcription
  misc_feature: MA Experiment 20000144 PARAMETER Experiment Name: At_42deg_Heat_cDNA_P Parameter: Temperature (deg C) Value: 42 vs. 22
  misc_feature: MA Experiment 20000144 PARAMETER Experiment Name: At_42deg_Heat_cDNA_P Parameter: Timepoint (hr) Value: 1
  misc_feature: MA Experiment 20000144 PARAMETER Experiment Name: At_42deg_Heat_cDNA_P Parameter: Tissue Value: Aerial
  misc_feature: MA Experiment ID: 20000171 Result: Up-regulated in Transcription
  misc_feature: MA Experiment 20000171 PARAMETER Experiment Name: At_42deg_Heat_P Parameter: Age (day) Value: 14
  misc_feature: MA Experiment 20000171 PARAMETER Experiment Name: At_42deg_Heat_P Parameter: Organism Value: A. thaliana
  misc_feature: MA Experiment 20000171 PARAMETER Experiment Name: At_42deg_Heat_P Parameter: Plant Line Value: WS
  misc_feature: MA Experiment 20000171 PARAMETER Experiment Name: At_42deg_Heat_P Parameter: Temperature (deg C) Value: 42 vs. 22
  misc_feature: MA Experiment 20000171 PARAMETER Experiment Name: At_42deg_Heat_P Parameter: Timepoint (hr) Value: 1
  misc_feature: MA Experiment 20000171 PARAMETER Experiment Name: At_42deg_Heat_P Parameter: Tissue Value: Aerial
  misc_feature: MA Experiment ID: 20000184 Result: Up-regulated in Transcription
  misc_feature: MA Experiment 20000184 PARAMETER Experiment Name: At_Shoots__P Parameter: Age (day) Value: 7
  misc_feature: MA Experiment 20000184 PARAMETER Experiment Name: At_Shoots__P Parameter: Tissue Value: Shoots vs. Whole Plant
  misc_feature: MA Experiment ID: 20000214 Result: Up-regulated in Transcription
  misc_feature: MA Experiment 20000214 PARAMETER Experiment Name: At_4deg_Cold_P Parameter: Timepoint (hr) Value: 6
  misc_feature: MA Experiment ID: 20000264 Result: Down-regulated in Transcription
  misc_feature: MA Experiment 20000264 PARAMETER Experiment Name: At_Open_Flower_P Parameter: Age (day) Value: 21
  misc_feature: MA Experiment 20000264 PARAMETER Experiment Name: At_Open_Flower_P Parameter: Plant Line Value: WS
  misc_feature: MA Experiment 20000264 PARAMETER Experiment Name: At_Open_Flower_P Parameter: Tissue Value: Open Flower vs. Whole Plant
  misc_feature: MA Experiment ID: 20000265 Result: Down-regulated in Transcription
  misc_feature: MA Experiment 20000265 PARAMETER Experiment Name: At_Open_Flower_P Parameter: Age (day) Value: 21
  misc_feature: MA Experiment 20000265 PARAMETER Experiment Name: At_Open_Flower_P Parameter: Plant Line Value: WS
  misc_feature: MA Experiment 20000265 PARAMETER Experiment Name: At_Open_Flower_P Parameter: Tissue Value: Closed Flower vs. Whole Plant
  misc_feature: MA Experiment ID: 20000286 Result: Down-regulated in Transcription
  misc_feature: MA Experiment 20000286 PARAMETER Experiment Name: At_Open_Flower_P Parameter: Age (day) Value: 21
  misc_feature: MA Experiment 20000286 PARAMETER Experiment Name: At_Open_Flower_P Parameter: Plant Line Value: WS
  misc_feature: MA Experiment 20000286 PARAMETER Experiment Name: At_Open_Flower_P Parameter: Tissue Value: Half Open vs. Whole Plant
  misc_feature: MA Experiment ID: 20000495 Result: Down-regulated in Transcription
  misc_feature: MA Experiment 20000495 PARAMETER Experiment Name: At_Guard_Cells_P Parameter: Harvest Date Value: 8/2/2002
  misc_feature: MA Experiment 20000495 PARAMETER Experiment Name: At_Guard_Cells_P Parameter: Organism Value: A. thaliana
  misc_feature: MA Experiment 20000495 PARAMETER Experiment Name: At_Guard_Cells_P Parameter: Tissue Value: Guard Cells vs. Leaves
  misc_feature: MA Experiment ID: 20001451 Result: Up-regulated in Transcription
  misc_feature: MA Experiment 20001451 PARAMETER Experiment Name: At_Far-red-induction_P Parameter: Age (day) Value: 7
  misc_feature: MA Experiment 20001451 PARAMETER Experiment Name: At_Far-red-induction_P Parameter: Light Value: Far-red vs. White
  misc_feature: MA Experiment 20001451 PARAMETER Experiment Name: At_Far-red-induction_P Parameter: Organism Value: A. thaliana
  misc_feature: MA Experiment 20001451 PARAMETER Experiment Name: At_Far-red-induction_P Parameter: Plant Line Value: Columbia
  misc_feature: MA Experiment 20001451 PARAMETER Experiment Name: At_Far-red-induction_P Parameter: Timepoint (hr) Value: 24
  misc_feature: MA Experiment 20001451 PARAMETER Experiment Name: At_Far-red-induction_P Parameter: Tissue Value: Whole Plant
  misc_feature: MA Experiment ID: 20001558 Result: Up-regulated in Transcription
  misc_feature: MA Experiment 20001558 PARAMETER Experiment Name: At_Drought_Soil_Dry_P Parameter: Age (day) Value: 27
  misc_feature: MA Experiment 20001558 PARAMETER Experiment Name: At_Drought_Soil_Dry_P Parameter: Organism Value: A. thaliana
  misc_feature: MA Experiment 20001558 PARAMETER Experiment Name: At_Drought_Soil_Dry_P Parameter: Plant Line Value: WS
  misc_feature: MA Experiment 20001558 PARAMETER Experiment Name: At_Drought_Soil_Dry_P Parameter: Post Timepoint (hr) Value: 6
  misc_feature: MA Experiment 20001558 PARAMETER Experiment Name: At_Drought_Soil_Dry_P Parameter: Post-Treatment Value: Re-Water vs. No Drought
  misc_feature: MA Experiment 20001558 PARAMETER Experiment Name: At_Drought_Soil_Dry_P Parameter: Timepoint (day) Value: 13
  misc_feature: MA Experiment 20001558 PARAMETER Experiment Name: At_Drought_Soil_Dry_P Parameter: Treatment Value: Drought vs. No Drought
  misc_feature: MA Experiment ID: 20001906 Result: Up-regulated in Transcription
  misc_feature: MA Experiment 20001906 PARAMETER Experiment Name: At_Drought_Reproduction_P Parameter: Age (day) Value: 35
  misc_feature: MA Experiment 20001906 PARAMETER Experiment Name: At_Drought_Reproduction_P Parameter: Organism Value: A. thaliana
  misc_feature: MA Experiment 20001906 PARAMETER Experiment Name: At_Drought_Reproduction_P Parameter: Plant Line Value: WS
  misc_feature: MA Experiment 20001906 PARAMETER Experiment Name: At_Drought_Reproduction_P Parameter: Timepoint (day) Value: 5
  misc_feature: MA Experiment 20001906 PARAMETER Experiment Name: At_Drought_Reproduction_P Parameter: Tissue Value: Siliques
  misc_feature: MA Experiment 20001906 PARAMETER Experiment Name: At_Drought_Reproduction_P Parameter: Treatment Value: Drought vs. No Drought
  misc_feature: MA Experiment ID: 20001911 Result: Up-regulated in Transcription
  misc_feature: MA Experiment 20001911 PARAMETER Experiment Name: At_Drought_Reproduction_P Parameter: Age (day) Value: 40
  misc_feature: MA Experiment 20001911 PARAMETER Experiment Name: At_Drought_Reproduction_P Parameter: Organism Value: A. thaliana
  misc_feature: MA Experiment 20001911 PARAMETER Experiment Name: At_Drought_Reproduction_P Parameter: Plant Line Value: WS
  misc_feature: MA Experiment 20001911 PARAMETER Experiment Name: At_Drought_Reproduction_P Parameter: Timepoint (day) Value: 10
  misc_feature: MA Experiment 20001911 PARAMETER Experiment Name: At_Drought_Reproduction_P Parameter: Tissue Value: Flowers
  misc_feature: MA Experiment 20001911 PARAMETER Experiment Name: At_Drought_Reproduction_P Parameter: Treatment Value: Drought vs. No Drought
aaaataaaagtttctataagaagaaatctcgtctctgtttaattctctctttaacgttttgatccgtttccataagaacataacagagcaagaaaaaaaagaaagcacaagctttgttgttctgaagagaaaacaaacaaaacagagagtttaagacagagagaagctcatggatgtttttgctttcaatgcttctttatccatgtgtaaagatgttgccggaatcgcaggcaacatatttgcatttggactcttcgtttcaccaatgccaacgtttaggaggatcatgaggaacaaatcgacggagcaattctccggtttaccatacatttacgctctcttaaactgcttgatctgcctttggtatggcacacctttcatatcacacagcaatgccatgcttatgactgtgaattccgttggagctacgtttcagctttgctacattatcctcttcatcatgcatacagacaagaagaacaagatgaagatgcttggtttgctttttgtggtgtttgctgtggttggagtgattgtagctggaagtttgcagatacctgaccagctcacacggtggtactttgtcgggttcttgagctgcggttctcttgtttcaatgtttgcctcgccgttgtttgttattaacctagtgattcggactaagagcgttgagtttatgccgttttatctctcgctatcgactttcttgatgagtgcttccttccttctttacgggttattcaacagcgatgcctttgtttatacaccaaatggaataggaacgattcttggcattgtgcagctggctttgtactgttactaccacaggaattctatagaagaagaaacaaaagagcctttgattgtttcttacgtgtgaggttcgcgcaaagaagcaaatttatagtggggaaattaaaagaaaccagaaaatgtggtgacatcaagattctttgttgttgttgttattgttgtctactctgtgtagctcattgtgactatctaccggctttcattctctcatggcgtgaagatgtttattctctctgcttctgtcatgatcgaaggatggaagtctttttcagttttgatggctcaattgctgaagattatgtgaagacacatgacagattcactggtgtacgtgggttttgtttttttgtggtggaaatctcatggtgggtcgataacgtttgtccatatattgtttgttttttttgaagattactctatttttttgttcataagattttttttctttgatatggaaatctctggtgggttgatttgaagacc

SEQ ID NO: 36395 - protein, 236 aa, Arabidopsis thaliana
  peptide (1)..(236): Ceres Seq. ID no. 13489390
  misc_feature (15)..(104): Pfam Name: MtN3/saliva family Pfam Description: MtN3/saliva family
  misc_feature (18)..(218): Homolog of NCBI NO: 15238678 NR Description: nodulin MtN3 family protein [Arabidopsis
  misc_feature (8)..(236): Homolog of NCBI NO: 18413388 NR Description: nodulin MtN3 family protein [Arabidopsis
  misc_feature (14)..(228): Homolog of NCBI NO: 34912462 NR Description: MtN3-like protein [Oryza sativa (japonica
  misc_feature (10)..(231): Homolog of NCBI NO: 15219732 NR Description: nodulin MtN3 family protein [Arabidopsis
  misc_feature (18)..(218): Homolog of NCBI NO: 34146818 NR Description: At5g53190 [Arabidopsis thaliana]
  misc_feature (14)..(234): Homolog of NCBI NO: 34912454 NR Description: P0681B11.31 [Oryza sativa (japonica
  misc_feature (10)..(225): Homolog of NCBI NO: 18394992 NR Description: nodulin MtN3 family protein [Arabidopsis
  misc_feature (18)..(221): Homolog of NCBI NO: 34907420 NR Description: P0018C10.36 [Oryza sativa (japonica
  misc_feature (17)..(190): Homolog of NCBI NO: 34911484 NR Description: putative MtN3 [Oryza sativa (japonica
  misc_feature (1)..(236): Homolog of NCBI NO: 18400517 NR Description: nodulin MtN3 family protein [Arabidopsis
MDVFAFNASLSMCKDVAGIAGNIFAFGLFVSPMPTFRRIMRNKSTEQFSGLPYIYALLNCLICLWYGTPFISHSNAMLMTVNSVGATFQLCYIILFIMHTDKKNKMKMLGLLFVVFAVVGVIVAGSLQIPDQLTRWYFVGFLSCGSLVSMFASPLFVINLVIRTKSVEFMPFYLSLSTFLMSASFLLYGLFNSDAFVYTPNGIGTILGIVQLALYCYYHRNSIEEETKEPLIVSYV

SEQ ID NO: 36396 - protein, 225 aa, Arabidopsis thaliana
  peptide (1)..(225): Ceres Seq. ID no. 13489391
  misc_feature (4)..(93): Pfam Name: MtN3/saliva family Pfam Description: MtN3/saliva family
  misc_feature (7)..(207): Homolog of NCBI NO: 15238678 NR Description: nodulin MtN3 family protein [Arabidopsis
  misc_feature (1)..(225): Homolog of NCBI NO: 18413388 NR Description: nodulin MtN3 family protein [Arabidopsis
  misc_feature (3)..(217): Homolog of NCBI NO: 34912462 NR Description: MtN3-like protein [Oryza sativa (japonica
  misc_feature (1)..(220): Homolog of NCBI NO: 15219732 NR Description: nodulin MtN3 family protein [Arabidopsis
  misc_feature (7)..(207): Homolog of NCBI NO: 34146818 NR Description: At5g53190 [Arabidopsis thaliana]
  misc_feature (3)..(223): Homolog of NCBI NO: 34912454 NR Description: P0681B11.31 [Oryza sativa (japonica
  misc_feature (1)..(214): Homolog of NCBI NO: 18394992 NR Description: nodulin MtN3 family protein [Arabidopsis
  misc_feature (7)..(210): Homolog of NCBI NO: 34907420 NR Description: P0018C10.36 [Oryza sativa (japonica
  misc_feature (6)..(179): Homolog of NCBI NO: 34911484 NR Description: putative MtN3 [Oryza sativa (japonica
  misc_feature (1)..(225): Homolog of NCBI NO: 18400517 NR Description: nodulin MtN3 family protein [Arabidopsis
MCKDVAGIAGNIFAFGLFVSPMPTFRRIMRNKSTEQFSGLPYIYALLNCLICLWYGTPFISHSNAMLMTVNSVGATFQLCYIILFIMHTDKKNKMKMLGLLFVVFAVVGVIVAGSLQIPDQLTRWYFVGFLSCGSLVSMFASPLFVINLVIRTKSVEFMPFYLSLSTFLMSASFLLYGLFNSDAFVYTPNGIGTILGIVQLALYCYYHRNSIEEETKEPLIVSYV

SEQ ID NO: 36397 - protein, 204 aa, Arabidopsis thaliana
  peptide (1)..(204): Ceres Seq. ID no. 13489392
  misc_feature (1)..(72): Pfam Name: MtN3/saliva family Pfam Description: MtN3/saliva family
  misc_feature (1)..(186): Homolog of NCBI NO: 15238678 NR Description: nodulin MtN3 family protein [Arabidopsis
  misc_feature (1)..(204): Homolog of NCBI NO: 18413388 NR Description: nodulin MtN3 family protein [Arabidopsis
  misc_feature (1)..(196): Homolog of NCBI NO: 34912462 NR Description: MtN3-like protein [Oryza sativa (japonica
  misc_feature (1)..(199): Homolog of NCBI NO: 15219732 NR Description: nodulin MtN3 family protein [Arabidopsis
  misc_feature (1)..(186): Homolog of NCBI NO: 34146818 NR Description: At5g53190 [Arabidopsis thaliana]
  misc_feature (1)..(202): Homolog of NCBI NO: 34912454 NR Description: P0681B11.31 [Oryza sativa (japonica
  misc_feature (1)..(193): Homolog of NCBI NO: 18394992 NR Description: nodulin MtN3 family protein [Arabidopsis
  misc_feature (1)..(189): Homolog of NCBI NO: 34907420 NR Description: P0018C10.36 [Oryza sativa (japonica
  misc_feature (1)..(158): Homolog of NCBI NO: 34911484 NR Description: putative MtN3 [Oryza sativa (japonica
  misc_feature (1)..(204): Homolog of NCBI NO: 18400517 NR Description: nodulin MtN3 family protein [Arabidopsis
MPTFRRIMRNKSTEQFSGLPYIYALLNCLICLWYGTPFISHSNAMLMTVNSVGATFQLCYIILFIMHTDKKNKMKMLGLLFVVFAVVGVIVAGSLQIPDQLTRWYFVGFLSCGSLVSMFASPLFVINLVIRTKSVEFMPFYLSLSTFLMSASFLLYGLFNSDAFVYTPNGIGTILGIVQLALYCYYHRNSIEEETKEPLIVSYV

SEQ ID NO: 36398 - DNA, 1379 bp, Arabidopsis thaliana
  misc_feature (1)..(1379): Ceres Seq. ID no. 12339588
  misc_feature: MA Experiment ID: 108434 Result: Down-regulated in Transcription
  misc_feature: MA Experiment 108434 PARAMETER Experiment Name: At_Root_Tips_cDNA_P Parameter: Tissue Value: Root Tips
  misc_feature: MA Experiment ID: 108561 Result: Up-regulated in Transcription
  misc_feature: MA Experiment 108561 PARAMETER Experiment Name: At_100uM_ABA_cDNA_P Parameter: Timepoint (hr) Value: 6
  misc_feature: MA Experiment 108561 PARAMETER Experiment Name: At_100uM_ABA_cDNA_P Parameter: Tissue Value: Aerial
  misc_feature: MA Experiment 108561 PARAMETER Experiment Name: At_100uM_ABA_cDNA_P Parameter: Treatment Value: 100uM ABA vs. No Treatment
  misc_feature: MA Experiment ID: 108573 Result: Up-regulated in Transcription
  misc_feature: MA Experiment 108573 PARAMETER Experiment Name: At_Drought_cDNA_P Parameter: Timepoint (hr) Value: 6
  misc_feature: MA Experiment 108573 PARAMETER Experiment Name: At_Drought_cDNA_P Parameter: Tissue Value: Aerial
  misc_feature: MA Experiment 108573 PARAMETER Experiment Name: At_Drought_cDNA_P Parameter: Treatment Value: Drought vs. No Drought
  misc_feature: MA Experiment ID: 108594 Result: Down-regulated in Transcription
  misc_feature: MA Experiment 108594 PARAMETER Experiment Name: At_Ler-rhl_Root_cDNA_P Parameter: Plant Line Value: null
  misc_feature: MA Experiment ID: 108605 Result: Up-regulated in Transcription
  misc_feature: MA Experiment 108605 PARAMETER Experiment Name: At_100uM_ABA_cDNA_P Parameter: Timepoint (hr) Value: 6
  misc_feature: MA Experiment 108605 PARAMETER Experiment Name: At_100uM_ABA_cDNA_P Parameter: Tissue Value: Aerial
  misc_feature: MA Experiment 108605 PARAMETER Experiment Name: At_100uM_ABA_cDNA_P Parameter: Treatment Value: 100uM ABA vs. No Treatment
  misc_feature: MA Experiment ID: 108607 Result: Up-regulated in Transcription
  misc_feature: MA Experiment 108607 PARAMETER Experiment Name: At_100uM_ABA_cDNA_P Parameter: Timepoint (hr) Value: 4
  misc_feature: MA Experiment 108607 PARAMETER Experiment Name: At_100uM_ABA_cDNA_P Parameter: Tissue Value: Aerial
  misc_feature: MA Experiment 108607 PARAMETER Experiment Name: At_100uM_ABA_cDNA_P Parameter: Treatment Value: 100uM ABA vs. No Treatment
  misc_feature: MA Experiment ID: 20000069 Result: Up-regulated in Transcription
  misc_feature: MA Experiment 20000069 PARAMETER Experiment Name: At_100uM_ABA_Mutants_cDNA_P Parameter: Plant Line Value: CS23
  misc_feature: MA Experiment 20000069 PARAMETER Experiment Name: At_100uM_ABA_Mutants_cDNA_P Parameter: Timepoint (hr) Value: 6
  misc_feature: MA Experiment 20000069 PARAMETER Experiment Name: At_100uM_ABA_Mutants_cDNA_P Parameter: Tissue Value: Aerial
  misc_feature: MA Experiment 20000069 PARAMETER Experiment Name: At_100uM_ABA_Mutants_cDNA_P Parameter: Treatment Value: 100uM ABA vs. No Treatment
  misc_feature: MA Experiment ID: 20000070 Result: Up-regulated in Transcription
  misc_feature: MA Experiment 20000070 PARAMETER Experiment Name: At_100uM_ABA_Mutants_cDNA_P Parameter: Plant Line Value: CS24
  misc_feature: MA Experiment 20000070 PARAMETER Experiment Name: At_100uM_ABA_Mutants_cDNA_P Parameter: Timepoint (hr) Value: 6
  misc_feature: MA Experiment 20000070 PARAMETER Experiment Name: At_100uM_ABA_Mutants_cDNA_P Parameter: Tissue Value: Aerial
  misc_feature: MA Experiment 20000070 PARAMETER Experiment Name: At_100uM_ABA_Mutants_cDNA_P Parameter: Treatment Value: 100uM ABA vs. No Treatment
  misc_feature: MA Experiment ID: 20000071 Result: Up-regulated in Transcription
  misc_feature: MA Experiment 20000071 PARAMETER Experiment Name: At_100uM_ABA_Mutants_cDNA_P Parameter: Plant Line Value: CS8104
  misc_feature: MA Experiment 20000071 PARAMETER Experiment Name: At_100uM_ABA_Mutants_cDNA_P Parameter: Timepoint (hr) Value: 6
  misc_feature: MA Experiment 20000071 PARAMETER Experiment Name: At_100uM_ABA_Mutants_cDNA_P Parameter: Tissue Value: Aerial
  misc_feature: MA Experiment 20000071 PARAMETER Experiment Name: At_100uM_ABA_Mutants_cDNA_P Parameter: Treatment Value: 100uM ABA vs. No Treatment
  misc_feature: MA Experiment ID: 20000072 Result: Up-regulated in Transcription
  misc_feature: MA Experiment 20000072 PARAMETER Experiment Name: At_100uM_ABA_Mutants_cDNA_P Parameter: Plant Line Value: CS8105
  misc_feature: MA Experiment 20000072 PARAMETER Experiment Name: At_100uM_ABA_Mutants_cDNA_P Parameter: Timepoint (hr) Value: 6
  misc_feature: MA Experiment 20000072 PARAMETER Experiment Name: At_100uM_ABA_Mutants_cDNA_P Parameter: Tissue Value: Aerial
  misc_feature: MA Experiment 20000072 PARAMETER Experiment Name: At_100uM_ABA_Mutants_cDNA_P Parameter: Treatment Value: 100uM ABA vs. No Treatment
  misc_feature: MA Experiment ID: 20000086 Result: Up-regulated in Transcription
  misc_feature: MA Experiment 20000086 PARAMETER Experiment Name: At_100uM_ABA_Mutants_cDNA_P Parameter: Plant Line Value: CS22
  misc_feature: MA Experiment 20000086 PARAMETER Experiment Name: At_100uM_ABA_Mutants_cDNA_P Parameter: Timepoint (hr) Value: 6
  misc_feature: MA Experiment 20000086 PARAMETER Experiment Name: At_100uM_ABA_Mutants_cDNA_P Parameter: Tissue Value: Aerial
  misc_feature: MA Experiment 20000086 PARAMETER Experiment Name: At_100uM_ABA_Mutants_cDNA_P Parameter: Treatment Value: 100uM ABA vs. No Treatment
  misc_feature: MA Experiment ID: 20000087 Result: Up-regulated in Transcription
  misc_feature: MA Experiment 20000087 PARAMETER Experiment Name: At_100uM_ABA_Mutants_cDNA_P Parameter: Plant Line Value: WS
  misc_feature: MA Experiment 20000087 PARAMETER Experiment Name: At_100uM_ABA_Mutants_cDNA_P Parameter: Timepoint (hr) Value: 6
  misc_feature: MA Experiment 20000087 PARAMETER Experiment Name: At_100uM_ABA_Mutants_cDNA_P Parameter: Tissue Value: Aerial
  misc_feature: MA Experiment 20000087 PARAMETER Experiment Name: At_100uM_ABA_Mutants_cDNA_P Parameter: Treatment Value: 100uM ABA vs. No Treatment
  misc_feature: MA Experiment ID: 20000088 Result: Up-regulated in Transcription
  misc_feature: MA Experiment 20000088 PARAMETER Experiment Name: At_100uM_ABA_Mutants_cDNA_P Parameter: Plant Line Value: Landsberg
  misc_feature: MA Experiment 20000088 PARAMETER Experiment Name: At_100uM_ABA_Mutants_cDNA_P Parameter: Timepoint (hr) Value: 6
  misc_feature: MA Experiment 20000088 PARAMETER Experiment Name: At_100uM_ABA_Mutants_cDNA_P Parameter: Tissue Value: Aerial
  misc_feature: MA Experiment 20000088 PARAMETER Experiment Name: At_100uM_ABA_Mutants_cDNA_P Parameter: Treatment Value: 100uM ABA vs. No Treatment
  misc_feature: MA Experiment ID: 20000090 Result: Up-regulated in Transcription
  misc_feature: MA Experiment ID: 20000111 Result: Down-regulated in Transcription
  misc_feature: MA Experiment 20000111 PARAMETER Experiment Name: At_42deg_Heat_cDNA_P Parameter: Temperature (deg C) Value: 42 vs. 22
  misc_feature: MA Experiment 20000111 PARAMETER Experiment Name: At_42deg_Heat_cDNA_P Parameter: Timepoint (hr) Value: 6
  misc_feature: MA Experiment 20000111 PARAMETER Experiment Name: At_42deg_Heat_cDNA_P Parameter: Tissue Value: Aerial
  misc_feature: MA Experiment ID: 20000113 Result: Down-regulated in Transcription
  misc_feature: MA Experiment 20000113 PARAMETER Experiment Name: At_42deg_Heat_cDNA_P Parameter: Temperature (deg C) Value: 42 vs. 22
  misc_feature: MA Experiment 20000113 PARAMETER Experiment Name: At_42deg_Heat_cDNA_P Parameter: Timepoint (hr) Value: 8
  misc_feature: MA Experiment 20000113 PARAMETER Experiment Name: At_42deg_Heat_cDNA_P Parameter: Tissue Value: Aerial
  misc_feature: MA Experiment ID: 20000169 Result: Up-regulated in Transcription
  misc_feature: MA Experiment 20000169 PARAMETER Experiment Name: At_100uM_ABA_P Parameter: Age (day) Value: 14
  misc_feature: MA Experiment 20000169 PARAMETER Experiment Name: At_100uM_ABA_P Parameter: Organism Value: A. thaliana
  misc_feature: MA Experiment 20000169 PARAMETER Experiment Name: At_100uM_ABA_P Parameter: Plant Line Value: WS
  misc_feature: MA Experiment 20000169 PARAMETER Experiment Name: At_100uM_ABA_P Parameter: Timepoint (hr) Value: 6
  misc_feature: MA Experiment 20000169 PARAMETER Experiment Name: At_100uM_ABA_P Parameter: Tissue Value: Aerial
  misc_feature: MA Experiment 20000169 PARAMETER Experiment Name: At_100uM_ABA_P Parameter: Treatment Value: 100uM ABA vs. No Treatment
  misc_feature: MA Experiment ID: 20000171 Result: Down-regulated in Transcription
  misc_feature: MA Experiment 20000171 PARAMETER Experiment Name: At_42deg_Heat_P Parameter: Age (day) Value: 14
  misc_feature: MA Experiment 20000171 PARAMETER Experiment Name: At_42deg_Heat_P Parameter: Organism Value: A. thaliana
  misc_feature: MA Experiment 20000171 PARAMETER Experiment Name: At_42deg_Heat_P Parameter: Plant Line Value: WS
  misc_feature: MA Experiment 20000171 PARAMETER Experiment Name: At_42deg_Heat_P Parameter: Temperature (deg C) Value: 42 vs. 22
  misc_feature: MA Experiment 20000171 PARAMETER Experiment Name: At_42deg_Heat_P Parameter: Timepoint (hr) Value: 1
  misc_feature: MA Experiment 20000171 PARAMETER Experiment Name: At_42deg_Heat_P Parameter: Tissue Value: Aerial
  misc_feature: MA Experiment ID: 20000173 Result: Down-regulated in Transcription
  misc_feature: MA Experiment 20000173 PARAMETER Experiment Name: At_42deg_Heat_P Parameter: Age (day) Value: 14
  misc_feature: MA Experiment 20000173 PARAMETER Experiment Name: At_42deg_Heat_P Parameter: Organism Value: A. thaliana
  misc_feature: MA Experiment 20000173 PARAMETER Experiment Name: At_42deg_Heat_P Parameter: Plant Line Value: WS
  misc_feature: MA Experiment 20000173 PARAMETER Experiment Name: At_42deg_Heat_P Parameter: Temperature (deg C) Value: 42 vs. 22
  misc_feature: MA Experiment 20000173 PARAMETER Experiment Name: At_42deg_Heat_P Parameter: Timepoint (hr) Value: 6
  misc_feature: MA Experiment 20000173 PARAMETER Experiment Name: At_42deg_Heat_P Parameter: Tissue Value: Aerial
  misc_feature: MA Experiment ID: 20000184 Result: Down-regulated in Transcription
  misc_feature: MA Experiment 20000184 PARAMETER Experiment Name: At_Shoots__P Parameter: Age (day) Value: 7
  misc_feature: MA Experiment 20000184 PARAMETER Experiment Name: At_Shoots__P Parameter: Tissue Value: Shoots vs. Whole Plant
  misc_feature: MA Experiment ID: 20000227 Result: Down-regulated in Transcription
  misc_feature: MA Experiment 20000227 PARAMETER Experiment Name: At_Root-Tips-vs-Tops_P Parameter: Tissue Value: Root Tips vs. Root Tops
  misc_feature: MA Experiment ID: 20000234 Result: Down-regulated in Transcription
  misc_feature: MA Experiment 20000234 PARAMETER Experiment Name: At_Siliques_P Parameter: Age (day) Value: 21
  misc_feature: MA Experiment 20000234 PARAMETER Experiment Name: At_Siliques_P Parameter: Organism Value: A. thaliana
  misc_feature: MA Experiment 20000234 PARAMETER Experiment Name: At_Siliques_P Parameter: Plant Line Value: WS
  misc_feature: MA Experiment 20000234 PARAMETER Experiment Name: At_Siliques_P Parameter: Tissue Value: Less Than 5mm Siliques vs. Whole Plant
  misc_feature: MA Experiment ID: 20000235 Result: Down-regulated in Transcription
  misc_feature: MA Experiment 20000235 PARAMETER Experiment Name: At_Siliques_P Parameter: Age (day) Value: 21
  misc_feature: MA Experiment 20000235 PARAMETER Experiment Name: At_Siliques_P Parameter: Organism Value: A. thaliana
  misc_feature: MA Experiment 20000235 PARAMETER Experiment Name: At_Siliques_P Parameter: Plant Line Value: WS
  misc_feature: MA Experiment 20000235 PARAMETER Experiment Name: At_Siliques_P Parameter: Tissue Value: 5-10mm Siliques vs. Whole Plant
  misc_feature: MA Experiment ID: 20000265 Result: Down-regulated in Transcription
  misc_feature: MA Experiment 20000265 PARAMETER Experiment Name: At_Open_Flower_P Parameter: Age (day) Value: 21
  misc_feature: MA Experiment 20000265 PARAMETER Experiment Name: At_Open_Flower_P Parameter: Plant Line Value: WS
  misc_feature: MA Experiment 20000265 PARAMETER Experiment Name: At_Open_Flower_P Parameter: Tissue Value: Closed Flower vs. Whole Plant
  misc_feature: MA Experiment ID: 20000438 Result: Down-regulated in Transcription
  misc_feature: MA Experiment 20000438 PARAMETER Experiment Name: At_Shoots__P Parameter: Age (day) Value: 14
  misc_feature: MA Experiment 20000438 PARAMETER Experiment Name: At_Shoots__P Parameter: Tissue Value: Shoots vs. Whole Plant
  misc_feature: MA Experiment ID: 20000439 Result: Up-regulated in Transcription
  misc_feature: MA Experiment 20000439 PARAMETER Experiment Name: At_Roots__P Parameter: Age (day) Value: 14 vs. 21
  misc_feature: MA Experiment 20000439 PARAMETER Experiment Name: At_Roots__P Parameter: Organism Value: A. thaliana
  misc_feature: MA Experiment 20000439 PARAMETER Experiment Name: At_Roots__P Parameter: Tissue Value: Roots vs. Whole Plant
  misc_feature: MA Experiment ID: 20000451 Result: Down-regulated in Transcription
  misc_feature: MA Experiment 20000451 PARAMETER Experiment Name: At_CS6879_Shoots-Roots_P Parameter: Age (day) Value: 14
  misc_feature: MA Experiment 20000451 PARAMETER Experiment Name: At_CS6879_Shoots-Roots_P Parameter: Organism Value: A. thaliana
  misc_feature: MA Experiment 20000451 PARAMETER Experiment Name: At_CS6879_Shoots-Roots_P Parameter: Plant Line Value: CS6879 vs. WS
  misc_feature: MA Experiment 20000451 PARAMETER Experiment Name: At_CS6879_Shoots-Roots_P Parameter: Tissue Value: Roots
  misc_feature: MA Experiment ID: 20000495 Result: Up-regulated in Transcription
  misc_feature: MA Experiment 20000495 PARAMETER Experiment Name: At_Guard_Cells_P Parameter: Harvest Date Value: 8/2/2002
  misc_feature: MA Experiment 20000495 PARAMETER Experiment Name: At_Guard_Cells_P Parameter: Organism Value: A. thaliana
  misc_feature: MA Experiment 20000495 PARAMETER Experiment Name: At_Guard_Cells_P Parameter: Tissue Value: Guard Cells vs. Leaves
  misc_feature: MA Experiment ID: 20000527 Result: Down-regulated in Transcription
  misc_feature: MA Experiment 20000527 PARAMETER Experiment Name: At_10percent_PEG_P Parameter: Age (day) Value: 20
  misc_feature: MA Experiment 20000527 PARAMETER Experiment Name: At_10percent_PEG_P Parameter: Organism Value: A. thaliana
  misc_feature: MA Experiment 20000527 PARAMETER Experiment Name: At_10percent_PEG_P Parameter: Plant Line Value: WS
  misc_feature: MA Experiment 20000527 PARAMETER Experiment Name: At_10percent_PEG_P Parameter: Timepoint (day) Value: 20
  misc_feature: MA Experiment 20000527 PARAMETER Experiment Name: At_10percent_PEG_P Parameter: Tissue Value: Whole Plant
  misc_feature: MA Experiment 20000527 PARAMETER Experiment Name: At_10percent_PEG_P Parameter: Treatment Value: 10percent PEG vs. No Treatment
  misc_feature: MA Experiment ID: 20000575 Result: Down-regulated in Transcription
  misc_feature: MA Experiment 20000575 PARAMETER Experiment Name: At_100uM_ABA_Mutants__P Parameter: Organism Value: A. thaliana
  misc_feature: MA Experiment 20000575 PARAMETER Experiment Name: At_100uM_ABA_Mutants__P Parameter: Plant Line Value: CS22
  misc_feature: MA Experiment 20000575 PARAMETER Experiment Name: At_100uM_ABA_Mutants__P Parameter: Timepoint (hr) Value: 6
  misc_feature: MA Experiment 20000575 PARAMETER Experiment Name: At_100uM_ABA_Mutants__P Parameter: Tissue Value: Whole Plant
  misc_feature: MA Experiment 20000575 PARAMETER Experiment Name: At_100uM_ABA_Mutants__P Parameter: Treatment Value: 1uM ABA vs. No Treatment
  misc_feature: MA Experiment ID: 20000709 Result: Down-regulated in Transcription
  misc_feature: MA Experiment 20000709 PARAMETER Experiment Name: At_15mM_NH4NO3_L-to-H_P Parameter: Age (hr) Value: 14
  misc_feature: MA Experiment 20000709 PARAMETER Experiment Name: At_15mM_NH4NO3_L-to-H_P Parameter: Organism Value: A. thaliana
  misc_feature: MA Experiment 20000709 PARAMETER Experiment Name: At_15mM_NH4NO3_L-to-H_P Parameter: Plant Line Value: WS
  misc_feature: MA Experiment 20000709 PARAMETER Experiment Name: At_15mM_NH4NO3_L-to-H_P Parameter: Timepoint (hr) Value: 4
  misc_feature: MA Experiment 20000709 PARAMETER Experiment Name: At_15mM_NH4NO3_L-to-H_P Parameter: Tissue Value: Aerial
  misc_feature: MA Experiment 20000709 PARAMETER Experiment Name: At_15mM_NH4NO3_L-to-H_P Parameter: Treatment Value: 15mM NH4NO3 vs. 30mM Mannitol
  misc_feature: MA Experiment ID: 20000794 Result: Up-regulated in Transcription
  misc_feature: MA Experiment 20000794 PARAMETER Experiment Name: At_Petals_P Parameter: Age (day) Value: 23-25 days
  misc_feature: MA Experiment 20000794 PARAMETER Experiment Name: At_Petals_P Parameter: Plant Line Value: WS
  misc_feature: MA Experiment 20000794 PARAMETER Experiment Name: At_Petals_P Parameter: Tissue Value: Petals vs. Whole plant
  misc_feature: MA Experiment ID: 20001554 Result: Up-regulated in Transcription
  misc_feature: MA Experiment 20001554 PARAMETER Experiment Name: At_Drought_Soil_Dry_P Parameter: Age (day) Value: 21
  misc_feature: MA Experiment 20001554 PARAMETER Experiment Name: At_Drought_Soil_Dry_P Parameter: Organism Value: A. thaliana
  misc_feature: MA Experiment 20001554 PARAMETER Experiment Name: At_Drought_Soil_Dry_P Parameter: Plant Line Value: WS
  misc_feature: MA Experiment 20001554 PARAMETER Experiment Name: At_Drought_Soil_Dry_P Parameter: Post Timepoint (hr) Value: None
  misc_feature: MA Experiment 20001554 PARAMETER Experiment Name: At_Drought_Soil_Dry_P Parameter: Post-Treatment Value: None
  misc_feature: MA Experiment 20001554 PARAMETER Experiment Name: At_Drought_Soil_Dry_P Parameter: Timepoint (day) Value: 7
  misc_feature: MA Experiment 20001554 PARAMETER Experiment Name: At_Drought_Soil_Dry_P Parameter: Treatment Value: Drought vs. No Drought
  misc_feature: MA Experiment ID: 20001558 Result: Down-regulated in Transcription
  misc_feature: MA Experiment 20001558 PARAMETER Experiment Name: At_Drought_Soil_Dry_P Parameter: Age (day) Value: 27
  misc_feature: MA Experiment 20001558 PARAMETER Experiment Name: At_Drought_Soil_Dry_P Parameter: Organism Value: A. thaliana
  misc_feature: MA Experiment 20001558 PARAMETER Experiment Name: At_Drought_Soil_Dry_P Parameter: Plant Line Value: WS
  misc_feature: MA Experiment 20001558 PARAMETER Experiment Name: At_Drought_Soil_Dry_P Parameter: Post Timepoint (hr) Value: 6
  misc_feature: MA Experiment 20001558 PARAMETER Experiment Name: At_Drought_Soil_Dry_P Parameter: Post-Treatment Value: Re-Water vs. No Drought
  misc_feature: MA Experiment 20001558 PARAMETER Experiment Name: At_Drought_Soil_Dry_P Parameter: Timepoint (day) Value: 13
  misc_feature: MA Experiment 20001558 PARAMETER Experiment Name: At_Drought_Soil_Dry_P Parameter: Treatment Value: Drought vs. No Drought
  misc_feature: MA Experiment ID: 20001560 Result: Down-regulated in Transcription
  misc_feature: MA Experiment 20001560 PARAMETER Experiment Name: At_Drought_Soil_Dry_P Parameter: Age (day) Value: 28
  misc_feature: MA Experiment 20001560 PARAMETER Experiment Name: At_Drought_Soil_Dry_P Parameter: Organism Value: A. thaliana
  misc_feature: MA Experiment 20001560 PARAMETER Experiment Name: At_Drought_Soil_Dry_P Parameter: Plant Line Value: WS
  misc_feature: MA Experiment 20001560 PARAMETER Experiment Name: At_Drought_Soil_Dry_P Parameter: Post Timepoint (hr) Value: None
  misc_feature: MA Experiment 20001560 PARAMETER Experiment Name: At_Drought_Soil_Dry_P Parameter: Post-Treatment Value: None
  misc_feature: MA Experiment 20001560 PARAMETER Experiment Name: At_Drought_Soil_Dry_P Parameter: Timepoint (day) Value: 14
  misc_feature: MA Experiment 20001560 PARAMETER Experiment Name: At_Drought_Soil_Dry_P Parameter: Treatment Value: Drought vs. No Drought
  misc_feature: MA Experiment ID: 20001911 Result: Down-regulated in Transcription
  misc_feature: MA Experiment 20001911 PARAMETER Experiment Name: At_Drought_Reproduction_P Parameter: Age (day) Value: 40
  misc_feature: MA Experiment 20001911 PARAMETER Experiment Name: At_Drought_Reproduction_P Parameter: Organism Value: A. thaliana
  misc_feature: MA Experiment 20001911 PARAMETER Experiment Name: At_Drought_Reproduction_P Parameter: Plant Line Value: WS
  misc_feature: MA Experiment 20001911 PARAMETER Experiment Name: At_Drought_Reproduction_P Parameter: Timepoint (day) Value: 10
  misc_feature: MA Experiment 20001911 PARAMETER Experiment Name: At_Drought_Reproduction_P Parameter: Tissue Value: Flowers
  misc_feature: MA Experiment 20001911 PARAMETER Experiment Name: At_Drought_Reproduction_P Parameter: Treatment Value: Drought vs. No Drought
aaattcccagacgtggtggagtgaacaaccaaaaaaacaacatgattgattgattctgaaattcactttaattttcaagagagagtttctgaggatcttgatatcagaatctgtcatgagagaagcaggagaagagaaagtggcgtggaagtactttaccagagatgttgtgccgtttgctgcgatgtttgcggtggagtgtgccactgttgggtcaaacacgctgtttaaggctgctactttaagaggattgagcttctatgtctttgtcttctactcttatattgtttcaacacttctccttcttccactttctgtaatctttggaaggtcaagaagattaccagcagctaagtctcctcttttcttcaagattttcttacttgggcttgttggattgctggttgtaaaggtattgcatacagttccccaactcttgcatctgctatcagcaatctcacaccggctttcacattcacactcgctgttatcttcaggatggagcaagtaaggttaaggagctctgcgactcaggctaaaatcattggtgcaatactatctatatctggtgctctggtagttgtgctgtataaaggcccacaagttctcgcctctgcatcttttacaactgtattacctaccgttacacttcaccagcatttgacctcaatagagtcaagctggataatcggagggctcttgcttgcttcacagtattttcttatatccgtctgactcgtgtcatggaggtttaccctgaagagataaccgtagtcttcttctacaatttatttgcaacactaatctcagtaccagtatgtctttttgcggagagcaacttgacttcttgggtgcttaaaccagacatttccctcgctgcaatcatatactcgggagtcttcgtttcattattcagcgcgcttacccacacatggggtctgcatctgaagggtccggtatacatatccttgttcaggccattgtctattgcgattgcagtcgccatgggtgctatattcctcggcgatgcacttcaccttgggagtgtcattggatcaatgatattgtgcattggattctacactgtgatttggggcaaagcaagagaggatacaatcaaaactgtagctggttctgagcagtcacctttgctgcttacacatatcatagaagatggagcctttccattaagctaggattgatgcaagtgaaatccttatactatttattaataaatatggatccctaaaagaggtgtaccatatatgtttatatatgtctatagttacatataagatatctgttctttttttcttgttttattttgatgttacatatgaatgagaattatgaatctataagaaatatttggtcctttt

SEQ ID NO: 36399 - protein, 150 aa, Arabidopsis thaliana
  peptide (1)..(150): Ceres Seq. ID no. 12339589
  misc_feature (1)..(138): Homolog of NCBI NO: 11994130 NR Description: contains similarity to integral membrane protein
  misc_feature (25)..(144): Homolog of NCBI NO: 18414474 NR Description: hypothetical protein; protein id: At4g15540.1
  misc_feature (1)..(122): Homolog of NCBI NO: 21594034 NR Description: nodulin MtN21-like protein [Arabidopsis thaliana]
  misc_feature (1)..(122): Homolog of NCBI NO: 18405635 NR Description: expressed protein
  misc_feature (1)..(144): Homolog of NCBI NO: 19347832 NR Description: unknown protein [Arabidopsis thaliana]
  misc_feature (1)..(146): Homolog of NCBI NO: 10177510 NR Description: nodulin-like protein [Arabidopsis thaliana]
  misc_feature (1)..(146): Homolog of NCBI NO: 15242612 NR Description: putative protein; protein id: At5g40230.1
  misc_feature (1)..(61): Homolog of NCBI NO: 15242614 NR Description: putative protein; protein id: At5g40240.1
  misc_feature (70)..(150): Homolog of NCBI NO: 15242614 NR Description: putative protein; protein id: At5g40240.1
  misc_feature (1)..(150): Homolog of NCBI NO: 10177511 NR Description: nodulin-like protein [Arabidopsis thaliana]
MEVYPEEITVVFFYNLFATLISVPVCLFAESNLTSWVLKPDISLAAIIYSGVFVSLFSALTHTWGLHLKGPVYISLFRPLSIAIAVAMGAIFLGDALHLGSVIGSMILCIGFYTVIWGKAREDTIKTVAGSEQSPLLLTHIIEDGAFPLS

SEQ ID NO: 36400 - protein, 131 aa, Arabidopsis thaliana
  peptide (1)..(131): Ceres Seq. ID no. 12339590
  misc_feature (30)..(94): Pfam Name: Integral membrane protein DUF6 Pfam Description: Integral membrane protein DUF6
  misc_feature (6)..(118): Homolog of NCBI NO: 7485048 NR Description: hypothetical protein - Arabidopsis thaliana
  misc_feature (16)..(98): Homolog of NCBI NO: 11994130 NR Description: contains similarity to integral membrane protein
  misc_feature (6)..(118): Homolog of NCBI NO: 18414474 NR Description: hypothetical protein; protein id: At4g15540.1
  misc_feature (9)..(94): Homolog of NCBI NO: 21594034 NR Description: nodulin MtN21-like protein [Arabidopsis thaliana]
  misc_feature (9)..(94): Homolog of NCBI NO: 18405635 NR Description: expressed protein
  misc_feature (27)..(95): Homolog of NCBI NO: 19347832 NR Description: unknown protein [Arabidopsis thaliana]
  misc_feature (24)..(96): Homolog of NCBI NO: 10177510 NR Description: nodulin-like protein [Arabidopsis thaliana]
  misc_feature (2)..(96): Homolog of NCBI NO: 15242612 NR Description: putative protein; protein id: At5g40230.1
  misc_feature (1)..(96): Homolog of NCBI NO: 15242614 NR Description: putative protein; protein id: At5g40240.1
  misc_feature (1)..(96): Homolog of NCBI NO: 10177511 NR Description: nodulin-like protein [Arabidopsis thaliana]
MREAGEEKVAWKYFTRDVVPFAAMFAVECATVGSNTLFKAATLRGLSFYVFVFYSYIVSTLLLLPLSVIFGRSRRLPAAKSPLFFKIFLLGLVGLLVVKVLHTVPQLLHLLSAISHRLSHSHSLLSSGWSK

SEQ ID NO: 36401 - protein, 108 aa, Arabidopsis thaliana
  peptide (1)..(108): Ceres Seq. ID no. 12339591
  misc_feature (7)..(71): Pfam Name: Integral membrane protein DUF6 Pfam Description: Integral membrane protein DUF6
  misc_feature (1)..(95): Homolog of NCBI NO: 7485048 NR Description: hypothetical protein - Arabidopsis thaliana
  misc_feature (1)..(75): Homolog of NCBI NO: 11994130 NR Description: contains similarity to integral membrane protein
  misc_feature (1)..(95): Homolog of NCBI NO: 18414474 NR Description: hypothetical protein; protein id: At4g15540.1
  misc_feature (1)..(71): Homolog of NCBI NO: 21594034 NR Description: nodulin MtN21-like protein [Arabidopsis thaliana]
  misc_feature (1)..(71): Homolog of NCBI NO: 18405635 NR Description: expressed protein
  misc_feature (4)..(72): Homolog of NCBI NO: 19347832 NR Description: unknown protein [Arabidopsis thaliana]
  misc_feature (1)..(73): Homolog of NCBI NO: 10177510 NR Description: nodulin-like protein [Arabidopsis thaliana]
  misc_feature (1)..(73): Homolog of NCBI NO: 15242612 NR Description: putative protein; protein id: At5g40230.1
  misc_feature (1)..(73): Homolog of NCBI NO: 15242614 NR Description: putative protein; protein id: At5g40240.1
  misc_feature (1)..(73): Homolog of NCBI NO: 10177511 NR Description: nodulin-like protein [Arabidopsis thaliana]
MFAVECATVGSNTLFKAATLRGLSFYVFVFYSYIVSTLLLLPLSVIFGRSRRLPAAKSPLFFKIFLLGLVGLLVVKVLHTVPQLLHLLSAISHRLSHSHSLLSSGWSK

SEQ ID NO: 36402 - DNA, 1517 bp, Arabidopsis thaliana
  misc_feature (1)..(1517): Ceres Seq. ID no. 12329204
  misc_feature: MA Experiment ID: 20000173 Result: Down-regulated in Transcription
  misc_feature: MA Experiment 20000173 PARAMETER Experiment Name: At_42deg_Heat_P Parameter: Age (day) Value: 14
  misc_feature: MA Experiment 20000173 PARAMETER Experiment Name: At_42deg_Heat_P Parameter: Organism Value: A. thaliana
  misc_feature: MA Experiment 20000173 PARAMETER Experiment Name: At_42deg_Heat_P Parameter: Plant Line Value: WS
  misc_feature: MA Experiment 20000173 PARAMETER Experiment Name: At_42deg_Heat_P Parameter: Temperature (deg C) Value: 42 vs. 22
  misc_feature: MA Experiment 20000173 PARAMETER Experiment Name: At_42deg_Heat_P Parameter: Timepoint (hr) Value: 6
  misc_feature: MA Experiment 20000173 PARAMETER Experiment Name: At_42deg_Heat_P Parameter: Tissue Value: Aerial
  misc_feature: MA Experiment ID: 20000179 Result: Down-regulated in Transcription
  misc_feature: MA Experiment 20000179 PARAMETER Experiment Name: At_Germinating_Seeds_P Parameter: Age (hr) Value: 6 vs. 0
  misc_feature: MA Experiment 20000179 PARAMETER Experiment Name: At_Germinating_Seeds_P Parameter: Tissue Value: Germinating Seeds
  misc_feature: MA Experiment ID: 20000180 Result: Down-regulated in Transcription
  misc_feature: MA Experiment 20000180 PARAMETER Experiment Name: At_Germinating_Seeds_P Parameter: Age (hr) Value: 24 vs. 0
  misc_feature: MA Experiment 20000180 PARAMETER Experiment Name: At_Germinating_Seeds_P Parameter: Tissue Value: Germinating Seeds
  misc_feature: MA Experiment ID: 20000185 Result: Up-regulated in Transcription
  misc_feature: MA Experiment 20000185 PARAMETER Experiment Name: At_Roots__P Parameter: Age (day) Value: 7 vs. 21
  misc_feature: MA Experiment 20000185 PARAMETER Experiment Name: At_Roots__P Parameter: Organism Value: A. thaliana
  misc_feature: MA Experiment 20000185 PARAMETER Experiment Name: At_Roots__P Parameter: Tissue Value: Roots vs. Whole Plant
  misc_feature: MA Experiment ID: 20000234 Result: Up-regulated in Transcription
  misc_feature: MA Experiment 20000234 PARAMETER Experiment Name: At_Siliques_P Parameter: Age (day) Value: 21
  misc_feature: MA Experiment 20000234 PARAMETER Experiment Name: At_Siliques_P Parameter: Organism Value: A. thaliana
  misc_feature: MA Experiment 20000234 PARAMETER Experiment Name: At_Siliques_P Parameter: Plant Line Value: WS
  misc_feature: MA Experiment 20000234 PARAMETER Experiment Name: At_Siliques_P Parameter: Tissue Value: Less Than 5mm Siliques vs. Whole Plant
  misc_feature: MA Experiment ID: 20000235 Result: Up-regulated in Transcription
  misc_feature: MA Experiment 20000235 PARAMETER Experiment Name: At_Siliques_P Parameter: Age (day) Value: 21
  misc_feature: MA Experiment 20000235 PARAMETER Experiment Name: At_Siliques_P Parameter: Organism Value: A. thaliana
  misc_feature: MA Experiment 20000235 PARAMETER Experiment Name: At_Siliques_P Parameter: Plant Line Value: WS
  misc_feature: MA Experiment 20000235 PARAMETER Experiment Name: At_Siliques_P Parameter: Tissue Value: 5-10mm Siliques vs. Whole Plant
  misc_feature: MA Experiment ID: 20000264 Result: Up-regulated in Transcription
  misc_feature: MA Experiment 20000264 PARAMETER Experiment Name: At_Open_Flower_P Parameter: Age (day) Value: 21
  misc_feature: MA Experiment 20000264 PARAMETER Experiment Name: At_Open_Flower_P Parameter: Plant Line Value: WS
  misc_feature: MA Experiment 20000264 PARAMETER Experiment Name: At_Open_Flower_P Parameter: Tissue Value: Open Flower vs. Whole Plant
  misc_feature: MA Experiment ID: 20000265 Result: Up-regulated in Transcription
  misc_feature: MA Experiment 20000265 PARAMETER Experiment Name: At_Open_Flower_P Parameter: Age (day) Value: 21
  misc_feature: MA Experiment 20000265 PARAMETER Experiment Name: At_Open_Flower_P Parameter: Plant Line Value: WS
  misc_feature: MA Experiment 20000265 PARAMETER Experiment Name: At_Open_Flower_P Parameter: Tissue Value: Closed Flower vs. Whole Plant
  misc_feature: MA Experiment ID: 20000286 Result: Up-regulated in Transcription
  misc_feature: MA Experiment 20000286 PARAMETER Experiment Name: At_Open_Flower_P Parameter: Age (day) Value: 21
  misc_feature: MA Experiment 20000286 PARAMETER Experiment Name: At_Open_Flower_P Parameter: Plant Line Value: WS
  misc_feature: MA Experiment 20000286 PARAMETER Experiment Name: At_Open_Flower_P Parameter: Tissue Value: Half Open vs. Whole Plant
  misc_feature: MA Experiment ID: 20000794 Result: Up-regulated in Transcription
  misc_feature: MA Experiment 20000794 PARAMETER Experiment Name: At_Petals_P Parameter: Age (day) Value: 23-25 days
  misc_feature: MA Experiment 20000794 PARAMETER Experiment Name: At_Petals_P Parameter: Plant Line Value: WS
  misc_feature: MA Experiment 20000794 PARAMETER Experiment Name: At_Petals_P Parameter: Tissue Value: Petals vs. Whole plant
actttttctgaactcagttggtttcgattttcttcggaccttctattgttaaatcagctttataacctcacaagcttctcctctattccatagatcaaaccacaactttgtttgacctttttttgagtacttctcttgtcttttcttcttcaagtttacttagttctttgagaacaaatttctgttgattttttttctttcttgtagagggataattacaagtttaatttccctagagtgtctttaccttttgccttgtctccctctcgagacaaaaagagaaagagaaacactttctgtcctctttttttttcctctctttttctctctcgctggaaaccttttcatattcaagtgtaattttaatatttcaagcaattttctagctaattatggccttggaggctgtagtttacccgcaagatccgttctcctacatctcttgcaaagattttccgttttacgacttatactttcaagaagaagaagatcaagatccacaagatactaagaacaacattaagctagggcaaggacaaggacatggttttgcgagtaataattacaacggtagaaccggagattatagtgatgattataattacaacgaagaggatctccaatggccacgagaccttccttatggatctgccgtcgacaccgagagccagcctccaccgtcggatgtggcggcgggaggagggaggaggaaaaggaggaggacgaggagtagcaagaacaaagaagagatcgagaaccagaggatgactcacatcgccgttgaaagaaatcgccggaaacagatgaacgagtacctcgccgttctccggtctctcatgccaccttattatgctcaaaggggagatcaagcatcgatagtaggcggagccattaactacttaaaggagcttgagcatcatttacaatcaatggaacctccggttaagaccgccacagaagacaccggagccggccacgaccagaccaaaacaacctcggctagttcgtcgggaccattctcggatttctttgcatttcctcagtactcgaaccggcctacctctgcggcggcggctgaggggatggcggagatagaggtaacgatggtagagagccatgcgagtctgaaaatacttgcgaaaaagagaccgagacagcttcttaaactggtctcatcgatacagagcctaaggctcactcttctccatctaaacgtcacaactcgagacgactccgtcctctattccatcagcgtcaaggttgaagaagggagccaattgaatacagtagaagatattgcagcagctgtgaatcaaatcctaaggaggatcgaagaagagtcatcctttagctagtattgttgaattttagttatggcacatttagaggagctctaatttttcatgtgtgatcttttgctctctctttttcatatattaaataatataaatttcctttttctttttgttaacgttaattctaatgcattatatattggagtttttgtgtgattgacc

SEQ ID NO: 36403 - protein, 320 aa, Arabidopsis thaliana
  peptide (1)..(320): Ceres Seq. ID no. 12329205
  misc_feature (123)..(174): Pfam Name: Helix-loop-helix DNA-binding domain Pfam Description: Helix-loop-helix DNA-binding domain
  misc_feature (106)..(316): Homolog of NCBI NO: 15238424 NR Description: bHLH protein
  misc_feature (22)..(320): Homolog of NCBI NO: 30687365 NR Description: bHLH protein family [Arabidopsis thaliana]
  misc_feature (85)..(320): Homolog of NCBI NO: 15234187 NR Description: bHLH protein
  misc_feature (1)..(290): Homolog of NCBI NO: 28558779 NR Description: helix-loop-helix-like protein [Cucumis melo]
  misc_feature (77)..(320): Homolog of NCBI NO: 37533680 NR Description: putative helix-loop-helix DNA-binding protein
  misc_feature (1)..(49): Homolog of NCBI NO: 25513460 NR Description: F12K8.16 protein - Arabidopsis thaliana
  misc_feature (117)..(317): Homolog of NCBI NO: 25513460 NR Description: F12K8.16 protein - Arabidopsis thaliana
  misc_feature (1)..(317): Homolog of NCBI NO: 18395124 NR Description: expressed protein
  misc_feature (1)..(320): Homolog of NCBI NO: 21593808 NR Description: unknown [Arabidopsis thaliana]
  misc_feature (1)..(320): Homolog of NCBI NO: 15218391 NR Description: bHLH protein; protein id: At1g72210.1
MALEAVVYPQDPFSYISCKDFPFYDLYFQEEEDQDPQDTKNNIKLGQGQGHGFASNNYNGRTGDYSDDYNYNEEDLQWPRDLPYGSAVDTESQPPPSDVAAGGGRRKRRRTRSSKNKEEIENQRMTHIAVERNRRKQMNEYLAVLRSLMPPYYAQRGDQASIVGGAINYLKELEHHLQSMEPPVKTATEDTGAGHDQTKTTSASSSGPFSDFFAFPQYSNRPTSAAAAEGMAEIEVTMVESHASLKILAKKRPRQLLKLVSSIQSLRLTLLHLNVTTRDDSVLYSISVKVEEGSQLNTVEDIAAAVNQILRRIEEESSFS

SEQ ID NO: 36404 - protein, 196 aa, Arabidopsis thaliana
  peptide (1)..(196): Ceres Seq. ID no. 12329206
  misc_feature (1)..(50): Pfam Name: Helix-loop-helix DNA-binding domain Pfam Description: Helix-loop-helix DNA-binding domain
  misc_feature (18)..(193): Homolog of NCBI NO: 3641870 NR Description: hypothetical protein [Cicer arietinum]
  misc_feature (1)..(192): Homolog of NCBI NO: 15238424 NR Description: bHLH protein
  misc_feature (1)..(196): Homolog of NCBI NO: 30687365 NR Description: bHLH protein family [Arabidopsis thaliana]
  misc_feature (1)..(196): Homolog of NCBI NO: 15234187 NR Description: bHLH protein
  misc_feature (1)..(166): Homolog of NCBI NO: 28558779 NR Description: helix-loop-helix-like protein [Cucumis melo]
  misc_feature (1)..(196): Homolog of NCBI NO: 37533680 NR Description: putative helix-loop-helix DNA-binding protein
  misc_feature (1)..(193): Homolog of NCBI NO: 25513460 NR Description: F12K8.16 protein - Arabidopsis thaliana
  misc_feature (1)..(193): Homolog of NCBI NO: 18395124 NR Description: expressed protein
  misc_feature (1)..(196): Homolog of NCBI NO: 21593808 NR Description: unknown [Arabidopsis thaliana]
  misc_feature (1)..(196): Homolog of NCBI NO: 15218391 NR Description: bHLH protein; protein id: At1g72210.1
MTHIAVERNRRKQMNEYLAVLRSLMPPYYAQRGDQASIVGGAINYLKELEHHLQSMEPPVKTATEDTGAGHDQTKTTSASSSGPFSDFFAFPQYSNRPTSAAAAEGMAEIEVTMVESHASLKILAKKRPRQLLKLVSSIQSLRLTLLHLNVTTRDDSVLYSISVKVEEGSQLNTVEDIAAAVNQILRRIEEESSFS

SEQ ID NO: 36405 - protein, 183 aa, Arabidopsis thaliana
  peptide (1)..(183): Ceres Seq. ID no. 12329207
  misc_feature (1)..(37): Pfam Name: Helix-loop-helix DNA-binding domain Pfam Description: Helix-loop-helix DNA-binding domain
  misc_feature (5)..(180): Homolog of NCBI NO: 3641870 NR Description: hypothetical protein [Cicer arietinum]
  misc_feature (1)..(179): Homolog of NCBI NO: 15238424 NR Description: bHLH protein
  misc_feature (1)..(183): Homolog of NCBI NO: 30687365 NR Description: bHLH protein family [Arabidopsis thaliana]
  misc_feature (1)..(183): Homolog of NCBI NO: 15234187 NR Description: bHLH protein
  misc_feature (1)..(153): Homolog of NCBI NO: 28558779 NR Description: helix-loop-helix-like protein [Cucumis melo]
  misc_feature (1)..(183): Homolog of NCBI NO: 37533680 NR Description: putative helix-loop-helix DNA-binding protein
  misc_feature (1)..(180): Homolog of NCBI NO: 25513460 NR Description: F12K8.16 protein - Arabidopsis thaliana
  misc_feature (1)..(180): Homolog of NCBI NO: 18395124 NR Description: expressed protein
  misc_feature (1)..(183): Homolog of NCBI NO: 21593808 NR Description: unknown [Arabidopsis thaliana]
  misc_feature (1)..(183): Homolog of NCBI NO: 15218391 NR Description: bHLH protein; protein id: At1g72210.1
MNEYLAVLRSLMPPYYAQRGDQASIVGGAINYLKELEHHLQSMEPPVKTATEDTGAGHDQTKTTSASSSGPFSDFFAFPQYSNRPTSAAAAEGMAEIEVTMVESHASLKILAKKRPRQLLKLVSSIQSLRLTLLHLNVTTRDDSVLYSISVKVEEGSQLNTVEDIAAAVNQILRRIEEESSFS

SEQ ID NO: 36406 - DNA, 1753 bp, Arabidopsis thaliana
  misc_feature (1)..(1753): Ceres Seq. ID no. 12394650
  misc_feature: MA Experiment ID: 108573 Result: Up-regulated in Transcription
  misc_feature: MA Experiment 108573 PARAMETER Experiment Name: At_Drought_cDNA_P Parameter: Timepoint (hr) Value: 6
  misc_feature: MA Experiment 108573 PARAMETER Experiment Name: At_Drought_cDNA_P Parameter: Tissue Value: Aerial
  misc_feature: MA Experiment 108573 PARAMETER Experiment Name: At_Drought_cDNA_P Parameter: Treatment Value: Drought vs. No Drought
  misc_feature: MA Experiment ID: 20000286 Result: Down-regulated in Transcription
  misc_feature: MA Experiment 20000286 PARAMETER Experiment Name: At_Open_Flower_P Parameter: Age (day) Value: 21
  misc_feature: MA Experiment 20000286 PARAMETER Experiment Name: At_Open_Flower_P Parameter: Plant Line Value: WS
  misc_feature: MA Experiment 20000286 PARAMETER Experiment Name: At_Open_Flower_P Parameter: Tissue Value: Half Open vs. Whole Plant
aagaaggcctcattgataatttacaatcgagagagagagcgataaagtcaactcgttgactaaaatgaaagatttcccgatagcaatctcccttctgttcgctctactatcgccggttcttctaccttgctccggcgattccaccggcggcgtcgaggatgattctccagcgaccgtatgtatcgtcgggagtgggatcggaggctcatccgtagctcacttcctccgtaactactctgtttccaccggcttaaatcaagccaagatcctgatgtttgagcgtcacgagatagtcggtggacgcatgaggaccgtcactgtcgccggtgatactttcgaagccggcggttcgattctccatccgaagaactaccacgttaaggatttcgtcgaaaggttcaatctgacggttcgattaccgacgccgattgaagaatcttcagcgattggaatctgggatgggaagagatttgtcgtcaagacattcggttccggtaccaaatttccgtttttggatacgatcgtctcttgggtgaatgatctctacttgttcttacgttatgggttatcactgctgagaatgagcagcttcattgagaatacagttgataatttcttgaagtactatgaaagcttagagtcaagacctatcttcgacaatgttgaagggatgcttaaatggtcaggcttgtacaatctcacaaagctcactctacaggagaaattatctgaagctcagctttctcctttgttagtcaacgagctggttacggttattacaaggataaactatggacagagtgtactcatcagtgggttggcaggtgctgtctctttggcgggttcaggtggaggattatggtctgttgaaggtggaaactggcagatggctgcaaagctcattaatcattcagatgttacgttacacctgaacgagaaaattgaatccatttcatatctcgaaaaccattacgagcttaaatccactaaaggaaacagctacaagtgtgatgtcacagtagttgccacaccattagacgaagtggatattcagttctcacccacgatctcaattcctaagagagaactacaacacacgcacacgacatttgtgagggggcttttaaacccaggatactttgggatgaaatcgctttcagatgttccagctttggtgggaacccttgaagatcctctaattccattctcatgcatctcaattctaaggaaatatagtaaaacagatatgacatacaagatttttacgcgacaacctgcatcagattcgttgcttgatgagctcttcagtaggagaaccgaaaccgttcgaatagactggggtgcatacccaaagtaccacgcgcctgaagttttcgcaccattcatattagatgaccatcacttgtactatgtgaatgcttttgaaaacgcggcaagcacaatggagacaagtgcagtggctggtgagaacattgccagactcataatttccagattcatgacaaaggaatcattatcttcctcggacaaaagaagctgtagttctggtctgcactcagactcataaacaactttggtccccacataaacaaggactattggctgtgtgtgttttgaagaagaatatgatgtttatgtatatagacacataaaacagttttgagttactgattgtgtttgttcctcgtaacctaagcttcttcttttttttaatctttttcgagttcttgaatcagaccattggcattagcat

SEQ ID NO: 36407 - protein, 500 aa, Arabidopsis thaliana
  peptide (1)..(500): Ceres Seq. ID no. 12394651
  misc_feature (67)..(362): Homolog of NCBI NO: 13385294 NR Description: RIKEN cDNA 1200015P13; EST AI115532; EST AI448340
  misc_feature (10)..(308): Homolog of NCBI NO: 15021897 NR Description: hypothetical protein [Macaca fascicularis]
  misc_feature (10)..(364): Homolog of NCBI NO: 14388370 NR Description: hypothetical protein [Macaca fascicularis]
  misc_feature (6)..(364): Homolog of NCBI NO: 12643885 NR Description: Prenylcysteine oxidase precursor
  misc_feature (6)..(364): Homolog of NCBI NO: 21708072 NR Description: prenylcysteine lyase [Homo sapiens]
  misc_feature (6)..(364): Homolog of NCBI NO: 33620751 NR Description: prenylcysteine lyase [Homo sapiens]
  misc_feature (6)..(364): Homolog of NCBI NO: 4240305 NR Description: KIAA0908 protein [Homo sapiens]
  misc_feature (425)..(486): Homolog of NCBI NO: 40744452 NR Description: hypothetical protein AN3057.2 [Aspergillus
  misc_feature (35)..(368): Homolog of NCBI NO: 40744452 NR Description: hypothetical protein AN3057.2 [Aspergillus
  misc_feature (1)..(500): Homolog of NCBI NO: 15237560 NR Description: unknown protein
MKDFPIAISLLFALLSPVLLPCSGDSTGGVEDDSPATVCIVGSGIGGSSVAHFLRNYSVSTGLNQAKILMFERHEIVGGRMRTVTVAGDTFEAGGSILHPKNYHVKDFVERFNLTVRLPTPIEESSAIGIWDGKRFVVKTFGSGTKFPFLDTIVSWVNDLYLFLRYGLSLLRMSSFIENTVDNFLKYYESLESRPIFDNVEGMLKWSGLYNLTKLTLQEKLSEAQLSPLLVNELVTVITRINYGQSVLISGLAGAVSLAGSGGGLWSVEGGNWQMAAKLINHSDVTLHLNEKIESISYLENHYELKSTKGNSYKCDVTVVATPLDEVDIQFSPTISIPKRELQHTHTTFVRGLLNPGYFGMKSLSDVPALVGTLEDPLIPFSCISILRKYSKTDMTYKIFTRQPASDSLLDELFSRRTETVRIDWGAYPKYHAPEVFAPFILDDHHLYYVNAFENAASTMETSAVAGENIARLIISRFMTKESLSSSDKRSCSSGLHSDS

SEQ ID NO: 36408 - protein, 431 aa, Arabidopsis thaliana
  peptide (1)..(431): Ceres Seq. ID no. 12394652
  misc_feature (1)..(293): Homolog of NCBI NO: 13385294 NR Description: RIKEN cDNA 1200015P13; EST AI115532; EST AI448340
  misc_feature (1)..(239): Homolog of NCBI NO: 15021897 NR Description: hypothetical protein [Macaca fascicularis]
  misc_feature (1)..(295): Homolog of NCBI NO: 14388370 NR Description: hypothetical protein [Macaca fascicularis]
  misc_feature (1)..(295): Homolog of NCBI NO: 12643885 NR Description: Prenylcysteine oxidase precursor
  misc_feature (1)..(295): Homolog of NCBI NO: 21708072 NR Description: prenylcysteine lyase [Homo sapiens]
  misc_feature (1)..(295): Homolog of NCBI NO: 33620751 NR Description: prenylcysteine lyase [Homo sapiens]
  misc_feature (1)..(295): Homolog of NCBI NO: 4240305 NR Description: KIAA0908 protein [Homo sapiens]
  misc_feature (356)..(417): Homolog of NCBI NO: 40744452 NR Description: hypothetical protein AN3057.2 [Aspergillus
  misc_feature (1)..(299): Homolog of NCBI NO: 40744452 NR Description: hypothetical protein AN3057.2 [Aspergillus
  misc_feature (1)..(431): Homolog of NCBI NO: 15237560 NR Description: unknown protein
MFERHEIVGGRMRTVTVAGDTFEAGGSILHPKNYHVKDFVERFNLTVRLPTPIEESSAIGIWDGKRFVVKTFGSGTKFPFLDTIVSWVNDLYLFLRYGLSLLRMSSFIENTVDNFLKYYESLESRPIFDNVEGMLKWSGLYNLTKLTLQEKLSEAQLSPLLVNELVTVITRINYGQSVLISGLAGAVSLAGSGGGLWSVEGGNWQMAAKLINHSDVTLHLNEKIESISYLENHYELKSTKGNSYKCDVTVVATPLDEVDIQFSPTISIPKRELQHTHTTFVRGLLNPGYFGMKSLSDVPALVGTLEDPLIPFSCISILRKYSKTDMTYKIFTRQPASDSLLDELFSRRTETVRIDWGAYPKYHAPEVFAPFILDDHHLYYVNAFENAASTMETSAVAGENIARLIISRFMTKESLSSSDKRSCSSGLHSDS

SEQ ID NO: 36409 - protein, 420 aa, Arabidopsis thaliana
  peptide (1)..(420): Ceres Seq. ID no. 12394653
  misc_feature (1)..(282): Homolog of NCBI NO: 13385294 NR Description: RIKEN cDNA 1200015P13; EST AI115532; EST AI448340
  misc_feature (1)..(228): Homolog of NCBI NO: 15021897 NR Description: hypothetical protein [Macaca fascicularis]
  misc_feature (1)..(284): Homolog of NCBI NO: 14388370 NR Description: hypothetical protein [Macaca fascicularis]
  misc_feature (1)..(284): Homolog of NCBI NO: 12643885 NR Description: Prenylcysteine oxidase precursor
  misc_feature (1)..(284): Homolog of NCBI NO: 21708072 NR Description: prenylcysteine lyase [Homo sapiens]
  misc_feature (1)..(284): Homolog of NCBI NO: 33620751 NR Description: prenylcysteine lyase [Homo sapiens]
  misc_feature (1)..(284): Homolog of NCBI NO: 4240305 NR Description: KIAA0908 protein [Homo sapiens]
  misc_feature (345)..(406): Homolog of NCBI NO: 40744452 NR Description: hypothetical protein AN3057.2 [Aspergillus
  misc_feature (1)..(288): Homolog of NCBI NO: 40744452 NR Description: hypothetical protein AN3057.2 [Aspergillus
  misc_feature (1)..(420): Homolog of NCBI NO: 15237560 NR Description: unknown protein
MRTVTVAGDTFEAGGSILHPKNYHVKDFVERFNLTVRLPTPIEESSAIGIWDGKRFVVKTFGSGTKFPFLDTIVSWVNDLYLFLRYGLSLLRMSSFIENTVDNFLKYYESLESRPIFDNVEGMLKWSGLYNLTKLTLQEKLSEAQLSPLLVNELVTVITRINYGQSVLISGLAGAVSLAGSGGGLWSVEGGNWQMAAKLINHSDVTLHLNEKIESISYLENHYELKSTKGNSYKCDVTVVATPLDEVDIQFSPTISIPKRELQHTHTTFVRGLLNPGYFGMKSLSDVPALVGTLEDPLIPFSCISILRKYSKTDMTYKIFTRQPASDSLLDELFSRRTETVRIDWGAYPKYHAPEVFAPFILDDHHLYYVNAFENAASTMETSAVAGENIARLIISRFMTKESLSSSDKRSCSSGLHSDS

SEQ ID NO: 36410 - DNA, 1666 bp, Arabidopsis thaliana
  misc_feature (1)..(1666): Ceres Seq. ID no. 13489048
  misc_feature: MA Experiment ID: 20000307 Result: Up-regulated in Transcription
  misc_feature: MA Experiment 20000307 PARAMETER Experiment Name: At_Germinating_Seeds_Sub_P Parameter: Age (hr) Value: 24 vs. 0
  misc_feature: MA Experiment 20000307 PARAMETER Experiment Name: At_Germinating_Seeds_Sub_P Parameter: Organism Value: A. thaliana
  misc_feature: MA Experiment 20000307 PARAMETER Experiment Name: At_Germinating_Seeds_Sub_P Parameter: Plant Line Value: WS
  misc_feature: MA Experiment 20000307 PARAMETER Experiment Name: At_Germinating_Seeds_Sub_P Parameter: Tissue Value: Germinating Seeds
  misc_feature: MA Experiment ID: 20000328 Result: Up-regulated in Transcription
  misc_feature: MA Experiment 20000328 PARAMETER Experiment Name: At_42deg_Heat_Sub_P Parameter: Age (day) Value: 14
  misc_feature: MA Experiment 20000328 PARAMETER Experiment Name: At_42deg_Heat_Sub_P Parameter: Organism Value: A. thaliana
  misc_feature: MA Experiment 20000328 PARAMETER Experiment Name: At_42deg_Heat_Sub_P Parameter: Plant Line Value: WS
  misc_feature: MA Experiment 20000328 PARAMETER Experiment Name: At_42deg_Heat_Sub_P Parameter: Temperature (deg C) Value: 42 vs. 22
  misc_feature: MA Experiment 20000328 PARAMETER Experiment Name: At_42deg_Heat_Sub_P Parameter: Timepoint (hr) Value: 6
  misc_feature: MA Experiment 20000328 PARAMETER Experiment Name: At_42deg_Heat_Sub_P Parameter: Tissue Value: Aerial
  misc_feature: MA Experiment ID: 20000348 Result: Up-regulated in Transcription
  misc_feature: MA Experiment 20000348 PARAMETER Experiment Name: At_100uM_ABA_Sub_P Parameter: Age (day) Value: 14
  misc_feature: MA Experiment 20000348 PARAMETER Experiment Name: At_100uM_ABA_Sub_P Parameter: Organism Value: A. thaliana
  misc_feature: MA Experiment 20000348 PARAMETER Experiment Name: At_100uM_ABA_Sub_P Parameter: Plant Line Value: WS
  misc_feature: MA Experiment 20000348 PARAMETER Experiment Name: At_100uM_ABA_Sub_P Parameter: Timepoint (hr) Value: 1
  misc_feature: MA Experiment 20000348 PARAMETER Experiment Name: At_100uM_ABA_Sub_P Parameter: Tissue Value: Aerial
  misc_feature: MA Experiment 20000348 PARAMETER Experiment Name: At_100uM_ABA_Sub_P Parameter: Treatment Value: 100uM ABA vs. No Treatment
  misc_feature: MA Experiment ID: 20000355 Result: Up-regulated in Transcription
  misc_feature: MA Experiment 20000355 PARAMETER Experiment Name: At_Siliques_Sub_P Parameter: Age (day) Value: 21
  misc_feature: MA Experiment 20000355 PARAMETER Experiment Name: At_Siliques_Sub_P Parameter: Organism Value: A. thaliana
  misc_feature: MA Experiment 20000355 PARAMETER Experiment Name: At_Siliques_Sub_P Parameter: Plant Line Value: WS
  misc_feature: MA Experiment 20000355 PARAMETER Experiment Name: At_Siliques_Sub_P Parameter: Tissue Value: Less Than 5mm Siliques vs. Whole Plant
  misc_feature: MA Experiment ID: 20000440 Result: Up-regulated in Transcription
  misc_feature: MA Experiment 20000440 PARAMETER Experiment Name: At_Closed-Flower__Sub_P Parameter: Tissue Value: Closed Flower vs. Whole Plant
acaaacatacaaataattctttacttcaccaaaagaaaaaaaaaatgggatccatatcagaaatggtgttcgaaacttgtccatctccaaacccaattcatgtaatgctcgtctcgtttcaaggacaaggccacgtcaaccctcttcttcgtctcggcaagttaattgcttcaaagggtttactcgttaccttcgttacaacggagctttggggcaagaaaatgagacaagccaacaaaatcgttgacggtgaacttaaaccggttggttccggttcaatccggtttgagttctttgatgaagaatgggcagaggatgatgaccggagagctgatttctctttgtacattgctcacctagagagcgttgggatacgagaagtgtctaagcttgtgagaagatacgaggaagcgaacgagcctgtctcgtgtcttatcaataacccgtttatcccatgggtctgccacgtggcggaagagttcaacattccttgtgcggttctctgggttcagtcttgtgcttgtttctctgcttattaccattaccaagatggctctgtttcattccctacggaaacagagcctgagctcgatgtgaagcttccttgtgttcctgtcttgaagaacgacgagattcctagctttctccatccttcttctaggttcacgggttttcgacaagcgattcttgggcaattcaagaatctgagcaagtccttctgtgttctaatcgattcttttgactcattggaacaagaagttatcgattacatgtcaagtctttgtccggttaaaaccgttggaccgcttttcaaagttgctaggacagttacttctgacgtaagcggtgacatttgcaaatcaacagataaatgcctcgagtggttagactcgaggcctaaatcgtcagttgtctacatttcgttcgggacagttgcatatttgaagcaagaacagatcgaagagatcgctcacggagttttgaagtcgggtttatcgttcttgtgggtgattagacctccaccacacgatctgaaggtcgagacacatgtcttgcctcaagaacttaaagagagtagtgctaaaggtaaagggatgattgtggattggtgcccacaagagcaagtcttgtctcatccttcagtggcatgcttcgtgactcattgtggatggaactcgacaatggaatctttgtcttcaggtgttccggtggtttgttgtccgcaatggggagatcaagtgactgatgcagtgtatttgatcgatgttttcaagaccggggttagactaggccgtggagcgaccgaggagagggtagtgccaagggaggaagtggcggagaagcttttggaagcgacagttggggagaaggcagaggagttgagaaagaacgctttgaaatggaaggcggaggcggaagcagcggtggctccaggaggttcgtcggataagaattttagggagtttgtggagaagttaggtgcgggagtaacgaagactaaagataatggatactaggcaaaagtctttgactgtctatattctattttgataatgcattattactgttccatctttgtcttggtgaattctaaagattgcttgttttgtagttggtaaccgtggtgtaattgattaattcaatgttcggcttcggcacatgtttg

SEQ ID NO: 36411 - protein, 504 aa, Arabidopsis thaliana
  peptide (1)..(504): Ceres Seq. ID no. 13489049
  misc_feature (52)..(500): Pfam Name: UDP-glucoronosyl and UDP-glucosyl transferase Pfam Description: UDP-glucoronosyl and UDP-glucosyl transferase
  misc_feature (32)..(492): Homolog of NCBI NO: 13431605 NR Description: Limonoid UDP-glucosyltransferase (Limonoid
  misc_feature (33)..(502): Homolog of NCBI NO: 15234619 NR Description: glycosyltransferase family [Arabidopsis thaliana]
  misc_feature (21)..(503): Homolog of NCBI NO: 20259348 NR Description: putative UDP-glucose:indole-3-acetate
  misc_feature (21)..(503): Homolog of NCBI NO: 15233091 NR Description: UDP-glucosyltransferase, putative [Arabidopsis
  misc_feature (24)..(503): Homolog of NCBI NO: 9794913 NR Description: UDP-glucose:sinapate glucosyltransferase
  misc_feature (33)..(503): Homolog of NCBI NO: 21593030 NR Description: indole-3-acetate beta-glucosyltransferase like
  misc_feature (33)..(503): Homolog of NCBI NO: 15234616 NR Description: UDP-glycosyltransferase, putative [Arabidopsis
  misc_feature (21)..(504): Homolog of NCBI NO: 7433899 NR Description: probable indole-3-acetate
  misc_feature (15)..(504): Homolog of NCBI NO: 25082972 NR Description: indole-3-acetate beta-glucosyltransferase like
  misc_feature (15)..(504): Homolog of NCBI NO: 30683281 NR Description: UDP-glycosyltransferase family [Arabidopsis
KHTNNSLLHQKKKKMGSISEMVFETCPSPNPIHVMLVSFQGQGHVNPLLRLGKLIASKGLLVTFVTTELWGKKMRQANKIVDGELKPVGSGSIRFEFFDEEWAEDDDRRADFSLYIAHLESVGIREVSKLVRRYEEANEPVSCLINNPFIPWVCHVAEEFNIPCAVLWVQSCACFSAYYHYQDGSVSFPTETEPELDVKLPCVPVLKNDEIPSFLHPSSRFTGFRQAILGQFKNLSKSFCVLIDSFDSLEQEVIDYMSSLCPVKTVGPLFKVARTVTSDVSGDICKSTDKCLEWLDSRPKSSVVYISFGTVAYLKQEQIEEIAHGVLKSGLSFLWVIRPPPHDLKVETHVLPQELKESSAKGKGMIVDWCPQEQVLSHPSVACFVTHCGWNSTMESLSSGVPVVCCPQWGDQVTDAVYLIDVFKTGVRLGRGATEERVVPREEVAEKLLEATVGEKAEELRKNALKWKAEAEAAVAPGGSSDKNFREFVEKLGAGVTKTKDNGY

SEQ ID NO: 36412 - protein, 490 aa, Arabidopsis thaliana
  peptide (1)..(490): Ceres Seq. ID no. 13489050
  misc_feature (38)..(486): Pfam Name: UDP-glucoronosyl and UDP-glucosyl transferase Pfam Description: UDP-glucoronosyl and UDP-glucosyl transferase
  misc_feature (18)..(478): Homolog of NCBI NO: 13431605 NR Description: Limonoid UDP-glucosyltransferase (Limonoid
  misc_feature (19)..(488): Homolog of NCBI NO: 15234619 NR Description: glycosyltransferase family [Arabidopsis thaliana]
  misc_feature (7)..(489): Homolog of NCBI NO: 20259348 NR Description: putative UDP-glucose:indole-3-acetate
  misc_feature (7)..(489): Homolog of NCBI NO: 15233091 NR Description: UDP-glucosyltransferase, putative [Arabidopsis
  misc_feature (10)..(489): Homolog of NCBI NO: 9794913 NR Description: UDP-glucose:sinapate glucosyltransferase
  misc_feature (19)..(489): Homolog of NCBI NO: 21593030 NR Description: indole-3-acetate beta-glucosyltransferase like
  misc_feature (19)..(489): Homolog of NCBI NO: 15234616 NR Description: UDP-glycosyltransferase, putative [Arabidopsis
  misc_feature (7)..(490): Homolog of NCBI NO: 7433899 NR Description: probable indole-3-acetate
  misc_feature (1)..(490): Homolog of NCBI NO: 25082972 NR Description: indole-3-acetate beta-glucosyltransferase like
  misc_feature (1)..(490): Homolog of NCBI NO: 30683281 NR Description: UDP-glycosyltransferase family [Arabidopsis
MGSISEMVFETCPSPNPIHVMLVSFQGQGHVNPLLRLGKLIASKGLLVTFVTTELWGKKMRQANKIVDGELKPVGSGSIRFEFFDEEWAEDDDRRADFSLYIAHLESVGIREVSKLVRRYEEANEPVSCLINNPFIPWVCHVAEEFNIPCAVLWVQSCACFSAYYHYQDGSVSFPTETEPELDVKLPCVPVLKNDEIPSFLHPSSRFTGFRQAILGQFKNLSKSFCVLIDSFDSLEQEVIDYMSSLCPVKTVGPLFKVARTVTSDVSGDICKSTDKCLEWLDSRPKSSVVYISFGTVAYLKQEQIEEIAHGVLKSGLSFLWVIRPPPHDLKVETHVLPQELKESSAKGKGMIVDWCPQEQVLSHPSVACFVTHCGWNSTMESLSSGVPVVCCPQWGDQVTDAVYLIDVFKTGVRLGRGATEERVVPREEVAEKLLEATVGEKAEELRKNALKWKAEAEAAVAPGGSSDKNFREFVEKLGAGVTKTKDNGY

SEQ ID NO: 36413 - protein, 484 aa, Arabidopsis thaliana
  peptide (1)..(484): Ceres Seq. ID no. 13489051
  misc_feature (32)..(480): Pfam Name: UDP-glucoronosyl and UDP-glucosyl transferase Pfam Description: UDP-glucoronosyl and UDP-glucosyl transferase
  misc_feature (12)..(472): Homolog of NCBI NO: 13431605 NR Description: Limonoid UDP-glucosyltransferase (Limonoid
  misc_feature (13)..(482): Homolog of NCBI NO: 15234619 NR Description: glycosyltransferase family [Arabidopsis thaliana]
  misc_feature (1)..(483): Homolog of NCBI NO: 20259348 NR Description: putative UDP-glucose:indole-3-acetate
  misc_feature (1)..(483): Homolog of NCBI NO: 15233091 NR Description: UDP-glucosyltransferase, putative [Arabidopsis
  misc_feature (4)..(483): Homolog of NCBI NO: 9794913 NR Description: UDP-glucose:sinapate glucosyltransferase
  misc_feature (13)..(483): Homolog of NCBI NO: 21593030 NR Description: indole-3-acetate beta-glucosyltransferase like
  misc_feature (13)..(483): Homolog of NCBI NO: 15234616 NR Description: UDP-glycosyltransferase, putative [Arabidopsis
  misc_feature (1)..(484): Homolog of NCBI NO: 7433899 NR Description: probable indole-3-acetate
  misc_feature (1)..(484): Homolog of NCBI NO: 25082972 NR Description: indole-3-acetate beta-glucosyltransferase like
  misc_feature (1)..(484): Homolog of NCBI NO: 30683281 NR Description: UDP-glycosyltransferase family [Arabidopsis
MVFETCPSPNPIHVMLVSFQGQGHVNPLLRLGKLIASKGLLVTFVTTELWGKKMRQANKIVDGELKPVGSGSIRFEFFDEEWAEDDDRRADFSLYIAHLESVGIREVSKLVRRYEEANEPVSCLINNPFIPWVCHVAEEFNIPCAVLWVQSCACFSAYYHYQDGSVSFPTETEPELDVKLPCVPVLKNDEIPSFLHPSSRFTGFRQAILGQFKNLSKSFCVLIDSFDSLEQEVIDYMSSLCPVKTVGPLFKVARTVTSDVSGDICKSTDKCLEWLDSRPKSSVVYISFGTVAYLKQEQIEEIAHGVLKSGLSFLWVIRPPPHDLKVETHVLPQELKESSAKGKGMIVDWCPQEQVLSHPSVACFVTHCGWNSTMESLSSGVPVVCCPQWGDQVTDAVYLIDVFKTGVRLGRGATEERVVPREEVAEKLLEATVGEKAEELRKNALKWKAEAEAAVAPGGSSDKNFREFVEKLGAGVTKTKDNGY

SEQ ID NO: 36414 - DNA, 1811 bp, Arabidopsis thaliana
  misc_feature (1)..(1811): Ceres Seq. ID no. 12329212
  misc_feature: MA Experiment ID: 20000180 Result: Up-regulated in Transcription
  misc_feature: MA Experiment 20000180 PARAMETER Experiment Name: At_Germinating_Seeds_P Parameter: Age (hr) Value: 24 vs. 0
  misc_feature: MA Experiment 20000180 PARAMETER Experiment Name: At_Germinating_Seeds_P Parameter: Tissue Value: Germinating Seeds
  misc_feature: MA Experiment ID: 20000184 Result: Up-regulated in Transcription
  misc_feature: MA Experiment 20000184 PARAMETER Experiment Name: At_Shoots__P Parameter: Age (day) Value: 7
  misc_feature: MA Experiment 20000184 PARAMETER Experiment Name: At_Shoots__P Parameter: Tissue Value: Shoots vs. Whole Plant
  misc_feature: MA Experiment ID: 20000185 Result: Down-regulated in Transcription
  misc_feature: MA Experiment 20000185 PARAMETER Experiment Name: At_Roots__P Parameter: Age (day) Value: 7 vs. 21
  misc_feature: MA Experiment 20000185 PARAMETER Experiment Name: At_Roots__P Parameter: Organism Value: A. thaliana
  misc_feature: MA Experiment 20000185 PARAMETER Experiment Name: At_Roots__P Parameter: Tissue Value: Roots vs. Whole Plant
  misc_feature: MA Experiment ID: 20000264 Result: Up-regulated in Transcription
  misc_feature: MA Experiment 20000264 PARAMETER Experiment Name: At_Open_Flower_P Parameter: Age (day) Value: 21
  misc_feature: MA Experiment 20000264 PARAMETER Experiment Name: At_Open_Flower_P Parameter: Plant Line Value: WS
  misc_feature: MA Experiment 20000264 PARAMETER Experiment Name: At_Open_Flower_P Parameter: Tissue Value: Open Flower vs. Whole Plant
  misc_feature: MA Experiment ID: 20000265 Result: Up-regulated in Transcription
  misc_feature: MA Experiment 20000265 PARAMETER Experiment Name: At_Open_Flower_P Parameter: Age (day) Value: 21
  misc_feature: MA Experiment 20000265 PARAMETER Experiment Name: At_Open_Flower_P Parameter: Plant Line Value: WS
  misc_feature: MA Experiment 20000265 PARAMETER Experiment Name: At_Open_Flower_P Parameter: Tissue Value: Closed Flower vs. Whole Plant
  misc_feature: MA Experiment ID: 20000438 Result: Up-regulated in Transcription
  misc_feature: MA Experiment 20000438 PARAMETER Experiment Name: At_Shoots__P Parameter: Age (day) Value: 14
  misc_feature: MA Experiment 20000438 PARAMETER Experiment Name: At_Shoots__P Parameter: Tissue Value: Shoots vs. Whole Plant
  misc_feature: MA Experiment ID: 20000495 Result: Down-regulated in Transcription
  misc_feature: MA Experiment 20000495 PARAMETER Experiment Name: At_Guard_Cells_P Parameter: Harvest Date Value: 8/2/2002
  misc_feature: MA Experiment 20000495 PARAMETER Experiment Name: At_Guard_Cells_P Parameter: Organism Value: A. thaliana
  misc_feature: MA Experiment 20000495 PARAMETER Experiment Name: At_Guard_Cells_P Parameter: Tissue Value: Guard Cells vs. Leaves
  misc_feature: MA Experiment ID: 20000496 Result: Down-regulated in Transcription
  misc_feature: MA Experiment 20000496 PARAMETER Experiment Name: At_Guard_Cells_P Parameter: Harvest Date Value: 7/19/2002
  misc_feature: MA Experiment 20000496 PARAMETER Experiment Name: At_Guard_Cells_P Parameter: Organism Value: Canola
  misc_feature: MA Experiment 20000496 PARAMETER Experiment Name: At_Guard_Cells_P Parameter: Tissue Value: Guard Cells vs. Leaves
  misc_feature: MA Experiment ID: 20001248 Result: Down-regulated in Transcription
  misc_feature: MA Experiment 20001248 PARAMETER Experiment Name: At_Far-red-induction_P Parameter: Age (day) Value: 7
  misc_feature: MA Experiment 20001248 PARAMETER Experiment Name: At_Far-red-induction_P Parameter: Light Value: Far-red vs. White
  misc_feature: MA Experiment 20001248 PARAMETER Experiment Name: At_Far-red-induction_P Parameter: Organism Value: A. thaliana
  misc_feature: MA Experiment 20001248 PARAMETER Experiment Name: At_Far-red-induction_P Parameter: Plant Line Value: Columbia
  misc_feature: MA Experiment 20001248 PARAMETER Experiment Name: At_Far-red-induction_P Parameter: Timepoint (hr) Value: 4
  misc_feature: MA Experiment 20001248 PARAMETER Experiment Name: At_Far-red-induction_P Parameter: Tissue Value: Whole Plant
  misc_feature: MA Experiment ID: 20001451 Result: Down-regulated in Transcription
  misc_feature: MA Experiment 20001451 PARAMETER Experiment Name: At_Far-red-induction_P Parameter: Age (day) Value: 7
  misc_feature: MA Experiment 20001451 PARAMETER Experiment Name: At_Far-red-induction_P Parameter: Light Value: Far-red vs. White
  misc_feature: MA Experiment 20001451 PARAMETER Experiment Name: At_Far-red-induction_P Parameter: Organism Value: A. thaliana
  misc_feature: MA Experiment 20001451 PARAMETER Experiment Name: At_Far-red-induction_P Parameter: Plant Line Value: Columbia
  misc_feature: MA Experiment 20001451 PARAMETER Experiment Name: At_Far-red-induction_P Parameter: Timepoint (hr) Value: 24
  misc_feature: MA Experiment 20001451 PARAMETER Experiment Name: At_Far-red-induction_P Parameter: Tissue Value: Whole Plant
  misc_feature: MA Experiment ID: 20001557 Result: Down-regulated in Transcription
  misc_feature: MA Experiment 20001557 PARAMETER Experiment Name: At_Drought_Soil_Dry_P Parameter: Age (day) Value: 27
  misc_feature: MA Experiment 20001557 PARAMETER Experiment Name: At_Drought_Soil_Dry_P Parameter: Organism Value: A. thaliana
  misc_feature: MA Experiment 20001557 PARAMETER Experiment Name: At_Drought_Soil_Dry_P Parameter: Plant Line Value: WS
  misc_feature: MA Experiment 20001557 PARAMETER Experiment Name: At_Drought_Soil_Dry_P Parameter: Post Timepoint (hr) Value: 3
  misc_feature: MA Experiment 20001557 PARAMETER Experiment Name: At_Drought_Soil_Dry_P Parameter: Post-Treatment Value: Re-Water vs. No Drought
  misc_feature: MA Experiment 20001557 PARAMETER Experiment Name: At_Drought_Soil_Dry_P Parameter: Timepoint (day) Value: 13
  misc_feature: MA Experiment 20001557 PARAMETER Experiment Name: At_Drought_Soil_Dry_P Parameter: Treatment Value: Drought vs. No Drought
  misc_feature: MA Experiment ID: 20001558 Result: Down-regulated in Transcription
  misc_feature: MA Experiment 20001558 PARAMETER Experiment Name: At_Drought_Soil_Dry_P Parameter: Age (day) Value: 27
  misc_feature: MA Experiment 20001558 PARAMETER Experiment Name: At_Drought_Soil_Dry_P Parameter: Organism Value: A. thaliana
  misc_feature: MA Experiment 20001558 PARAMETER Experiment Name: At_Drought_Soil_Dry_P Parameter: Plant Line Value: WS
  misc_feature: MA Experiment 20001558 PARAMETER Experiment Name: At_Drought_Soil_Dry_P Parameter: Post Timepoint (hr) Value: 6
  misc_feature: MA Experiment 20001558 PARAMETER Experiment Name: At_Drought_Soil_Dry_P Parameter: Post-Treatment Value: Re-Water vs. No Drought
  misc_feature: MA Experiment 20001558 PARAMETER Experiment Name: At_Drought_Soil_Dry_P Parameter: Timepoint (day) Value: 13
  misc_feature: MA Experiment 20001558 PARAMETER Experiment Name: At_Drought_Soil_Dry_P Parameter: Treatment Value: Drought vs. No Drought
  misc_feature: MA Experiment ID: 20001560 Result: Down-regulated in Transcription
  misc_feature: MA Experiment 20001560 PARAMETER Experiment Name: At_Drought_Soil_Dry_P Parameter: Age (day) Value: 28
  misc_feature: MA Experiment 20001560 PARAMETER Experiment Name: At_Drought_Soil_Dry_P Parameter: Organism Value: A. thaliana
  misc_feature: MA Experiment 20001560 PARAMETER Experiment Name: At_Drought_Soil_Dry_P Parameter: Plant Line Value: WS
  misc_feature: MA Experiment 20001560 PARAMETER Experiment Name: At_Drought_Soil_Dry_P Parameter: Post Timepoint (hr) Value: None
  misc_feature: MA Experiment 20001560 PARAMETER Experiment Name: At_Drought_Soil_Dry_P Parameter: Post-Treatment Value: None
  misc_feature: MA Experiment 20001560 PARAMETER Experiment Name: At_Drought_Soil_Dry_P Parameter: Timepoint (day) Value: 14
  misc_feature: MA Experiment 20001560 PARAMETER Experiment Name: At_Drought_Soil_Dry_P Parameter: Treatment Value: Drought vs. No Drought
aagaaaaaatctatctccgccatgaacgcgagagctcttctttgctcttcaaatattcactctctctacacttcaaatcgtccacctgaaaaaacctcttcttctcgcagcctccgtaatctcaaaccatctccaaagtcgttacgggtatggatctacccgcgaaataggtccagtgttttccgggtattagttcggagctccgacaagagtgaaagcagtaattcgtattacgtagaaggagataaagtaagtggaaacaatgacgtcgtttctgattcgcctagctctatcgtcctcccatggtgggaagagtttccgaagcggtgggtgattgtgttactctgtttctcagcttttcttctctgcaatatggacagagtgaatatgagtatagctatacttccgatgtcagctgagtatggttggaatccagcaacagttggtctgattcagtcttctttcttctggggttaccttcttacacagatagctggtggaatttgggcagacactgtaggagggaaaagggttcttggattcggtgttatttggtggtcaatcgctacaattctcactcctgtagctgctaaactcggtcttccttacttgctcgttgttcgtgctttcatgggagttggagagggtgttgcaatgcctgctatgaataatatattgtcgaagtgggttcctgtgcaagagagaagcagatcactcgcgcttgtttacagcggaatgtaccttggatctgtcaccggtttagccttttcgcctttcttgattcatcaatttggatggccttctgtgttttattctttcgggtctcttggaactgtatggttgactctgtggctaactaaggcagagagttcaccattagaagatccaacattgctccctgaagaaagaaagctaattgcagacaactgtgctagcaaagagccagtgaagtcgatcccgtggaggctgatattgtcgaaaccaccggtttgggctctcatcagttgccacttttgtcacaactggggaacattcattctcttaacatggatgccaacttattaccatcaagtgctgaagttcaaccttatggagtcaggacttctctctgtatttccatggatgacaatggcaatatctgcaaatgccggtggatggattgccgatacacttgtcagccgaggtttctctgtcacgaatgtccgcaagataatgcaaacaatagggtttcttggaccagcgttcttcctaacacagctgaaacacatagattctcctacaatggctgttttgtgcatggcttgtagtcaggggactgatgcgttttcacagtctggtctatactctaaccatcaagacatcgctccaagatactctggagtgttacttggtttgtctaatactgctggagtacttgccggagttcttggcacagctgcgactggtcacatactacaacacggttcttgggatgacgttttcacgatttcggtcggtctttacctcgttgggaccgtcatttggaacctattttcaaccggagagaagataatcgattgatccattccgagaatagtaaatagttcggctccaagacctctcatcaggtgcaacttcacctcacgccagtctctgattatacaagtatcattgcagtctgagagctagccggaatattccttttttgccagaaaattcttcaggatctttctgctcgttgatttaggccaaacgcatatgaataatactttgtagatgaaagatatacagatgattttttgtaaataaacaaagctcacactttctcaaga

SEQ ID NO: 36415 - protein, 519 aa, Arabidopsis thaliana
  peptide (1)..(519): Ceres Seq. ID no. 12329213
  misc_feature (111)..(515): Pfam Name: Sugar (and other) transporter Pfam Description: Sugar (and other) transporter
  misc_feature (111)..(515): Pfam Name: Sugar (and other) transporter Pfam Description: Sugar (and other) transporter
  misc_feature (119)..(517): Homolog of NCBI NO: 34908356 NR Description: P0529H11.31 [Oryza sativa (japonica
  misc_feature (354)..(400): Homolog of NCBI NO: 7485271 NR Description: hypothetical protein A_IG005I10.nn - Arabidopsis
  misc_feature (59)..(248): Homolog of NCBI NO: 7485271 NR Description: hypothetical protein A_IG005I10.nn - Arabidopsis
  misc_feature (433)..(519): Homolog of NCBI NO: 7485271 NR Description: hypothetical protein A_IG005I10.nn - Arabidopsis
  misc_feature (214)..(372): Homolog of NCBI NO: 7485271 NR Description: hypothetical protein A_IG005I10.nn - Arabidopsis
  misc_feature (119)..(517): Homolog of NCBI NO: 34908356 NR Description: P0529H11.31 [Oryza sativa (japonica
  misc_feature (59)..(248): Homolog of NCBI NO: 7485271 NR Description: hypothetical protein A_IG005I10.nn - Arabidopsis
  misc_feature (214)..(372): Homolog of NCBI NO: 7485271 NR Description: hypothetical protein A_IG005I10.nn - Arabidopsis
  misc_feature (8)..(519): Homolog of NCBI NO: 15227589 NR Description: putative Na+-dependent inorganic phosphate
  misc_feature (8)..(519): Homolog of NCBI NO: 17064976 NR Description: putative Na+-dependent inorganic phosphate
  misc_feature (8)..(405): Homolog of NCBI NO: 30684317 NR Description: inorganic phosphate transporter, putative
  misc_feature (105)..(519): Homolog of NCBI NO: 34903342 NR Description: unnamed protein product [Oryza sativa (japonica
  misc_feature (20)..(519): Homolog of NCBI NO: 30678625 NR Description: expressed protein [Arabidopsis thaliana]
  misc_feature (433)..(519): Homolog of NCBI NO: 7485271 NR Description: hypothetical protein A_IG005I10.nn - Arabidopsis
  misc_feature (354)..(400): Homolog of NCBI NO: 7485271 NR Description: hypothetical protein A_IG005I10.nn - Arabidopsis
  misc_feature (20)..(519): Homolog of NCBI NO: 30678625 NR Description: expressed protein [Arabidopsis thaliana]
  misc_feature (105)..(519): Homolog of NCBI NO: 34903342 NR Description: unnamed protein product [Oryza sativa (japonica
  misc_feature (8)..(405): Homolog of NCBI NO: 30684317 NR Description: inorganic phosphate transporter, putative
  misc_feature (8)..(519): Homolog of NCBI NO: 17064976 NR Description: putative Na+-dependent inorganic phosphate
  misc_feature (8)..(519): Homolog of NCBI NO: 15227589 NR Description: putative Na+-dependent inorganic phosphate
KKKSISAMNARALLCSSNIHSLYTSNRPPEKTSSSRSLRNLKPSPKSLRVWIYPRNRSSVFRVLVRSSDKSESSNSYYVEGDKVSGNNDVVSDSPSSIVLPWWEEFPKRWVIVLLCFSAFLLCNMDRVNMSIAILPMSAEYGWNPATVGLIQSSFFWGYLLTQIAGGIWADTVGGKRVLGFGVIWWSIATILTPVAAKLGLPYLLVVRAFMGVGEGVAMPAMNNILSKWVPVQERSRSLALVYSGMYLGSVTGLAFSPFLIHQFGWPSVFYSFGSLGTVWLTLWLTKAESSPLEDPTLLPEERKLIADNCASKEPVKSIPWRLILSKPPVWALISCHFCHNWGTFILLTWMPTYYHQVLKFNLMESGLLSVFPWMTMAISANAGGWIADTLVSRGFSVTNVRKIMQTIGFLGPAFFLTQLKHIDSPTMAVLCMACSQGTDAFSQSGLYSNHQDIAPRYSGVLLGLSNTAGVLAGVLGTAATGHILQHGSWDDVFTISVGLYLVGTVIWNLFSTGEKIID

SEQ ID NO: 36416 - protein, 512 aa, Arabidopsis thaliana
  peptide (1)..(512): Ceres Seq. ID no. 12329214
  misc_feature (104)..(508): Pfam Name: Sugar (and other) transporter Pfam Description: Sugar (and other) transporter
  misc_feature (104)..(508): Pfam Name: Sugar (and other) transporter Pfam Description: Sugar (and other) transporter
  misc_feature (112)..(510): Homolog of NCBI NO: 34908356 NR Description: P0529H11.31 [Oryza sativa (japonica
  misc_feature (347)..(393): Homolog of NCBI NO: 7485271 NR Description: hypothetical protein A_IG005I10.nn - Arabidopsis
  misc_feature (52)..(241): Homolog of NCBI NO: 7485271 NR Description: hypothetical protein A_IG005I10.nn - Arabidopsis
  misc_feature (426)..(512): Homolog of NCBI NO: 7485271 NR Description: hypothetical protein A_IG005I10.nn - Arabidopsis
  misc_feature (207)..(365): Homolog of NCBI NO: 7485271 NR Description: hypothetical protein A_IG005I10.nn - Arabidopsis
  misc_feature (112)..(510): Homolog of NCBI NO: 34908356 NR Description: P0529H11.31 [Oryza sativa (japonica
  misc_feature (52)..(241): Homolog of NCBI NO: 7485271 NR Description: hypothetical protein A_IG005I10.nn - Arabidopsis
  misc_feature (207)..(365): Homolog of NCBI NO: 7485271 NR Description: hypothetical protein A_IG005I10.nn - Arabidopsis
  misc_feature (1)..(512): Homolog of NCBI NO: 15227589 NR Description: putative Na+-dependent inorganic phosphate
  misc_feature (1)..(512): Homolog of NCBI NO: 17064976 NR Description: putative Na+-dependent inorganic phosphate
  misc_feature (1)..(398): Homolog of NCBI NO: 30684317 NR Description: inorganic phosphate transporter, putative
  misc_feature (98)..(512): Homolog of NCBI NO: 34903342 NR Description: unnamed protein product [Oryza sativa (japonica
  misc_feature (13)..(512): Homolog of NCBI NO: 30678625 NR Description: expressed protein [Arabidopsis thaliana]
  misc_feature (426)..(512): Homolog of NCBI NO: 7485271 NR Description: hypothetical protein A_IG005I10.nn - Arabidopsis
  misc_feature (347)..(393): Homolog of NCBI NO: 7485271 NR Description: hypothetical protein A_IG005I10.nn - Arabidopsis
  misc_feature (13)..(512): Homolog of NCBI NO: 30678625 NR Description: expressed protein [Arabidopsis thaliana]
  misc_feature (98)..(512): Homolog of NCBI NO: 34903342 NR Description: unnamed protein product [Oryza sativa (japonica
  misc_feature (1)..(398): Homolog of NCBI NO: 30684317 NR Description: inorganic phosphate transporter, putative
  misc_feature (1)..(512): Homolog of NCBI NO: 17064976 NR Description: putative Na+-dependent inorganic phosphate
  misc_feature (1)..(512): Homolog of NCBI NO: 15227589 NR Description: putative Na+-dependent inorganic phosphate
MNARALLCSSNIHSLYTSNRPPEKTSSSRSLRNLKPSPKSLRVWIYPRNRSSVFRVLVRSSDKSESSNSYYVEGDKVSGNNDVVSDSPSSIVLPWWEEFPKRWVIVLLCFSAFLLCNMDRVNMSIAILPMSAEYGWNPATVGLIQSSFFWGYLLTQIAGGIWADTVGGKRVLGFGVIWWSIATILTPVAAKLGLPYLLVVRAFMGVGEGVAMPAMNNILSKWVPVQERSRSLALVYSGMYLGSVTGLAFSPFLIHQFGWPSVFYSFGSLGTVWLTLWLTKAESSPLEDPTLLPEERKLIADNCASKEPVKSIPWRLILSKPPVWALISCHFCHNWGTFILLTWMPTYYHQVLKFNLMESGLLSVFPWMTMAISANAGGWIADTLVSRGFSVTNVRKIMQTIGFLGPAFFLTQLKHIDSPTMAVLCMACSQGTDAFSQSGLYSNHQDIAPRYSGVLLGLSNTAGVLAGVLGTAATGHILQHGSWDDVFTISVGLYLVGTVIWNLFSTGEKIID

SEQ ID NO: 36417 - protein, 395 aa, Arabidopsis thaliana
  peptide (1)..(395): Ceres Seq. ID no. 12329215
  misc_feature (1)..(391): Pfam Name: Sugar (and other) transporter Pfam Description: Sugar (and other) transporter
  misc_feature (1)..(391): Pfam Name: Sugar (and other) transporter Pfam Description: Sugar (and other) transporter
  misc_feature (1)..(393): Homolog of NCBI NO: 34908356 NR Description: P0529H11.31 [Oryza sativa (japonica
  misc_feature (230)..(276): Homolog of NCBI NO: 7485271 NR Description: hypothetical protein A_IG005I10.nn - Arabidopsis
  misc_feature (1)..(124): Homolog of NCBI NO: 7485271 NR Description: hypothetical protein A_IG005I10.nn - Arabidopsis
  misc_feature (309)..(395): Homolog of NCBI NO: 7485271 NR Description: hypothetical protein A_IG005I10.nn - Arabidopsis
  misc_feature (90)..(248): Homolog of NCBI NO: 7485271 NR Description: hypothetical protein A_IG005I10.nn - Arabidopsis
  misc_feature (1)..(393): Homolog of NCBI NO: 34908356 NR Description: P0529H11.31 [Oryza sativa (japonica
  misc_feature (1)..(124): Homolog of NCBI NO: 7485271 NR Description: hypothetical protein A_IG005I10.nn - Arabidopsis
  misc_feature (90)..(248): Homolog of NCBI NO: 7485271 NR Description: hypothetical protein A_IG005I10.nn - Arabidopsis
  misc_feature (1)..(395): Homolog of NCBI NO: 15227589 NR Description: putative Na+-dependent inorganic phosphate
  misc_feature (1)..(395): Homolog of NCBI NO: 17064976 NR Description: putative Na+-dependent inorganic phosphate
  misc_feature (1)..(281): Homolog of NCBI NO: 30684317 NR Description: inorganic phosphate transporter, putative
  misc_feature (1)..(395): Homolog of NCBI NO: 34903342 NR Description: unnamed protein product [Oryza sativa (japonica
  misc_feature (1)..(395): Homolog of NCBI NO: 30678625 NR Description: expressed protein [Arabidopsis thaliana]
  misc_feature (309)..(395): Homolog of NCBI NO: 7485271 NR Description: hypothetical protein A_IG005I10.nn - Arabidopsis
  misc_feature (230)..(276): Homolog of NCBI NO: 7485271 NR Description: hypothetical protein A_IG005I10.nn - Arabidopsis
  misc_feature (1)..(395): Homolog of NCBI NO: 30678625 NR Description: expressed protein [Arabidopsis thaliana]
  misc_feature (1)..(395): Homolog of NCBI NO: 34903342 NR Description: unnamed protein product [Oryza sativa (japonica
  misc_feature (1)..(281): Homolog of NCBI NO: 30684317 NR Description: inorganic phosphate transporter, putative
  misc_feature (1)..(395): Homolog of NCBI NO: 17064976 NR Description: putative Na+-dependent inorganic phosphate
  misc_feature (1)..(395): Homolog of NCBI NO: 15227589 NR Description: putative Na+-dependent inorganic phosphate
MDRVNMSIAILPMSAEYGWNPATVGLIQSSFFWGYLLTQIAGGIWADTVGGKRVLGFGVIWWSIATILTPVAAKLGLPYLLVVRAFMGVGEGVAMPAMNNILSKWVPVQERSRSLALVYSGMYLGSVTGLAFSPFLIHQFGWPSVFYSFGSLGTVWLTLWLTKAESSPLEDPTLLPEERKLIADNCASKEPVKSIPWRLILSKPPVWALISCHFCHNWGTFILLTWMPTYYHQVLKFNLMESGLLSVFPWMTMAISANAGGWIADTLVSRGFSVTNVRKIMQTIGFLGPAFFLTQLKHIDSPTMAVLCMACSQGTDAFSQSGLYSNHQDIAPRYSGVLLGLSNTAGVLAGVLGTAATGHILQHGSWDDVFTISVGLYLVGTVIWNLFSTGEKIID

SEQ ID NO: 36418 - DNA, 516 bp, Arabidopsis thaliana
  misc_feature (1)..(516): Ceres Seq. ID no. 12329216
  misc_feature: MA Experiment ID: 20000496 Result: Down-regulated in Transcription
  misc_feature: MA Experiment 20000496 PARAMETER Experiment Name: At_Guard_Cells_P Parameter: Harvest Date Value: 7/19/2002
  misc_feature: MA Experiment 20000496 PARAMETER Experiment Name: At_Guard_Cells_P Parameter: Organism Value: Canola
  misc_feature: MA Experiment 20000496 PARAMETER Experiment Name: At_Guard_Cells_P Parameter: Tissue Value: Guard Cells vs. Leaves
  misc_feature: MA Experiment ID: 20001911 Result: Down-regulated in Transcription
  misc_feature: MA Experiment 20001911 PARAMETER Experiment Name: At_Drought_Reproduction_P Parameter: Age (day) Value: 40
  misc_feature: MA Experiment 20001911 PARAMETER Experiment Name: At_Drought_Reproduction_P Parameter: Organism Value: A. thaliana
  misc_feature: MA Experiment 20001911 PARAMETER Experiment Name: At_Drought_Reproduction_P Parameter: Plant Line Value: WS
  misc_feature: MA Experiment 20001911 PARAMETER Experiment Name: At_Drought_Reproduction_P Parameter: Timepoint (day) Value: 10
  misc_feature: MA Experiment 20001911 PARAMETER Experiment Name: At_Drought_Reproduction_P Parameter: Tissue Value: Flowers
  misc_feature: MA Experiment 20001911 PARAMETER Experiment Name: At_Drought_Reproduction_P Parameter: Treatment Value: Drought vs. No Drought
atgatccgattcatattattgcagaacagacaaggtaagactcgtctagccaaatactatgtccctctcgaagaatccgagaaacacaaagtcgaatacgaggttcatagattagtggtgaatcgcgacgccaaattcaccaacttcgttgagtttagaacacacaaggtgatatacaggcgttatgctggattgtttttctctgtgtgcgtggatataaccgacaatgagttggcttacttggagagtatccatttgtttgtggagatattggaccatttcttcagcaatgtttgtgagctagatttggtgtttaatttccacaaggtgtacttgatactcgatgagttcattcttgctggggagctccaagaaacaagcaaaagggcaatcatcgaaaggatgtcagaactcgagaagctacagtgatgacggttaagaatcacattctacttggttaactgcgtacctgccagatgtttcttggcatgttcagagatttgctatactttgttg

SEQ ID NO: 36419 - protein, 142 aa, Arabidopsis thaliana
  peptide (1)..(142): Ceres Seq. ID no. 12329217
  misc_feature (1)..(142): Pfam Name: Clathrin adaptor complex small chain Pfam Description: Clathrin adaptor complex small chain
  misc_feature (1)..(142): Homolog of NCBI NO: 4757996 NR Description: adaptor-related protein complex 2, sigma 1
  misc_feature (1)..(140): Homolog of NCBI NO: 19110255 NR Description: putative adaptor protein complex small chain
  misc_feature (1)..(142): Homolog of NCBI NO: 34784526 NR Description: Unknown (protein for MGC:65827) [Danio rerio]
  misc_feature (40)..(142): Homolog of NCBI NO: 19070753 NR Description: clathrin coat assembly protein [Oryza sativa]
  misc_feature (1)..(142): Homolog of NCBI NO: 40746043 NR Description: conserved hypothetical protein [Aspergillus
  misc_feature (11)..(109): Homolog of NCBI NO: 25405904 NR Description: protein T2E6.6 [imported] - Arabidopsis thaliana
  misc_feature (1)..(129): Homolog of NCBI NO: 7489722 NR Description: clathrin coat assembly protein AP17 - maize
  misc_feature (1)..(142): Homolog of NCBI NO: 30983940 NR Description: clathrin coat assembly protein [Gossypium
  misc_feature (1)..(142): Homolog of NCBI NO: 17149110 NR Description: clathrin assembly protein AP17-like protein
  misc_feature (1)..(142): Homolog of NCBI NO: 15220987 NR Description: clathrin coat assembly protein AP17, putative
MIRFILLQNRQGKTRLAKYYVPLEESEKHKVEYEVHRLVVNRDAKFTNFVEFRTHKVIYRRYAGLFFSVCVDITDNELAYLESIHLFVEILDHFFSNVCELDLVFNFHKVYLILDEFILAGELQETSKRAIIERMSELEKLQ

SEQ ID NO: 36420 - DNA, 1638 bp, Arabidopsis thaliana
  misc_feature (1)..(1638): Ceres Seq. ID no. 12481896
  misc_feature: MA Experiment ID: 108579 Result: Down-regulated in Transcription
  misc_feature: MA Experiment 108579 PARAMETER Experiment Name: At_4deg_Cold_cDNA_P Parameter: Temperature (deg C) Value: 4 vs. 22
  misc_feature: MA Experiment 108579 PARAMETER Experiment Name: At_4deg_Cold_cDNA_P Parameter: Timepoint (hr) Value: 6
  misc_feature: MA Experiment 108579 PARAMETER Experiment Name: At_4deg_Cold_cDNA_P Parameter: Tissue Value: Aerial
  misc_feature: MA Experiment ID: 20000314 Result: Down-regulated in Transcription
  misc_feature: MA Experiment 20000314 PARAMETER Experiment Name: At_14day_Shoots-Roots_Sub_P Parameter: Age (day) Value: 14
  misc_feature: MA Experiment 20000314 PARAMETER Experiment Name: At_14day_Shoots-Roots_Sub_P Parameter: Organism Value: A. thaliana
  misc_feature: MA Experiment 20000314 PARAMETER Experiment Name: At_14day_Shoots-Roots_Sub_P Parameter: Plant Line Value: WS
  misc_feature: MA Experiment 20000314 PARAMETER Experiment Name: At_14day_Shoots-Roots_Sub_P Parameter: Tissue Value: Roots vs. Whole Plant
  misc_feature: MA Experiment ID: 20000328 Result: Down-regulated in Transcription
  misc_feature: MA Experiment 20000328 PARAMETER Experiment Name: At_42deg_Heat_Sub_P Parameter: Age (day) Value: 14
  misc_feature: MA Experiment 20000328 PARAMETER Experiment Name: At_42deg_Heat_Sub_P Parameter: Organism Value: A. thaliana
  misc_feature: MA Experiment 20000328 PARAMETER Experiment Name: At_42deg_Heat_Sub_P Parameter: Plant Line Value: WS
  misc_feature: MA Experiment 20000328 PARAMETER Experiment Name: At_42deg_Heat_Sub_P Parameter: Temperature (deg C) Value: 42 vs. 22
  misc_feature: MA Experiment 20000328 PARAMETER Experiment Name: At_42deg_Heat_Sub_P Parameter: Timepoint (hr) Value: 6
  misc_feature: MA Experiment 20000328 PARAMETER Experiment Name: At_42deg_Heat_Sub_P Parameter: Tissue Value: Aerial
  misc_feature: MA Experiment ID: 20000355 Result: Down-regulated in Transcription
  misc_feature: MA Experiment 20000355 PARAMETER Experiment Name: At_Siliques_Sub_P Parameter: Age (day) Value: 21
  misc_feature: MA Experiment 20000355 PARAMETER Experiment Name: At_Siliques_Sub_P Parameter: Organism Value: A. thaliana
  misc_feature: MA Experiment 20000355 PARAMETER Experiment Name: At_Siliques_Sub_P Parameter: Plant Line Value: WS
  misc_feature: MA Experiment 20000355 PARAMETER Experiment Name: At_Siliques_Sub_P Parameter: Tissue Value: Less Than 5mm Siliques vs. Whole Plant
  misc_feature: MA Experiment ID: 20000440 Result: Up-regulated in Transcription
  misc_feature: MA Experiment 20000440 PARAMETER Experiment Name: At_Closed-Flower__Sub_P Parameter: Tissue Value: Closed Flower vs. Whole Plant
acaacttccccattttctgcttctttttgttcaactccaatcacacaattcacaacccattgagaaaccaataaaataacctcaatcaaaaaaaaaaaaaaaaaaagatgaaaatctcaatttagtaaaggagaaaaaagccatttcgaataacttgaaaaggttttggttttgcagaagaaaatgaaggagaaggcggagagtggtggaggagtaggatacgtgagagcagatcagatagatttaaagagtctggacgagcaattgcagagacacttaagtaaagcatggacgatggagaagaggaagagtttgagtgatggtgaagataacgtcaataacacccgacataaccagaacaacttcggacatcgacagcttgtgtttcagaggccgcttcttggtggtggatatagcaacaacaacaacagcagcaagaacgacataattaggtcgaccgaggttgagaagtcgaggagagagtgggagattgatccttctaagcttataatcaaaagtgtgattgctagaggtacttttggtacggttcaccgtggaatctacgatggtcaagatgtcgccgtaaaactactagactggggagaagaggggcacaggtcagacgcagagatagcttcgcttagagctgctttcactcaagaagttgctgtgtggcataagctcgaccatcccaatgtcaccaagttcataggagcggcgatggggacatcggagatgagcatacaaacggaaaacgggcaaatgggaatgccgagtaacgtttgctgtgtcgtggttgagtattgccccggcggcgctctcaagtcattcctcatcaaaactcgccgccgcaaactcgccttcaaagtcgttatccaactctcccttgatcttgctcgcgggttgagttacttgcactctcagaagattgtgcatagagacgtgaaaacggagaacatgcttttagataagtcacgcaccttaaagattgcagattttggtgtggctcgtctagaggcttcaaaccctaacgacatgaccggtgagaccggaaccttgggctatatggctcctgaggtgctaaacgggagtccctacaacagaaagtgcgatgtgtatagctttgggatatgtctttgggagatttactgttgcgacatgccttatcctgacctcagcttctccgaagtaacctccgccgtcgtccgccagaatttgagaccagagatacctagatgttgtccaagctcgctggcgaacgtgatgaagaggtgttgggatgcgaatccggagaagcggccggagatggaggaagttgtggctatgttggaggctattgatacttccaaaggcggaggaatgattcctcctgaccaacaacaaggctgtttctgtttccgccgacaccgaggcccatgaagtacacacacatgcactacgttcccattattattataattaactcttactattttggaagaagagagattatttttaaaagttaattgtggggtaattaaaatgttttaattagtttggtgtttgatttataggatgaatgtcgtacctatttcaaacgatcatctcatacgttatacataacacacaacaaaaccttattcttgatcttcgcttgtt

SEQ ID NO: 36421 - protein, 411 aa, Arabidopsis thaliana
  peptide (1)..(411): Ceres Seq. ID no. 12481897
  misc_feature (108)..(382): Pfam Name: Protein kinase domain Pfam Description: Protein kinase domain
  misc_feature (90)..(411): Homolog of NCBI NO: 15233574 NR Description: kinase like protein; protein id: At4g14780.1
  misc_feature (6)..(42): Homolog of NCBI NO: 29367399 NR Description: putative protein kinase [Oryza sativa (japonica
  misc_feature (98)..(411): Homolog of NCBI NO: 29367399 NR Description: putative protein kinase [Oryza sativa (japonica
  misc_feature (7)..(34): Homolog of NCBI NO: 34911620 NR Description: protein kinase -like [Oryza sativa (japonica
  misc_feature (95)..(411): Homolog of NCBI NO: 34911620 NR Description: protein kinase -like [Oryza sativa (japonica
  misc_feature (9)..(49): Homolog of NCBI NO: 21553402 NR Description: protein kinase [Arabidopsis thaliana]
  misc_feature (96)..(411): Homolog of NCBI NO: 21553402 NR Description: protein kinase [Arabidopsis thaliana]
  misc_feature (9)..(49): Homolog of NCBI NO: 15240597 NR Description: protein kinase
  misc_feature (96)..(411): Homolog of NCBI NO: 15240597 NR Description: protein kinase
  misc_feature (1)..(411): Homolog of NCBI NO: 15232131 NR Description: putative protein kinase
MKEKAESGGGVGYVRADQIDLKSLDEQLQRHLSKAWTMEKRKSLSDGEDNVNNTRHNQNNFGHRQLVFQRPLLGGGYSNNNNSSKNDIIRSTEVEKSRREWEIDPSKLIIKSVIARGTFGTVHRGIYDGQDVAVKLLDWGEEGHRSDAEIASLRAAFTQEVAVWHKLDHPNVTKFIGAAMGTSEMSIQTENGQMGMPSNVCCVVVEYCPGGALKSFLIKTRRRKLAFKVVIQLSLDLARGLSYLHSQKIVHRDVKTENMLLDKSRTLKIADFGVARLEASNPNDMTGETGTLGYMAPEVLNGSPYNRKCDVYSFGICLWEIYCCDMPYPDLSFSEVTSAVVRQNLRPEIPRCCPSSLANVMKRCWDANPEKRPEMEEVVAMLEAIDTSKGGGMIPPDQQQGCFCFRRHRGP

SEQ ID NO: 36422 - protein, 374 aa, Arabidopsis thaliana
  peptide (1)..(374): Ceres Seq. ID no. 12481898
  misc_feature (71)..(345): Pfam Name: Protein kinase domain Pfam Description: Protein kinase domain
  misc_feature (62)..(374): Homolog of NCBI NO: 15229398 NR Description: ATMRK1
  misc_feature (1)..(374): Homolog of NCBI NO: 18403507 NR Description: expressed protein
  misc_feature (53)..(374): Homolog of NCBI NO: 15233574 NR Description: kinase like protein; protein id: At4g14780.1
  misc_feature (61)..(374): Homolog of NCBI NO: 29367399 NR Description: putative protein kinase [Oryza sativa (japonica
  misc_feature (58)..(374): Homolog of NCBI NO: 34911620 NR Description: protein kinase -like [Oryza sativa (japonica
  misc_feature (1)..(12): Homolog of NCBI NO: 21553402 NR Description: protein kinase [Arabidopsis thaliana]
  misc_feature (59)..(374): Homolog of NCBI NO: 21553402 NR Description: protein kinase [Arabidopsis thaliana]
  misc_feature (1)..(12): Homolog of NCBI NO: 15240597 NR Description: protein kinase
  misc_feature (59)..(374): Homolog of NCBI NO: 15240597 NR Description: protein kinase
  misc_feature (1)..(374): Homolog of NCBI NO: 15232131 NR Description: putative protein kinase
MEKRKSLSDGEDNVNNTRHNQNNFGHRQLVFQRPLLGGGYSNNNNSSKNDIIRSTEVEKSRREWEIDPSKLIIKSVIARGTFGTVHRGIYDGQDVAVKLLDWGEEGHRSDAEIASLRAAFTQEVAVWHKLDHPNVTKFIGAAMGTSEMSIQTENGQMGMPSNVCCVVVEYCPGGALKSFLIKTRRRKLAFKVVIQLSLDLARGLSYLHSQKIVHRDVKTENMLLDKSRTLKIADFGVARLEASNPNDMTGETGTLGYMAPEVLNGSPYNRKCDVYSFGICLWEIYCCDMPYPDLSFSEVTSAVVRQNLRPEIPRCCPSSLANVMKRCWDANPEKRPEMEEVVAMLEAIDTSKGGGMIPPDQQQGCFCFRRHRGP

SEQ ID NO: 36423 - protein, 232 aa, Arabidopsis thaliana
  peptide (1)..(232): Ceres Seq. ID no. 12481899
  misc_feature (1)..(203): Pfam Name: Protein kinase domain Pfam Description: Protein kinase domain
  misc_feature (1)..(231): Homolog of NCBI NO: 14626298 NR Description: putative protein kinase [Oryza sativa (japonica
  misc_feature (1)..(232): Homolog of NCBI NO: 21554375 NR Description: ATMRK1 [Arabidopsis thaliana]
  misc_feature (1)..(232): Homolog of NCBI NO: 15229398 NR Description: ATMRK1
  misc_feature (1)..(232): Homolog of NCBI NO: 18403507 NR Description: expressed protein
  misc_feature (1)..(232): Homolog of NCBI NO: 15233574 NR Description: kinase like protein; protein id: At4g14780.1
  misc_feature (1)..(232): Homolog of NCBI NO: 29367399 NR Description: putative protein kinase [Oryza sativa (japonica
  misc_feature (1)..(232): Homolog of NCBI NO: 34911620 NR Description: protein kinase -like [Oryza sativa (japonica
  misc_feature (1)..(232): Homolog of NCBI NO: 21553402 NR Description: protein kinase [Arabidopsis thaliana]
  misc_feature (1)..(232): Homolog of NCBI NO: 15240597 NR Description: protein kinase
  misc_feature (1)..(232): Homolog of NCBI NO: 15232131 NR Description: putative protein kinase
MGTSEMSIQTENGQMGMPSNVCCVVVEYCPGGALKSFLIKTRRRKLAFKVVIQLSLDLARGLSYLHSQKIVHRDVKTENMLLDKSRTLKIADFGVARLEASNPNDMTGETGTLGYMAPEVLNGSPYNRKCDVYSFGICLWEIYCCDMPYPDLSFSEVTSAVVRQNLRPEIPRCCPSSLANVMKRCWDANPEKRPEMEEVVAMLEAIDTSKGGGMIPPDQQQGCFCFRRHRGP

SEQ ID NO: 36424 - DNA, 1569 bp, Arabidopsis thaliana
  misc_feature (1)..(1569): Ceres Seq. ID no. 13646090
  misc_feature: MA Experiment ID: 20000171 Result: Down-regulated in Transcription
  misc_feature: MA Experiment 20000171 PARAMETER Experiment Name: At_42deg_Heat_P Parameter: Age (day) Value: 14
  misc_feature: MA Experiment 20000171 PARAMETER Experiment Name: At_42deg_Heat_P Parameter: Organism Value: A. thaliana
  misc_feature: MA Experiment 20000171 PARAMETER Experiment Name: At_42deg_Heat_P Parameter: Plant Line Value: WS
  misc_feature: MA Experiment 20000171 PARAMETER Experiment Name: At_42deg_Heat_P Parameter: Temperature (deg C) Value: 42 vs. 22
  misc_feature: MA Experiment 20000171 PARAMETER Experiment Name: At_42deg_Heat_P Parameter: Timepoint (hr) Value: 1
  misc_feature: MA Experiment 20000171 PARAMETER Experiment Name: At_42deg_Heat_P Parameter: Tissue Value: Aerial
  misc_feature: MA Experiment ID: 20000184 Result: Down-regulated in Transcription
  misc_feature: MA Experiment 20000184 PARAMETER Experiment Name: At_Shoots__P Parameter: Age (day) Value: 7
  misc_feature: MA Experiment 20000184 PARAMETER Experiment Name: At_Shoots__P Parameter: Tissue Value: Shoots vs. Whole Plant
atcatcgtcttttctcttttgtttgtttgctcctaacgtttctctttcttggaacaatctccagcaaaccaaactaatccgtctgagagaagtagttttgactttctctactccgtgatcgcgatgtcggactctggtggtggttctcacaagtcctccacaacaaaaccttccgttttcggactaaacctttacttagtcatcgcgatttgttctgttttcatactcttgatctcactcttgatcttcctcttcgtctgcttgaatcgcgtctcacgcgctcgtagaatgcgcgttaaacacagctccggctcgatcccgctcgtctctaaagaaatctcggagatcaagacggtcggcaaattcataaactccgacgattccaagggtaaaatcggaaacgaagttgttgttgttgtctccgccacaagcaaagaagcgacaagtggttttgatactttgtcggtggcttcgagcggtgacgttggtacttctgaggcaatgggatggggaaaatggtacagcttgaaagatctggagattgcgacacgtggcttctctgatgataacatgatcggtgaaggagggtacggtgtcgtttacagagctgatttctctgacggttctgtcgccgccgtcaagaatctccttaacaacaagggtcaggcggagaaggagttcaaagttgaagtagaagcaattgggaaagtaagacataagaacttggttggtctgatgggatattgtgctgacagtgctcaaagtcaaaggatgcttgtgtatgaatatattgataatggaaacttggagcagtggttacacggtgatgtaggtccggtgagtcctcttacgtgggatatccgcatgaagatagccattggaacagcaaaaggattagcctatttacatgaagggcttgaacctaaggttgtgcaccgtgatgtgaaatctagtaacatcttgctcgataagaaatggaacgcgaaagtgtctgattttggtttggccaagttattaggatctgaaacaagctacgtgacaactcgtgtgatgggaacttttggatatgtttcaccggaatatgcaagtactggtatgctcaatgagtgtagtgatgtctacagtttcggtgttctgctcatggagatcattacaggaaggagcccagttgattattcaagaccgcctggcgagatgaacttagtggattggttcaaaggaatggttgcaagtagacgtggagaagaagttatagaccctaaaatcaagacatcacctcctccaagagctttgaaaagagctttgcttgtttgtttgcgttgcatagaccttgactctagtaaacgaccaaagatgggacaaatcattcacatgcttgaggctgaagattttccattccgtcctgtaagtgtgtcaaaagctaaaaagagatttgatcctttatgcaatttactgattttaagtttcatgttgtcacacaggaacacagatcaaaccaggaaagatcgaagtaagaaagattattgggcaaacaataatgtcttggggaagaccacacttgagcgttga

SEQ ID NO: 36425 - protein, 481 aa, Arabidopsis thaliana
  peptide (1)..(481): Ceres Seq. ID no. 13646091
  misc_feature (145)..(418): Pfam Name: Protein kinase domain Pfam Description: Protein kinase domain
  misc_feature (1)..(422): Homolog of NCBI NO: 15235432 NR Description: protein kinase family [Arabidopsis thaliana]
  misc_feature (127)..(426): Homolog of NCBI NO: 34897534 NR Description: OSJNBa0042L16.4 [Oryza sativa (japonica
  misc_feature (1)..(430): Homolog of NCBI NO: 15234142 NR Description: protein kinase family [Arabidopsis thaliana]
  misc_feature (3)..(426): Homolog of NCBI NO: 34902334 NR Description: Putative serine/threonine protein kinase
  misc_feature (14)..(179): Homolog of NCBI NO: 25518287 NR Description: hypothetical protein F22L4.8 - Arabidopsis
  misc_feature (179)..(426): Homolog of NCBI NO: 25518287 NR Description: hypothetical protein F22L4.8 - Arabidopsis
  misc_feature (14)..(426): Homolog of NCBI NO: 15223428 NR Description: protein kinase family [Arabidopsis thaliana]
  misc_feature (14)..(426): Homolog of NCBI NO: 14194119 NR Description: At1g01540/F22L4_6 [Arabidopsis thaliana]
  misc_feature (1)..(427): Homolog of NCBI NO: 30690058 NR Description: protein kinase family [Arabidopsis thaliana]
  misc_feature (1)..(481): Homolog of NCBI NO: 7488207 NR Description: probable serine/threonine-specific protein kinase
MSDSGGGSHKSSTTKPSVFGLNLYLVIAICSVFILLISLLIFLFVCLNRVSRARRMRVKHSSGSIPLVSKEISEIKTVGKFINSDDSKGKIGNEVVVVVSATSKEATSGFDTLSVASSGDVGTSEAMGWGKWYSLKDLEIATRGFSDDNMIGEGGYGVVYRADFSDGSVAAVKNLLNNKGQAEKEFKVEVEAIGKVRHKNLVGLMGYCADSAQSQRMLVYEYIDNGNLEQWLHGDVGPVSPLTWDIRMKIAIGTAKGLAYLHEGLEPKVVHRDVKSSNILLDKKWNAKVSDFGLAKLLGSETSYVTTRVMGTFGYVSPEYASTGMLNECSDVYSFGVLLMEIITGRSPVDYSRPPGEMNLVDWFKGMVASRRGEEVIDPKIKTSPPPRALKRALLVCLRCIDLDSSKRPKMGQIIHMLEAEDFPFRPVSVSKAKKRFDPLCNLLILSFMLSHRNTDQTRKDRSKKDYWANNNVLGKTTLER

SEQ ID NO: 36426 - protein, 426 aa, Arabidopsis thaliana
  peptide (1)..(426): Ceres Seq. ID no. 13646092
  misc_feature (90)..(363): Pfam Name: Protein kinase domain Pfam Description: Protein kinase domain
  misc_feature (1)..(367): Homolog of NCBI NO: 15235432 NR Description: protein kinase family [Arabidopsis thaliana]
  misc_feature (72)..(371): Homolog of NCBI NO: 34897534 NR Description: OSJNBa0042L16.4 [Oryza sativa (japonica
  misc_feature (1)..(375): Homolog of NCBI NO: 15234142 NR Description: protein kinase family [Arabidopsis thaliana]
  misc_feature (1)..(371): Homolog of NCBI NO: 34902334 NR Description: Putative serine/threonine protein kinase
  misc_feature (1)..(124): Homolog of NCBI NO: 25518287 NR Description: hypothetical protein F22L4.8 - Arabidopsis
  misc_feature (124)..(371): Homolog of NCBI NO: 25518287 NR Description: hypothetical protein F22L4.8 - Arabidopsis
  misc_feature (1)..(371): Homolog of NCBI NO: 15223428 NR Description: protein kinase family [Arabidopsis thaliana]
  misc_feature (1)..(371): Homolog of NCBI NO: 14194119 NR Description: At1g01540/F22L4_6 [Arabidopsis thaliana]
  misc_feature (1)..(372): Homolog of NCBI NO: 30690058 NR Description: protein kinase family [Arabidopsis thaliana]
  misc_feature (1)..(426): Homolog of NCBI NO: 7488207 NR Description: probable serine/threonine-specific protein kinase
MRVKHSSGSIPLVSKEISEIKTVGKFINSDDSKGKIGNEVVVVVSATSKEATSGFDTLSVASSGDVGTSEAMGWGKWYSLKDLEIATRGFSDDNMIGEGGYGVVYRADFSDGSVAAVKNLLNNKGQAEKEFKVEVEAIGKVRHKNLVGLMGYCADSAQSQRMLVYEYIDNGNLEQWLHGDVGPVSPLTWDIRMKIAIGTAKGLAYLHEGLEPKVVHRDVKSSNILLDKKWNAKVSDFGLAKLLGSETSYVTTRVMGTFGYVSPEYASTGMLNECSDVYSFGVLLMEIITGRSPVDYSRPPGEMNLVDWFKGMVASRRGEEVIDPKIKTSPPPRALKRALLVCLRCIDLDSSKRPKMGQIIHMLEAEDFPFRPVSVSKAKKRFDPLCNLLILSFMLSHRNTDQTRKDRSKKDYWANNNVLGKTTLER

SEQ ID NO: 36427 - protein, 355 aa, Arabidopsis thaliana
  peptide (1)..(355): Ceres Seq. ID no. 13646093
  misc_feature (19)..(292): Pfam Name: Protein kinase domain Pfam Description: Protein kinase domain
  misc_feature (1)..(296): Homolog of NCBI NO: 15235432 NR Description: protein kinase family [Arabidopsis thaliana]
  misc_feature (1)..(300): Homolog of NCBI NO: 34897534 NR Description: OSJNBa0042L16.4 [Oryza sativa (japonica
  misc_feature (1)..(304): Homolog of NCBI NO: 15234142 NR Description: protein kinase family [Arabidopsis thaliana]
  misc_feature (1)..(300): Homolog of NCBI NO: 34902334 NR Description: Putative serine/threonine protein kinase
  misc_feature (1)..(53): Homolog of NCBI NO: 25518287 NR Description: hypothetical protein F22L4.8 - Arabidopsis
  misc_feature (53)..(300): Homolog of NCBI NO: 25518287 NR Description: hypothetical protein F22L4.8 - Arabidopsis
  misc_feature (1)..(300): Homolog of NCBI NO: 15223428 NR Description: protein kinase family [Arabidopsis thaliana]
  misc_feature (1)..(300): Homolog of NCBI NO: 14194119 NR Description: At1g01540/F22L4_6 [Arabidopsis thaliana]
  misc_feature (1)..(301): Homolog of NCBI NO: 30690058 NR Description: protein kinase family [Arabidopsis thaliana]
  misc_feature (1)..(355): Homolog of NCBI NO: 7488207 NR Description: probable serine/threonine-specific protein kinase
MGWGKWYSLKDLEIATRGFSDDNMIGEGGYGVVYRADFSDGSVAAVKNLLNNKGQAEKEFKVEVEAIGKVRHKNLVGLMGYCADSAQSQRMLVYEYIDNGNLEQWLHGDVGPVSPLTWDIRMKIAIGTAKGLAYLHEGLEPKVVHRDVKSSNILLDKKWNAKVSDFGLAKLLGSETSYVTTRVMGTFGYVSPEYASTGMLNECSDVYSFGVLLMEIITGRSPVDYSRPPGEMNLVDWFKGMVASRRGEEVIDPKIKTSPPPRALKRALLVCLRCIDLDSSKRPKMGQIIHMLEAEDFPFRPVSVSKAKKRFDPLCNLLILSFMLSHRNTDQTRKDRSKKDYWANNNVLGKTTLER

SEQ ID NO: 36428 - DNA, 473 bp, Arabidopsis thaliana
  misc_feature (1)..(473): Ceres Seq. ID no. 11032658
  misc_feature: MA Experiment ID: 20000171 Result: Down-regulated in Transcription
  misc_feature: MA Experiment 20000171 PARAMETER Experiment Name: At_42deg_Heat_P Parameter: Age (day) Value: 14
  misc_feature: MA Experiment 20000171 PARAMETER Experiment Name: At_42deg_Heat_P Parameter: Organism Value: A. thaliana
  misc_feature: MA Experiment 20000171 PARAMETER Experiment Name: At_42deg_Heat_P Parameter: Plant Line Value: WS
  misc_feature: MA Experiment 20000171 PARAMETER Experiment Name: At_42deg_Heat_P Parameter: Temperature (deg C) Value: 42 vs. 22
  misc_feature: MA Experiment 20000171 PARAMETER Experiment Name: At_42deg_Heat_P Parameter: Timepoint (hr) Value: 1
  misc_feature: MA Experiment 20000171 PARAMETER Experiment Name: At_42deg_Heat_P Parameter: Tissue Value: Aerial
  misc_feature: MA Experiment ID: 20000173 Result: Down-regulated in Transcription
  misc_feature: MA Experiment 20000173 PARAMETER Experiment Name: At_42deg_Heat_P Parameter: Age (day) Value: 14
  misc_feature: MA Experiment 20000173 PARAMETER Experiment Name: At_42deg_Heat_P Parameter: Organism Value: A. thaliana
  misc_feature: MA Experiment 20000173 PARAMETER Experiment Name: At_42deg_Heat_P Parameter: Plant Line Value: WS
  misc_feature: MA Experiment 20000173 PARAMETER Experiment Name: At_42deg_Heat_P Parameter: Temperature (deg C) Value: 42 vs. 22
  misc_feature: MA Experiment 20000173 PARAMETER Experiment Name: At_42deg_Heat_P Parameter: Timepoint (hr) Value: 6
  misc_feature: MA Experiment 20000173 PARAMETER Experiment Name: At_42deg_Heat_P Parameter: Tissue Value: Aerial
  misc_feature: MA Experiment ID: 20000437 Result: Down-regulated in Transcription
  misc_feature: MA Experiment 20000437 PARAMETER Experiment Name: At_Drought_P Parameter: Age (day) Value: 8
  misc_feature: MA Experiment 20000437 PARAMETER Experiment Name: At_Drought_P Parameter: Organism Value: A. thaliana
  misc_feature: MA Experiment 20000437 PARAMETER Experiment Name: At_Drought_P Parameter: Plant Line Value: WS
  misc_feature: MA Experiment 20000437 PARAMETER Experiment Name: At_Drought_P Parameter: Timepoint (hr) Value: 24
  misc_feature: MA Experiment 20000437 PARAMETER Experiment Name: At_Drought_P Parameter: Tissue Value: Whole Plant
  misc_feature: MA Experiment 20000437 PARAMETER Experiment Name: At_Drought_P Parameter: Treatment Value: Drought vs. No Drought
  misc_feature: MA Experiment ID: 20000451 Result: Up-regulated in Transcription
  misc_feature: MA Experiment 20000451 PARAMETER Experiment Name: At_CS6879_Shoots-Roots_P Parameter: Age (day) Value: 14
  misc_feature: MA Experiment 20000451 PARAMETER Experiment Name: At_CS6879_Shoots-Roots_P Parameter: Organism Value: A. thaliana
  misc_feature: MA Experiment 20000451 PARAMETER Experiment Name: At_CS6879_Shoots-Roots_P Parameter: Plant Line Value: CS6879 vs. WS
  misc_feature: MA Experiment 20000451 PARAMETER Experiment Name: At_CS6879_Shoots-Roots_P Parameter: Tissue Value: Roots
  misc_feature: MA Experiment ID: 20000452 Result: Up-regulated in Transcription
  misc_feature: MA Experiment 20000452 PARAMETER Experiment Name: At_CS6879_Shoots-Roots_P Parameter: Age (day) Value: 14
  misc_feature: MA Experiment 20000452 PARAMETER Experiment Name: At_CS6879_Shoots-Roots_P Parameter: Organism Value: A. thaliana
  misc_feature: MA Experiment 20000452 PARAMETER Experiment Name: At_CS6879_Shoots-Roots_P Parameter: Plant Line Value: CS6879 vs. WS
  misc_feature: MA Experiment 20000452 PARAMETER Experiment Name: At_CS6879_Shoots-Roots_P Parameter: Tissue Value: Shoots
atcctatataacaaactcaattttcatttcgatcaatcaacacaatttggtaaaatcaaatagtctttttactattttctaaggttcgaatttaatttcccaagagaaaaatgtcaggccgaggaaagggaggaaaaggattaggaaagggaggagccaagaggcatcggaaagttctccgagacaacatccaagggattaccaaacctgcgattcgtcgtctcgcgagaagaggaggcgtgaagcgtatcagtggtttgatctatgaagagactcgcggcgttctcaagatctttctcgagaacgtgattcgtgacgccgttacttacacggagcacgctcgccggaaaactgttacggcgatggatgtcgtttacgctctcaagagacaaggacgaactttgtatggattcggcggctaaatccttatgatttcaacttcggattttgtaaactctttaatttcaagttct

SEQ ID NO: 36429 - protein, 103 aa, Arabidopsis thaliana; identical to SEQ ID NO: 7737
  peptide (1)..(103): Ceres Seq. ID no. 11032659
  misc_feature (1)..(103): Homolog of NCBI NO: 462242 NR Description: Histone H4
  misc_feature (1)..(103): Homolog of NCBI NO: 37590121 NR Description: Hist1h4h protein [Mus musculus]
  misc_feature (1)..(103): Homolog of NCBI NO: 34858262 NR Description: similar to germinal histone H4 gene [Rattus
  misc_feature (1)..(103): Homolog of NCBI NO: 27692935 NR Description: Similar to germinal histone H4 gene [Mus musculus]
  misc_feature (1)..(103): Homolog of NCBI NO: 4504301 NR Description: H4 histone family, member A [Homo sapiens]
  misc_feature (1)..(103): Homolog of NCBI NO: 1806283 NR Description: Histone H4 homologue [Sesbania rostrata]
  misc_feature (1)..(103): Homolog of NCBI NO: 462243 NR Description: Histone H4
  misc_feature (1)..(103): Homolog of NCBI NO: 27692960 NR Description: Similar to germinal histone H4 gene [Mus musculus]
  misc_feature (1)..(103): Homolog of NCBI NO: 15226944 NR Description: histone H4
  misc_feature (1)..(103): Homolog of NCBI NO: 34876368 NR Description: similar to germinal histone H4 gene [Rattus

SEQ ID NO: 36430 - DNA, 1237 bp, Arabidopsis thaliana
  misc_feature (1)..(1237): Ceres Seq. ID no. 13575166
  misc_feature: MA Experiment ID: 20000184 Result: Down-regulated in Transcription
  misc_feature: MA Experiment 20000184 PARAMETER Experiment Name: At_Shoots__P Parameter: Age (day) Value: 7
  misc_feature: MA Experiment 20000184 PARAMETER Experiment Name: At_Shoots__P Parameter: Tissue Value: Shoots vs. Whole Plant
  misc_feature: MA Experiment ID: 20000264 Result: Up-regulated in Transcription
  misc_feature: MA Experiment 20000264 PARAMETER Experiment Name: At_Open_Flower_P Parameter: Age (day) Value: 21
  misc_feature: MA Experiment 20000264 PARAMETER Experiment Name: At_Open_Flower_P Parameter: Plant Line Value: WS
  misc_feature: MA Experiment 20000264 PARAMETER Experiment Name: At_Open_Flower_P Parameter: Tissue Value: Open Flower vs. Whole Plant
  misc_feature: MA Experiment ID: 20000438 Result: Down-regulated in Transcription
  misc_feature: MA Experiment 20000438 PARAMETER Experiment Name: At_Shoots__P Parameter: Age (day) Value: 14
  misc_feature: MA Experiment 20000438 PARAMETER Experiment Name: At_Shoots__P Parameter: Tissue Value: Shoots vs. Whole Plant
  misc_feature: MA Experiment ID: 20000439 Result: Down-regulated in Transcription
  misc_feature: MA Experiment 20000439 PARAMETER Experiment Name: At_Roots__P Parameter: Age (day) Value: 14 vs. 21
  misc_feature: MA Experiment 20000439 PARAMETER Experiment Name: At_Roots__P Parameter: Organism Value: A. thaliana
  misc_feature: MA Experiment 20000439 PARAMETER Experiment Name: At_Roots__P Parameter: Tissue Value: Roots vs. Whole Plant
  misc_feature: MA Experiment ID: 20000441 Result: Down-regulated in Transcription
  misc_feature: MA Experiment 20000441 PARAMETER Experiment Name: At_1uM_BR-BRZ__P Parameter: Tissue Value: Shoot Apices
  misc_feature: MA Experiment 20000441 PARAMETER Experiment Name: At_1uM_BR-BRZ__P Parameter: Treatment Value: 1uM BR vs. No Treatment
  misc_feature: MA Experiment ID: 20000794 Result: Up-regulated in Transcription
  misc_feature: MA Experiment 20000794 PARAMETER Experiment Name: At_Petals_P Parameter: Age (day) Value: 23-25 days
  misc_feature: MA Experiment 20000794 PARAMETER Experiment Name: At_Petals_P Parameter: Plant Line Value: WS
  misc_feature: MA Experiment 20000794 PARAMETER Experiment Name: At_Petals_P Parameter: Tissue Value: Petals vs. Whole plant
  misc_feature: MA Experiment ID: 20001457 Result: Down-regulated in Transcription
  misc_feature: MA Experiment 20001457 PARAMETER Experiment Name: At_50mM_NH4NO3_L-to-H_P Parameter: Age (day) Value: Undefined
  misc_feature: MA Experiment 20001457 PARAMETER Experiment Name: At_50mM_NH4NO3_L-to-H_P Parameter: Organism Value: Undefined
  misc_feature: MA Experiment 20001457 PARAMETER Experiment Name: At_50mM_NH4NO3_L-to-H_P Parameter: Plant Line Value: Undefined
  misc_feature: MA Experiment 20001457 PARAMETER Experiment Name: At_50mM_NH4NO3_L-to-H_P Parameter: Timepoint (hr) Value: 0.5
  misc_feature: MA Experiment 20001457 PARAMETER Experiment Name: At_50mM_NH4NO3_L-to-H_P Parameter: Tissue Value: Siliques
  misc_feature: MA Experiment 20001457 PARAMETER Experiment Name: At_50mM_NH4NO3_L-to-H_P Parameter: Treatment Value: 50mM NH4NO3 vs. 100mM Manitol
  misc_feature: MA Experiment ID: 20001458 Result: Down-regulated in Transcription
  misc_feature: MA Experiment 20001458 PARAMETER Experiment Name: At_50mM_NH4NO3_L-to-H_P Parameter: Age (day) Value: Undefined
  misc_feature: MA Experiment 20001458 PARAMETER Experiment Name: At_50mM_NH4NO3_L-to-H_P Parameter: Organism Value: Undefined
  misc_feature: MA Experiment 20001458 PARAMETER Experiment Name: At_50mM_NH4NO3_L-to-H_P Parameter: Plant Line Value: Undefined
  misc_feature: MA Experiment 20001458 PARAMETER Experiment Name: At_50mM_NH4NO3_L-to-H_P Parameter: Timepoint (hr) Value: 2
  misc_feature: MA Experiment 20001458 PARAMETER Experiment Name: At_50mM_NH4NO3_L-to-H_P Parameter: Tissue Value: Siliques
  misc_feature: MA Experiment 20001458 PARAMETER Experiment Name: At_50mM_NH4NO3_L-to-H_P Parameter: Treatment Value: 50mM NH4NO3 vs. 100mM Manitol
  misc_feature: MA Experiment ID: 20001554 Result: Up-regulated in Transcription
  misc_feature: MA Experiment 20001554 PARAMETER Experiment Name: At_Drought_Soil_Dry_P Parameter: Age (day) Value: 21
  misc_feature: MA Experiment 20001554 PARAMETER Experiment Name: At_Drought_Soil_Dry_P Parameter: Organism Value: A. thaliana
  misc_feature: MA Experiment 20001554 PARAMETER Experiment Name: At_Drought_Soil_Dry_P Parameter: Plant Line Value: WS
  misc_feature: MA Experiment 20001554 PARAMETER Experiment Name: At_Drought_Soil_Dry_P Parameter: Post Timepoint (hr) Value: None
  misc_feature: MA Experiment 20001554 PARAMETER Experiment Name: At_Drought_Soil_Dry_P Parameter: Post-Treatment Value: None
  misc_feature: MA Experiment 20001554 PARAMETER Experiment Name: At_Drought_Soil_Dry_P Parameter: Timepoint (day) Value: 7
  misc_feature: MA Experiment 20001554 PARAMETER Experiment Name: At_Drought_Soil_Dry_P Parameter: Treatment Value: Drought vs. No Drought
  misc_feature: MA Experiment ID: 20001555 Result: Up-regulated in Transcription
  misc_feature: MA Experiment 20001555 PARAMETER Experiment Name: At_Drought_Soil_Dry_P Parameter: Age (day) Value: 24
  misc_feature: MA Experiment 20001555 PARAMETER Experiment Name: At_Drought_Soil_Dry_P Parameter: Organism Value: A. thaliana
  misc_feature: MA Experiment 20001555 PARAMETER Experiment Name: At_Drought_Soil_Dry_P Parameter: Plant Line Value: WS
  misc_feature: MA Experiment 20001555 PARAMETER Experiment Name: At_Drought_Soil_Dry_P Parameter: Post Timepoint (hr) Value: None
  misc_feature: MA Experiment 20001555 PARAMETER Experiment Name: At_Drought_Soil_Dry_P Parameter: Post-Treatment Value: None
  misc_feature: MA Experiment 20001555 PARAMETER Experiment Name: At_Drought_Soil_Dry_P Parameter: Timepoint (day) Value: 10
  misc_feature: MA Experiment 20001555 PARAMETER Experiment Name: At_Drought_Soil_Dry_P Parameter: Treatment Value: Drought vs. No Drought
  misc_feature: MA Experiment ID: 20001557 Result: Down-regulated in Transcription
  misc_feature: MA Experiment 20001557 PARAMETER Experiment Name: At_Drought_Soil_Dry_P Parameter: Age (day) Value: 27
  misc_feature: MA Experiment 20001557 PARAMETER Experiment Name: At_Drought_Soil_Dry_P Parameter: Organism Value: A. thaliana
  misc_feature: MA Experiment 20001557 PARAMETER Experiment Name: At_Drought_Soil_Dry_P Parameter: Plant Line Value: WS
  misc_feature: MA Experiment 20001557 PARAMETER Experiment Name: At_Drought_Soil_Dry_P Parameter: Post Timepoint (hr) Value: 3
  misc_feature: MA Experiment 20001557 PARAMETER Experiment Name: At_Drought_Soil_Dry_P Parameter: Post-Treatment Value: Re-Water vs. No Drought
  misc_feature: MA Experiment 20001557 PARAMETER Experiment Name: At_Drought_Soil_Dry_P Parameter: Timepoint (day) Value: 13
  misc_feature: MA Experiment 20001557 PARAMETER Experiment Name: At_Drought_Soil_Dry_P Parameter: Treatment Value: Drought vs. No Drought
  misc_feature: MA Experiment ID: 20001558 Result: Down-regulated in Transcription
  misc_feature: MA Experiment 20001558 PARAMETER Experiment Name: At_Drought_Soil_Dry_P Parameter: Age (day) Value: 27
  misc_feature: MA Experiment 20001558 PARAMETER Experiment Name: At_Drought_Soil_Dry_P Parameter: Organism Value: A. thaliana
  misc_feature: MA Experiment 20001558 PARAMETER Experiment Name: At_Drought_Soil_Dry_P Parameter: Plant Line Value: WS
  misc_feature: MA Experiment 20001558 PARAMETER Experiment Name: At_Drought_Soil_Dry_P Parameter: Post Timepoint (hr) Value: 6
  misc_feature: MA Experiment 20001558 PARAMETER Experiment Name: At_Drought_Soil_Dry_P Parameter: Post-Treatment Value: Re-Water vs. No Drought
  misc_feature: MA Experiment 20001558 PARAMETER Experiment Name: At_Drought_Soil_Dry_P Parameter: Timepoint (day) Value: 13
  misc_feature: MA Experiment 20001558 PARAMETER Experiment Name: At_Drought_Soil_Dry_P Parameter: Treatment Value: Drought vs. No Drought
  misc_feature: MA Experiment ID: 20001757 Result: Down-regulated in Transcription
  misc_feature: MA Experiment 20001757 PARAMETER Experiment Name: At_50mM_NH4NO3_L-to-H_P Parameter: Timepoint (hr) Value: 6
  misc_feature: MA Experiment 20001757 PARAMETER Experiment Name: At_50mM_NH4NO3_L-to-H_P Parameter: Tissue Value: Leaf
  misc_feature: MA Experiment 20001757 PARAMETER Experiment Name: At_50mM_NH4NO3_L-to-H_P Parameter: Treatment Value: 50mM NH4NO3 vs 100mM Mannitol
  misc_feature: MA Experiment ID: 20001761 Result: Down-regulated in Transcription
  misc_feature: MA Experiment 20001761 PARAMETER Experiment Name: At_50mM_NH4NO3_L-to-H_P Parameter: Timepoint (hr) Value: 4
  misc_feature: MA Experiment 20001761 PARAMETER Experiment Name: At_50mM_NH4NO3_L-to-H_P Parameter: Tissue Value: Siliques
  misc_feature: MA Experiment 20001761 PARAMETER Experiment Name: At_50mM_NH4NO3_L-to-H_P Parameter: Treatment Value: 50mM NH4NO3 vs 100mM Mannitol
  misc_feature: MA Experiment ID: 20001768 Result: Up-regulated in Transcription
  misc_feature: MA Experiment 20001768 PARAMETER Experiment Name: At_Far-red-enriched-adult_P Parameter: Age (day) Value: 28
  misc_feature: MA Experiment 20001768 PARAMETER Experiment Name: At_Far-red-enriched-adult_P Parameter: Light Value: Far-red enriched vs. White
  misc_feature: MA Experiment 20001768 PARAMETER Experiment Name: At_Far-red-enriched-adult_P Parameter: Organism Value: A. thaliana
  misc_feature: MA Experiment 20001768 PARAMETER Experiment Name: At_Far-red-enriched-adult_P Parameter: Plant Line Value: Columbia
  misc_feature: MA Experiment 20001768 PARAMETER Experiment Name: At_Far-red-enriched-adult_P Parameter: Timepoint (hr) Value: 1
  misc_feature: MA Experiment 20001768 PARAMETER Experiment Name: At_Far-red-enriched-adult_P Parameter: Tissue Value: Aerial
  misc_feature: MA Experiment ID: 20001904 Result: Up-regulated in Transcription
  misc_feature: MA Experiment 20001904 PARAMETER Experiment Name: At_Drought_Reproduction_P Parameter: Age (day) Value: 37
  misc_feature: MA Experiment 20001904 PARAMETER Experiment Name: At_Drought_Reproduction_P Parameter: Organism Value: A. thaliana
  misc_feature: MA Experiment 20001904 PARAMETER Experiment Name: At_Drought_Reproduction_P Parameter: Plant Line Value: WS
  misc_feature: MA Experiment 20001904 PARAMETER Experiment Name: At_Drought_Reproduction_P Parameter: Timepoint (day) Value: 7
  misc_feature: MA Experiment 20001904 PARAMETER Experiment Name: At_Drought_Reproduction_P Parameter: Tissue Value: Rosettes
  misc_feature: MA Experiment 20001904 PARAMETER Experiment Name: At_Drought_Reproduction_P Parameter: Treatment Value: Drought vs. No Drought
  misc_feature: MA Experiment ID: 20001905 Result: Up-regulated in Transcription
  misc_feature: MA Experiment 20001905 PARAMETER Experiment Name: At_Drought_Reproduction_P Parameter: Age (day) Value: 40
  misc_feature: MA Experiment 20001905 PARAMETER Experiment Name: At_Drought_Reproduction_P Parameter: Organism Value: A. thaliana
  misc_feature: MA Experiment 20001905 PARAMETER Experiment Name: At_Drought_Reproduction_P Parameter: Plant Line Value: WS
  misc_feature: MA Experiment 20001905 PARAMETER Experiment Name: At_Drought_Reproduction_P Parameter: Timepoint (day) Value: 10
  misc_feature: MA Experiment 20001905 PARAMETER Experiment Name: At_Drought_Reproduction_P Parameter: Tissue Value: Rosettes
  misc_feature: MA Experiment 20001905 PARAMETER Experiment Name: At_Drought_Reproduction_P Parameter: Treatment Value: Drought vs. No Drought
  misc_feature: MA Experiment ID: 20001906 Result: Down-regulated in Transcription
  misc_feature: MA Experiment 20001906 PARAMETER Experiment Name: At_Drought_Reproduction_P Parameter: Age (day) Value: 35
  misc_feature: MA Experiment 20001906 PARAMETER Experiment Name: At_Drought_Reproduction_P Parameter: Organism Value: A. thaliana
  misc_feature: MA Experiment 20001906 PARAMETER Experiment Name: At_Drought_Reproduction_P Parameter: Plant Line Value: WS
  misc_feature: MA Experiment 20001906 PARAMETER Experiment Name: At_Drought_Reproduction_P Parameter: Timepoint (day) Value: 5
  misc_feature: MA Experiment 20001906 PARAMETER Experiment Name: At_Drought_Reproduction_P Parameter: Tissue Value: Siliques
  misc_feature: MA Experiment 20001906 PARAMETER Experiment Name: At_Drought_Reproduction_P Parameter: Treatment Value: Drought vs. No Drought
  misc_feature: MA Experiment ID: 20001911 Result: Down-regulated in Transcription
  misc_feature: MA Experiment 20001911 PARAMETER Experiment Name: At_Drought_Reproduction_P Parameter: Age (day) Value: 40
  misc_feature: MA Experiment 20001911 PARAMETER Experiment Name: At_Drought_Reproduction_P Parameter: Organism Value: A. thaliana
  misc_feature: MA Experiment 20001911 PARAMETER Experiment Name: At_Drought_Reproduction_P Parameter: Plant Line Value: WS
  misc_feature: MA Experiment 20001911 PARAMETER Experiment Name: At_Drought_Reproduction_P Parameter: Timepoint (day) Value: 10
  misc_feature: MA Experiment 20001911 PARAMETER Experiment Name: At_Drought_Reproduction_P Parameter: Tissue Value: Flowers
  misc_feature: MA Experiment 20001911 PARAMETER Experiment Name: At_Drought_Reproduction_P Parameter: Treatment Value: Drought vs. No Drought
aaaaattaagagcaaaagtcatttaactttcctaaaacaatggctttaaaacatatgcaaatctttctcttcgtcgctatattttcatcattctgtttctccatcactctttctcgtccactcgacaatgaactcatcatgcaaaagaggcacatcgagtggatgactaaacacggccgtgtctacgcggatgtgaaggaggaaaacaatcgctacgttgtgttcaaaaacaacgtcgaacgcattgaacatttaaatagcattcctgccggaagaactttcaaacttgcggtaaatcagtttgctgatttaaccaatgacgaatttcgttccatgtacactggtttcaaaggtgtctcggcattatctagccaaagccaaactaaaatgtcgccgtttaggtaccaaaacgtttcttctggtgctttgccggtttctgttgactggaggaagaaaggagctgtgacccctatcaagaatcaaggcagctgcggatgttgttgggcgttttcagcggttgcggctattgaaggagcaacacaaataaagaaagggaaacttatatctttgtcagaacaacagcttgttgattgcgacacaaacgattttggctgcgaaggcggtttaatggatactgcgtttgagcatataaaagcgactggcggcttgacaactgagtcaaattatccttacaaaggcgaagacgctacttgcaattccaaaaagaccaatccaaaagcaacttctattacaggttatgaggatgtcccggttaatgatgagcaagcactgatgaaggcagtggcacaccaaccggttagcgttggaattgaaggaggtggttttgatttccaattctattcgtctggtgtgttcactggagagtgcactacgtatcttgatcatgcagtaactgcgattggatacggcgaatctactaacggatcaaagtattggatcatcaagaattcatggggaacaaaatggggagaaagtggatatatgaggattcaaaaagatgtcaaggataaacaaggactatgtggtcttgccatgaaagcttcttacccaactatatgaattcaaaaccgtgttaagcttttaattgtgtatgtttgtgtgggattgatgtctaaaaataatttgaattgttttatgtaaaaaaattgtatttagactgttgtatgcattttatgaaattgtaagcttatgtaatgcaaaggattgataattttcg

SEQ ID NO: 36431 - protein, 346 aa, Arabidopsis thaliana
  peptide (1)..(346): Ceres Seq. ID no. 13575167
  misc_feature (130)..(345): Pfam Name: Papain family cysteine protease Pfam Description: Papain family cysteine protease
  misc_feature (1)..(344): Homolog of NCBI NO: 1169186 NR Description: Thiol protease SEN102 precursor
  misc_feature (7)..(345): Homolog of NCBI NO: 34329348 NR Description: putative cysteine proteinase [Medicago truncatula]
  misc_feature (7)..(345): Homolog of NCBI NO: 535454 NR Description: cysteine proteinase
  misc_feature (1)..(345): Homolog of NCBI NO: 13491750 NR Description: cysteine protease [Ipomoea batatas]
  misc_feature (1)..(345): Homolog of NCBI NO: 24285904 NR Description: cysteine proteinase precursor [Ipomoea batatas]
  misc_feature (1)..(346): Homolog of NCBI NO: 21666724 NR Description: cysteine proteinase [Brassica napus]
  misc_feature (1)..(346): Homolog of NCBI NO: 5823020 NR Description: senescence-specific cysteine protease [Brassica
  misc_feature (1)..(346): Homolog of NCBI NO: 5823018 NR Description: senescence-specific cysteine protease [Brassica
  misc_feature (1)..(346): Homolog of NCBI NO: 1046373 NR Description: SAG12 protein
  misc_feature (1)..(346): Homolog of NCBI NO: 18422605 NR Description: senescence-specific cysteine protease SAG12
MALKHMQIFLFVAIFSSFCFSITLSRPLDNELIMQKRHIEWMTKHGRVYADVKEENNRYVVFKNNVERIEHLNSIPAGRTFKLAVNQFADLTNDEFRSMYTGFKGVSALSSQSQTKMSPFRYQNVSSGALPVSVDWRKKGAVTPIKNQGSCGCCWAFSAVAAIEGATQIKKGKLISLSEQQLVDCDTNDFGCEGGLMDTAFEHIKATGGLTTESNYPYKGEDATCNSKKTNPKATSITGYEDVPVNDEQALMKAVAHQPVSVGIEGGGFDFQFYSSGVFTGECTTYLDHAVTAIGYGESTNGSKYWIIKNSWGTKWGESGYMRIQKDVKDKQGLCGLAMKASYPTI

SEQ ID NO: 36432 - protein, 341 aa, Arabidopsis thaliana
  peptide (1)..(341): Ceres Seq. ID no. 13575168
  misc_feature (125)..(340): Pfam Name: Papain family cysteine protease Pfam Description: Papain family cysteine protease
  misc_feature (1)..(339): Homolog of NCBI NO: 1169186 NR Description: Thiol protease SEN102 precursor
  misc_feature (2)..(340): Homolog of NCBI NO: 34329348 NR Description: putative cysteine proteinase [Medicago truncatula]
  misc_feature (2)..(340): Homolog of NCBI NO: 535454 NR Description: cysteine proteinase
  misc_feature (1)..(340): Homolog of NCBI NO: 13491750 NR Description: cysteine protease [Ipomoea batatas]
  misc_feature (1)..(340): Homolog of NCBI NO: 24285904 NR Description: cysteine proteinase precursor [Ipomoea batatas]
  misc_feature (1)..(341): Homolog of NCBI NO: 21666724 NR Description: cysteine proteinase [Brassica napus]
  misc_feature (1)..(341): Homolog of NCBI NO: 5823020 NR Description: senescence-specific cysteine protease [Brassica
  misc_feature (1)..(341): Homolog of NCBI NO: 5823018 NR Description: senescence-specific cysteine protease [Brassica
  misc_feature (1)..(341): Homolog of NCBI NO: 1046373 NR Description: SAG12 protein
  misc_feature (1)..(341): Homolog of NCBI NO: 18422605 NR Description: senescence-specific cysteine protease SAG12
MQIFLFVAIFSSFCFSITLSRPLDNELIMQKRHIEWMTKHGRVYADVKEENNRYVVFKNNVERIEHLNSIPAGRTFKLAVNQFADLTNDEFRSMYTGFKGVSALSSQSQTKMSPFRYQNVSSGALPVSVDWRKKGAVTPIKNQGSCGCCWAFSAVAAIEGATQIKKGKLISLSEQQLVDCDTNDFGCEGGLMDTAFEHIKATGGLTTESNYPYKGEDATCNSKKTNPKATSITGYEDVPVNDEQALMKAVAHQPVSVGIEGGGFDFQFYSSGVFTGECTTYLDHAVTAIGYGESTNGSKYWIIKNSWGTKWGESGYMRIQKDVKDKQGLCGLAMKASYPTI

SEQ ID NO: 36433 - protein, 313 aa, Arabidopsis thaliana
  peptide (1)..(313): Ceres Seq. ID no. 13575169
  misc_feature (97)..(312): Pfam Name: Papain family cysteine protease Pfam Description: Papain family cysteine protease
  misc_feature (1)..(311): Homolog of NCBI NO: 1169186 NR Description: Thiol protease SEN102 precursor
  misc_feature (1)..(312): Homolog of NCBI NO: 34329348 NR Description: putative cysteine proteinase [Medicago truncatula]
  misc_feature (1)..(312): Homolog of NCBI NO: 535454 NR Description: cysteine proteinase
  misc_feature (1)..(312): Homolog of NCBI NO: 13491750 NR Description: cysteine protease [Ipomoea batatas]
  misc_feature (1)..(312): Homolog of NCBI NO: 24285904 NR Description: cysteine proteinase precursor [Ipomoea batatas]
  misc_feature (1)..(313): Homolog of NCBI NO: 21666724 NR Description: cysteine proteinase [Brassica napus]
  misc_feature (1)..(313): Homolog of NCBI NO: 5823020 NR Description: senescence-specific cysteine protease [Brassica
  misc_feature (1)..(313): Homolog of NCBI NO: 5823018 NR Description: senescence-specific cysteine protease [Brassica
  misc_feature (1)..(313): Homolog of NCBI NO: 1046373 NR Description: SAG12 protein
  misc_feature (1)..(313): Homolog of NCBI NO: 18422605 NR Description: senescence-specific cysteine protease SAG12
MQKRHIEWMTKHGRVYADVKEENNRYVVFKNNVERIEHLNSIPAGRTFKLAVNQFADLTNDEFRSMYTGFKGVSALSSQSQTKMSPFRYQNVSSGALPVSVDWRKKGAVTPIKNQGSCGCCWAFSAVAAIEGATQIKKGKLISLSEQQLVDCDTNDFGCEGGLMDTAFEHIKATGGLTTESNYPYKGEDATCNSKKTNPKATSITGYEDVPVNDEQALMKAVAHQPVSVGIEGGGFDFQFYSSGVFTGECTTYLDHAVTAIGYGESTNGSKYWIIKNSWGTKWGESGYMRIQKDVKDKQGLCGLAMKASYPTI

SEQ ID NO: 36434 - DNA, 1328 bp, Arabidopsis thaliana
  misc_feature (1)..(1328): Ceres Seq. ID no. 12421197
  misc_feature: MA Experiment ID: 108462 Result: Down-regulated in Transcription
  misc_feature: MA Experiment 108462 PARAMETER Experiment Name: At_Germinating_Seeds_cDNA_P Parameter: Age (day) Value: 2 vs. 0
  misc_feature: MA Experiment 108462 PARAMETER Experiment Name: At_Germinating_Seeds_cDNA_P Parameter: Tissue Value: Germinating Seeds
  misc_feature: MA Experiment ID: 108463 Result: Down-regulated in Transcription
  misc_feature: MA Experiment 108463 PARAMETER Experiment Name: At_Germinating_Seeds_cDNA_P Parameter: Age (day) Value: 3 vs. 0
  misc_feature: MA Experiment 108463 PARAMETER Experiment Name: At_Germinating_Seeds_cDNA_P Parameter: Tissue Value: Germinating Seeds
  misc_feature: MA Experiment ID: 108464 Result: Down-regulated in Transcription
  misc_feature: MA Experiment 108464 PARAMETER Experiment Name: At_Germinating_Seeds_cDNA_P Parameter: Age (day) Value: 4 vs. 0
  misc_feature: MA Experiment 108464 PARAMETER Experiment Name: At_Germinating_Seeds_cDNA_P Parameter: Tissue Value: Germinating Seeds
  misc_feature: MA Experiment ID: 108577 Result: Down-regulated in Transcription
  misc_feature: MA Experiment 108577 PARAMETER Experiment Name: At_42deg_Heat_cDNA_P Parameter: Temperature (deg C) Value: 42 vs. 22
  misc_feature: MA Experiment 108577 PARAMETER Experiment Name: At_42deg_Heat_cDNA_P Parameter: Timepoint (hr) Value: 6
  misc_feature: MA Experiment 108577 PARAMETER Experiment Name: At_42deg_Heat_cDNA_P Parameter: Tissue Value: Aerial
  misc_feature: MA Experiment ID: 20000111 Result: Down-regulated in Transcription
  misc_feature: MA Experiment 20000111 PARAMETER Experiment Name: At_42deg_Heat_cDNA_P Parameter: Temperature (deg C) Value: 42 vs. 22
  misc_feature: MA Experiment 20000111 PARAMETER Experiment Name: At_42deg_Heat_cDNA_P Parameter: Timepoint (hr) Value: 6
  misc_feature: MA Experiment 20000111 PARAMETER Experiment Name: At_42deg_Heat_cDNA_P Parameter: Tissue Value: Aerial
  misc_feature: MA Experiment ID: 20000113 Result: Down-regulated in Transcription
  misc_feature: MA Experiment 20000113 PARAMETER Experiment Name: At_42deg_Heat_cDNA_P Parameter: Temperature (deg C) Value: 42 vs. 22
  misc_feature: MA Experiment 20000113 PARAMETER Experiment Name: At_42deg_Heat_cDNA_P Parameter: Timepoint (hr) Value: 8
  misc_feature: MA Experiment 20000113 PARAMETER Experiment Name: At_42deg_Heat_cDNA_P Parameter: Tissue Value: Aerial
  misc_feature: MA Experiment ID: 20000169 Result: Down-regulated in Transcription
  misc_feature: MA Experiment 20000169 PARAMETER Experiment Name: At_100uM_ABA_P Parameter: Age (day) Value: 14
  misc_feature: MA Experiment 20000169 PARAMETER Experiment Name: At_100uM_ABA_P Parameter: Organism Value: A. thaliana
  misc_feature: MA Experiment 20000169 PARAMETER Experiment Name: At_100uM_ABA_P Parameter: Plant Line Value: WS
  misc_feature: MA Experiment 20000169 PARAMETER Experiment Name: At_100uM_ABA_P Parameter: Timepoint (hr) Value: 6
  misc_feature: MA Experiment 20000169 PARAMETER Experiment Name: At_100uM_ABA_P Parameter: Tissue Value: Aerial
  misc_feature: MA Experiment 20000169 PARAMETER Experiment Name: At_100uM_ABA_P Parameter: Treatment Value: 100uM ABA vs. No Treatment
  misc_feature: MA Experiment ID: 20000173 Result: Down-regulated in Transcription
  misc_feature: MA Experiment 20000173 PARAMETER Experiment Name: At_42deg_Heat_P Parameter: Age (day) Value: 14
  misc_feature: MA Experiment 20000173 PARAMETER Experiment Name: At_42deg_Heat_P Parameter: Organism Value: A. thaliana
  misc_feature: MA Experiment 20000173 PARAMETER Experiment Name: At_42deg_Heat_P Parameter: Plant Line Value: WS
  misc_feature: MA Experiment 20000173 PARAMETER Experiment Name: At_42deg_Heat_P Parameter: Temperature (deg C) Value: 42 vs. 22
  misc_feature: MA Experiment 20000173 PARAMETER Experiment Name: At_42deg_Heat_P Parameter: Timepoint (hr) Value: 6
  misc_feature: MA Experiment 20000173 PARAMETER Experiment Name: At_42deg_Heat_P Parameter: Tissue Value: Aerial
  misc_feature: MA Experiment ID: 20000213 Result: Up-regulated in Transcription
  misc_feature: MA Experiment 20000213 PARAMETER Experiment Name: At_4deg_Cold_P Parameter: Timepoint (hr) Value: 2
  misc_feature: MA Experiment ID: 20000234 Result: Down-regulated in Transcription
  misc_feature: MA Experiment 20000234 PARAMETER Experiment Name: At_Siliques_P Parameter: Age (day) Value: 21
  misc_feature: MA Experiment 20000234 PARAMETER Experiment Name: At_Siliques_P Parameter: Organism Value: A. thaliana
  misc_feature: MA Experiment 20000234 PARAMETER Experiment Name: At_Siliques_P Parameter: Plant Line Value: WS
  misc_feature: MA Experiment 20000234 PARAMETER Experiment Name: At_Siliques_P Parameter: Tissue Value: Less Than 5mm Siliques vs. Whole Plant
  misc_feature: MA Experiment ID: 20000265 Result: Up-regulated in Transcription
  misc_feature: MA Experiment 20000265 PARAMETER Experiment Name: At_Open_Flower_P Parameter: Age (day) Value: 21
  misc_feature: MA Experiment 20000265 PARAMETER Experiment Name: At_Open_Flower_P Parameter: Plant Line Value: WS
  misc_feature: MA Experiment 20000265 PARAMETER Experiment Name: At_Open_Flower_P Parameter: Tissue Value: Closed Flower vs. Whole Plant
  misc_feature: MA Experiment ID: 20000286 Result: Up-regulated in Transcription
  misc_feature: MA Experiment 20000286 PARAMETER Experiment Name: At_Open_Flower_P Parameter: Age (day) Value: 21
  misc_feature: MA Experiment 20000286 PARAMETER Experiment Name: At_Open_Flower_P Parameter: Plant Line Value: WS
  misc_feature: MA Experiment 20000286 PARAMETER Experiment Name: At_Open_Flower_P Parameter: Tissue Value: Half Open vs. Whole Plant
  misc_feature: MA Experiment ID: 20000794 Result: Up-regulated in Transcription
  misc_feature: MA Experiment 20000794 PARAMETER Experiment Name: At_Petals_P Parameter: Age (day) Value: 23-25 days
  misc_feature: MA Experiment 20000794 PARAMETER Experiment Name: At_Petals_P Parameter: Plant Line Value: WS
  misc_feature: MA Experiment 20000794 PARAMETER Experiment Name: At_Petals_P Parameter: Tissue Value: Petals vs. Whole plant
  misc_feature: MA Experiment ID: 20001247 Result: Down-regulated in Transcription
  misc_feature: MA Experiment 20001247 PARAMETER Experiment Name: At_Far-red-induction_P Parameter: Age (day) Value: 7
  misc_feature: MA Experiment 20001247 PARAMETER Experiment Name: At_Far-red-induction_P Parameter: Light Value: Far-red vs. White
  misc_feature: MA Experiment 20001247 PARAMETER Experiment Name: At_Far-red-induction_P Parameter: Organism Value: A. thaliana
  misc_feature: MA Experiment 20001247 PARAMETER Experiment Name: At_Far-red-induction_P Parameter: Plant Line Value: Columbia
  misc_feature: MA Experiment 20001247 PARAMETER Experiment Name: At_Far-red-induction_P Parameter: Timepoint (hr) Value: 1
  misc_feature: MA Experiment 20001247 PARAMETER Experiment Name: At_Far-red-induction_P Parameter: Tissue Value: Whole Plant
  misc_feature: MA Experiment ID: 20001555 Result: Down-regulated in Transcription
  misc_feature: MA Experiment 20001555 PARAMETER Experiment Name: At_Drought_Soil_Dry_P Parameter: Age (day) Value: 24
  misc_feature: MA Experiment 20001555 PARAMETER Experiment Name: At_Drought_Soil_Dry_P Parameter: Organism Value: A. thaliana
  misc_feature: MA Experiment 20001555 PARAMETER Experiment Name: At_Drought_Soil_Dry_P Parameter: Plant Line Value: WS
  misc_feature: MA Experiment 20001555 PARAMETER Experiment Name: At_Drought_Soil_Dry_P Parameter: Post Timepoint (hr) Value: None
  misc_feature: MA Experiment 20001555 PARAMETER Experiment Name: At_Drought_Soil_Dry_P Parameter: Post-Treatment Value: None
  misc_feature: MA Experiment 20001555 PARAMETER Experiment Name: At_Drought_Soil_Dry_P Parameter: Timepoint (day) Value: 10
  misc_feature: MA Experiment 20001555 PARAMETER Experiment Name: At_Drought_Soil_Dry_P Parameter: Treatment Value: Drought vs. No Drought
  misc_feature: MA Experiment ID: 20001556 Result: Down-regulated in Transcription
  misc_feature: MA Experiment 20001556 PARAMETER Experiment Name: At_Drought_Soil_Dry_P Parameter: Age (day) Value: 26
  misc_feature: MA Experiment 20001556 PARAMETER Experiment Name: At_Drought_Soil_Dry_P Parameter: Organism Value: A. thaliana
  misc_feature: MA Experiment 20001556 PARAMETER Experiment Name: At_Drought_Soil_Dry_P Parameter: Plant Line Value: WS
  misc_feature: MA Experiment 20001556 PARAMETER Experiment Name: At_Drought_Soil_Dry_P Parameter: Post Timepoint (hr) Value: None
  misc_feature: MA Experiment 20001556 PARAMETER Experiment Name: At_Drought_Soil_Dry_P Parameter: Post-Treatment Value: None
  misc_feature: MA Experiment 20001556 PARAMETER Experiment Name: At_Drought_Soil_Dry_P Parameter: Timepoint (day) Value: 12
  misc_feature: MA Experiment 20001556 PARAMETER Experiment Name: At_Drought_Soil_Dry_P Parameter: Treatment Value: Drought vs. No Drought
  misc_feature: MA Experiment ID: 20001559 Result: Down-regulated in Transcription
  misc_feature: MA Experiment 20001559 PARAMETER Experiment Name: At_Drought_Soil_Dry_P Parameter: Age (day) Value: 28
  misc_feature: MA Experiment 20001559 PARAMETER Experiment Name: At_Drought_Soil_Dry_P Parameter: Organism Value: A. thaliana
  misc_feature: MA Experiment 20001559 PARAMETER Experiment Name: At_Drought_Soil_Dry_P Parameter: Plant Line Value: WS
  misc_feature: MA Experiment 20001559 PARAMETER Experiment Name: At_Drought_Soil_Dry_P Parameter: Post Timepoint (hr) Value: 29
  misc_feature: MA Experiment 20001559 PARAMETER Experiment Name: At_Drought_Soil_Dry_P Parameter: Post-Treatment Value: Re-Water vs. No Drought
  misc_feature: MA Experiment 20001559 PARAMETER Experiment Name: At_Drought_Soil_Dry_P Parameter: Timepoint (day) Value: 14
  misc_feature: MA Experiment 20001559 PARAMETER Experiment Name: At_Drought_Soil_Dry_P Parameter: Treatment Value: Drought vs. No Drought
  misc_feature: MA Experiment ID: 20001904 Result: Down-regulated in Transcription
  misc_feature: MA Experiment 20001904 PARAMETER Experiment Name: At_Drought_Reproduction_P Parameter: Age (day) Value: 37
  misc_feature: MA Experiment 20001904 PARAMETER Experiment Name: At_Drought_Reproduction_P Parameter: Organism Value: A. thaliana
  misc_feature: MA Experiment 20001904 PARAMETER Experiment Name: At_Drought_Reproduction_P Parameter: Plant Line Value: WS
  misc_feature: MA Experiment 20001904 PARAMETER Experiment Name: At_Drought_Reproduction_P Parameter: Timepoint (day) Value: 7
  misc_feature: MA Experiment 20001904 PARAMETER Experiment Name: At_Drought_Reproduction_P Parameter: Tissue Value: Rosettes
  misc_feature: MA Experiment 20001904 PARAMETER Experiment Name: At_Drought_Reproduction_P Parameter: Treatment Value: Drought vs. No Drought
  misc_feature: MA Experiment ID: 20001905 Result: Down-regulated in Transcription
  misc_feature: MA Experiment 20001905 PARAMETER Experiment Name: At_Drought_Reproduction_P Parameter: Age (day) Value: 40
  misc_feature: MA Experiment 20001905 PARAMETER Experiment Name: At_Drought_Reproduction_P Parameter: Organism Value: A. thaliana
  misc_feature: MA Experiment 20001905 PARAMETER Experiment Name: At_Drought_Reproduction_P Parameter: Plant Line Value: WS
  misc_feature: MA Experiment 20001905 PARAMETER Experiment Name: At_Drought_Reproduction_P Parameter: Timepoint (day) Value: 10
  misc_feature: MA Experiment 20001905 PARAMETER Experiment Name: At_Drought_Reproduction_P Parameter: Tissue Value: Rosettes
  misc_feature: MA Experiment 20001905 PARAMETER Experiment Name: At_Drought_Reproduction_P Parameter: Treatment Value: Drought vs. No Drought
  misc_feature: MA Experiment ID: 20001911 Result: Down-regulated in Transcription
  misc_feature: MA Experiment 20001911 PARAMETER Experiment Name: At_Drought_Reproduction_P Parameter: Age (day) Value: 40
  misc_feature: MA Experiment 20001911 PARAMETER Experiment Name: At_Drought_Reproduction_P Parameter: Organism Value: A. thaliana
  misc_feature: MA Experiment 20001911 PARAMETER Experiment Name: At_Drought_Reproduction_P Parameter: Plant Line Value: WS
  misc_feature: MA Experiment 20001911 PARAMETER Experiment Name: At_Drought_Reproduction_P Parameter: Timepoint (day) Value: 10
  misc_feature: MA Experiment 20001911 PARAMETER Experiment Name: At_Drought_Reproduction_P Parameter: Tissue Value: Flowers
  misc_feature: MA Experiment 20001911 PARAMETER Experiment Name: At_Drought_Reproduction_P Parameter: Treatment Value: Drought vs. No Drought
tttcttcttcttcttcatttttctattcacattctctgaaactcataccatattttcaaagctcttaacccaaaaaccctaagtcttttttttcttcaaattattggttatattaatgttttaagctatgatggatatgactcctacaataacaacaacaacaacaccaactcctaaatcacccgaacccgaatccgaaactccgacccggatccaaccggcgaaacccatttcctttagcaacggcatcatcaaacgccaccaccaccaccaccatcctctcctctttacttacaaagaatgtctcaaaaaccacgcggcggctttaggtggtcacgctctcgacggttgcggcgaattcatgccgtctccgtcgtcaatctcctccgatccaacttctctcaaatgtgctgcttgtggctgccaccgtaatttccaccgccgtgatccagataacaacaacgactcttcccaaatccctcctcctccttccaccgccgtagagtatcaacctcaccaccgtcatcatccaccaccaccaccacctcctccaccaccacgtagtcctaactcagcttctcctccaccaatctcttcctcttacatgctcttatctctctccggtactaataacaacaacaacaacttagcttctttctccgatcttaacttctccgccggaaacaaccaccaccaccaccaccaacatactcttcacggatctcgtaaaagattccgaacaaaattcagccagtttcagaaagagaagatgcatgaattcgccgaacgtgttggttggaagatgcaaaaacgtgacgaagacgatgttcgtgatttttgccggcagatcggagttgataaaagtgttctcaaagtttggatgcataacaacaaaaacacctttaaccgccgtgatatcgccggaaacgagatccggcaaatcgataacggcggaggaaaccacactccgattctcgccggcgagattaataaccataacaatggacaccacggtgtcggaggaggaggagagcttcaccagagtgttagtagcggcggtggtggcggaggatttgatagtgatagcggcggagctaacggtggtaacgttaacggatcatcgtcgtcgtgaagttaaagatgagagtgtcaggttaataagaagcttagagtaagcttattcgtattatcatcgttaataactttctattaaatattaattaagatctttagctttgtttgtttttgcattattattagttttgatttaatgttctttaccacgtcggtgtctcgctcgatgaggaataataccataacaatgttcg

SEQ ID NO: 36435 - protein, 334 aa, Arabidopsis thaliana
  peptide (1)..(334): Ceres Seq. ID no. 12421198
  misc_feature (51)..(112): Pfam Name: ZF-HD protein dimerisation region Pfam Description: ZF-HD protein dimerisation region
  misc_feature (198)..(261): Homolog of NCBI NO: 15238445 NR Description: hypothetical protein common family; protein id:
  misc_feature (54)..(158): Homolog of NCBI NO: 15238445 NR Description: hypothetical protein common family; protein id:
  misc_feature (21)..(279): Homolog of NCBI NO: 20148768 NR Description: hypothetical protein At2g02540/T822.16
  misc_feature (21)..(279): Homolog of NCBI NO: 15226993 NR Description: hypothetical protein
  misc_feature (2)..(182): Homolog of NCBI NO: 15242243 NR Description: putative protein; protein id: At5g15210.1
  misc_feature (78)..(334): Homolog of NCBI NO: 13277222 NR Description: ZF-HD homeobox protein [Flaveria bidentis]
  misc_feature (5)..(324): Homolog of NCBI NO: 13277220 NR Description: ZF-HD homeobox protein [Flaveria bidentis]
  misc_feature (15)..(334): Homolog of NCBI NO: 15228530 NR Description: unknown protein
  misc_feature (2)..(334): Homolog of NCBI NO: 21592512 NR Description: unknown [Arabidopsis thaliana]
  misc_feature (1)..(334): Homolog of NCBI NO: 18421904 NR Description: putative protein
MMDMTPTITTTTTPTPKSPEPESETPTRIQPAKPISFSNGIIKRHHHHHHPLLFTYKECLKNHAAALGGHALDGCGEFMPSPSSISSDPTSLKCAACGCHRNFHRRDPDNNNDSSQIPPPPSTAVEYQPHHRHHPPPPPPPPPPRSPNSASPPPISSSYMLLSLSGTNNNNNNLASFSDLNFSAGNNHHHHHQHTLHGSRKRFRTKFSQFQKEKMHEFAERVGWKMQKRDEDDVRDFCRQIGVDKSVLKVWMHNNKNTFNRRDIAGNEIRQIDNGGGNHTPILAGEINNHNNGHHGVGGGGELHQSVSSGGGGGGFDSDSGGANGGNVNGSSSS

SEQ ID NO: 36436 - protein, 333 aa, Arabidopsis thaliana
  peptide (1)..(333): Ceres Seq. ID no. 12421199
  misc_feature (50)..(111): Pfam Name: ZF-HD protein dimerisation region Pfam Description: ZF-HD protein dimerisation region
  misc_feature (197)..(260): Homolog of NCBI NO: 15238445 NR Description: hypothetical protein common family; protein id:
  misc_feature (53)..(157): Homolog of NCBI NO: 15238445 NR Description: hypothetical protein common family; protein id:
  misc_feature (20)..(278): Homolog of NCBI NO: 20148768 NR Description: hypothetical protein At2g02540/T822.16
  misc_feature (20)..(278): Homolog of NCBI NO: 15226993 NR Description: hypothetical protein
  misc_feature (1)..(181): Homolog of NCBI NO: 15242243 NR Description: putative protein; protein id: At5g15210.1
  misc_feature (77)..(333): Homolog of NCBI NO: 13277222 NR Description: ZF-HD homeobox protein [Flaveria bidentis]
  misc_feature (4)..(323): Homolog of NCBI NO: 13277220 NR Description: ZF-HD homeobox protein [Flaveria bidentis]
  misc_feature (14)..(333): Homolog of NCBI NO: 15228530 NR Description: unknown protein
  misc_feature (1)..(333): Homolog of NCBI NO: 21592512 NR Description: unknown [Arabidopsis thaliana]
  misc_feature (1)..(333): Homolog of NCBI NO: 18421904 NR Description: putative protein
MDMTPTITTTTTPTPKSPEPESETPTRIQPAKPISFSNGIIKRHHHHHHPLLFTYKECLKNHAAALGGHALDGCGEFMPSPSSISSDPTSLKCAACGCHRNFHRRDPDNNNDSSQIPPPPSTAVEYQPHHRHHPPPPPPPPPPRSPNSASPPPISSSYMLLSLSGTNNNNNNLASFSDLNFSAGNNHHHHHQHTLHGSRKRFRTKFSQFQKEKMHEFAERVGWKMQKRDEDDVRDFCRQIGVDKSVLKVWMHNNKNTFNRRDIAGNEIRQIDNGGGNHTPILAGEINNHNNGHHGVGGGGELHQSVSSGGGGGGFDSDSGGANGGNVNGSSSS

SEQ ID NO: 36437 - protein, 331 aa, Arabidopsis thaliana
  peptide (1)..(331): Ceres Seq. ID no. 12421200
  misc_feature (48)..(109): Pfam Name: ZF-HD protein dimerisation region Pfam Description: ZF-HD protein dimerisation region
  misc_feature (195)..(258): Homolog of NCBI NO: 15238445 NR Description: hypothetical protein common family; protein id:
  misc_feature (51)..(155): Homolog of NCBI NO: 15238445 NR Description: hypothetical protein common family; protein id:
  misc_feature (18)..(276): Homolog of NCBI NO: 20148768 NR Description: hypothetical protein At2g02540/T822.16
  misc_feature (18)..(276): Homolog of NCBI NO: 15226993 NR Description: hypothetical protein
  misc_feature (1)..(179): Homolog of NCBI NO: 15242243 NR Description: putative protein; protein id: At5g15210.1
  misc_feature (75)..(331): Homolog of NCBI NO: 13277222 NR Description: ZF-HD homeobox protein [Flaveria bidentis]
  misc_feature (2)..(321): Homolog of NCBI NO: 13277220 NR Description: ZF-HD homeobox protein [Flaveria bidentis]
  misc_feature (12)..(331): Homolog of NCBI NO: 15228530 NR Description: unknown protein
  misc_feature (1)..(331): Homolog of NCBI NO: 21592512 NR Description: unknown [Arabidopsis thaliana]
  misc_feature (1)..(331): Homolog of NCBI NO: 18421904 NR Description: putative protein
MTPTITTTTTPTPKSPEPESETPTRIQPAKPISFSNGIIKRHHHHHHPLLFTYKECLKNHAAALGGHALDGCGEFMPSPSSISSDPTSLKCAACGCHRNFHRRDPDNNNDSSQIPPPPSTAVEYQPHHRHHPPPPPPPPPPRSPNSASPPPISSSYMLLSLSGTNNNNNNLASFSDLNFSAGNNHHHHHQHTLHGSRKRFRTKFSQFQKEKMHEFAERVGWKMQKRDEDDVRDFCRQIGVDKSVLKVWMHNNKNTFNRRDIAGNEIRQIDNGGGNHTPILAGEINNHNNGHHGVGGGGELHQSVSSGGGGGGFDSDSGGANGGNVNGSSSS

SEQ ID NO: 36438 - DNA, 1277 bp, Arabidopsis thaliana
  misc_feature (1)..(1277): Ceres Seq. ID no. 12738378
  misc_feature: MA Experiment ID: 108434 Result: Down-regulated in Transcription
  misc_feature: MA Experiment 108434 PARAMETER Experiment Name: At_Root_Tips_cDNA_P Parameter: Tissue Value: Root Tips
  misc_feature: MA Experiment ID: 108463 Result: Up-regulated in Transcription
  misc_feature: MA Experiment 108463 PARAMETER Experiment Name: At_Germinating_Seeds_cDNA_P Parameter: Age (day) Value: 3 vs. 0
  misc_feature: MA Experiment 108463 PARAMETER Experiment Name: At_Germinating_Seeds_cDNA_P Parameter: Tissue Value: Germinating Seeds
  misc_feature: MA Experiment ID: 108464 Result: Up-regulated in Transcription
  misc_feature: MA Experiment 108464 PARAMETER Experiment Name: At_Germinating_Seeds_cDNA_P Parameter: Age (day) Value: 4 vs. 0
  misc_feature: MA Experiment 108464 PARAMETER Experiment Name: At_Germinating_Seeds_cDNA_P Parameter: Tissue Value: Germinating Seeds
  misc_feature: MA Experiment ID: 108488 Result: Down-regulated in Transcription
  misc_feature: MA Experiment ID: 108561 Result: Up-regulated in Transcription
  misc_feature: MA Experiment 108561 PARAMETER Experiment Name: At_100uM_ABA_cDNA_P Parameter: Timepoint (hr) Value: 6
  misc_feature: MA Experiment 108561 PARAMETER Experiment Name: At_100uM_ABA_cDNA_P Parameter: Tissue Value: Aerial
  misc_feature: MA Experiment 108561 PARAMETER Experiment Name: At_100uM_ABA_cDNA_P Parameter: Treatment Value: 100uM ABA vs. No Treatment
  misc_feature: MA Experiment ID: 108572 Result: Up-regulated in Transcription
  misc_feature: MA Experiment 108572 PARAMETER Experiment Name: At_Drought_cDNA_P Parameter: Timepoint (hr) Value: 1
  misc_feature: MA Experiment 108572 PARAMETER Experiment Name: At_Drought_cDNA_P Parameter: Tissue Value: Aerial
  misc_feature: MA Experiment 108572 PARAMETER Experiment Name: At_Drought_cDNA_P Parameter: Treatment Value: Drought vs. No Drought
  misc_feature: MA Experiment ID: 108573 Result: Up-regulated in Transcription
  misc_feature: MA Experiment 108573 PARAMETER Experiment Name: At_Drought_cDNA_P Parameter: Timepoint (hr) Value: 6
  misc_feature: MA Experiment 108573 PARAMETER Experiment Name: At_Drought_cDNA_P Parameter: Tissue Value: Aerial
  misc_feature: MA Experiment 108573 PARAMETER Experiment Name: At_Drought_cDNA_P Parameter: Treatment Value: Drought vs. No Drought
  misc_feature: MA Experiment ID: 108585 Result: Up-regulated in Transcription
  misc_feature: MA Experiment 108585 PARAMETER Experiment Name: At_5mM_NaNP_cDNA_P Parameter: Timepoint (hr) Value: 6
  misc_feature: MA Experiment 108585 PARAMETER Experiment Name: At_5mM_NaNP_cDNA_P Parameter: Tissue Value: Aerial
  misc_feature: MA Experiment 108585 PARAMETER Experiment Name: At_5mM_NaNP_cDNA_P Parameter: Treatment Value: null
  misc_feature: MA Experiment ID: 108595 Result: Down-regulated in Transcription
  misc_feature: MA Experiment 108595 PARAMETER Experiment Name: At_Ler-pi_Ovule_cDNA_P Parameter: Plant Line Value: null
  misc_feature: MA Experiment ID: 108605 Result: Up-regulated in Transcription
  misc_feature: MA Experiment 108605 PARAMETER Experiment Name: At_100uM_ABA_cDNA_P Parameter: Timepoint (hr) Value: 6
  misc_feature: MA Experiment 108605 PARAMETER Experiment Name: At_100uM_ABA_cDNA_P Parameter: Tissue Value: Aerial
  misc_feature: MA Experiment 108605 PARAMETER Experiment Name: At_100uM_ABA_cDNA_P Parameter: Treatment Value: 100uM ABA vs. No Treatment
  misc_feature: MA Experiment ID: 108609 Result: Up-regulated in Transcription
  misc_feature: MA Experiment 108609 PARAMETER Experiment Name: At_100uM_ABA_cDNA_P Parameter: Timepoint (hr) Value: 24
  misc_feature: MA Experiment 108609 PARAMETER Experiment Name: At_100uM_ABA_cDNA_P Parameter: Tissue Value: Aerial
  misc_feature: MA Experiment 108609 PARAMETER Experiment Name: At_100uM_ABA_cDNA_P Parameter: Treatment Value: 100uM ABA vs. No Treatment
  misc_feature: MA Experiment ID: 20000069 Result: Up-regulated in Transcription
  misc_feature: MA Experiment 20000069 PARAMETER Experiment Name: At_100uM_ABA_Mutants_cDNA_P Parameter: Plant Line Value: CS23
  misc_feature: MA Experiment 20000069 PARAMETER Experiment Name: At_100uM_ABA_Mutants_cDNA_P Parameter: Timepoint (hr) Value: 6
  misc_feature: MA Experiment 20000069 PARAMETER Experiment Name: At_100uM_ABA_Mutants_cDNA_P Parameter: Tissue Value: Aerial
  misc_feature: MA Experiment 20000069 PARAMETER Experiment Name: At_100uM_ABA_Mutants_cDNA_P Parameter: Treatment Value: 100uM ABA vs. No Treatment
  misc_feature: MA Experiment ID: 20000070 Result: Up-regulated in Transcription
  misc_feature: MA Experiment 20000070 PARAMETER Experiment Name: At_100uM_ABA_Mutants_cDNA_P Parameter: Plant Line Value: CS24
  misc_feature: MA Experiment 20000070 PARAMETER Experiment Name: At_100uM_ABA_Mutants_cDNA_P Parameter: Timepoint (hr) Value: 6
  misc_feature: MA Experiment 20000070 PARAMETER Experiment Name: At_100uM_ABA_Mutants_cDNA_P Parameter: Tissue Value: Aerial
  misc_feature: MA Experiment 20000070 PARAMETER Experiment Name: At_100uM_ABA_Mutants_cDNA_P Parameter: Treatment Value: 100uM ABA vs. No Treatment
  misc_feature: MA Experiment ID: 20000071 Result: Up-regulated in Transcription
  misc_feature: MA Experiment 20000071 PARAMETER Experiment Name: At_100uM_ABA_Mutants_cDNA_P Parameter: Plant Line Value: CS8104
  misc_feature: MA Experiment 20000071 PARAMETER Experiment Name: At_100uM_ABA_Mutants_cDNA_P Parameter: Timepoint (hr) Value: 6
  misc_feature: MA Experiment 20000071 PARAMETER Experiment Name: At_100uM_ABA_Mutants_cDNA_P Parameter: Tissue Value: Aerial
  misc_feature: MA Experiment 20000071 PARAMETER Experiment Name: At_100uM_ABA_Mutants_cDNA_P Parameter: Treatment Value: 100uM ABA vs. No Treatment
  misc_feature: MA Experiment ID: 20000072 Result: Up-regulated in Transcription
  misc_feature: MA Experiment 20000072 PARAMETER Experiment Name: At_100uM_ABA_Mutants_cDNA_P Parameter: Plant Line Value: CS8105
  misc_feature: MA Experiment 20000072 PARAMETER Experiment Name: At_100uM_ABA_Mutants_cDNA_P Parameter: Timepoint (hr) Value: 6
  misc_feature: MA Experiment 20000072 PARAMETER Experiment Name: At_100uM_ABA_Mutants_cDNA_P Parameter: Tissue Value: Aerial
  misc_feature: MA Experiment 20000072 PARAMETER Experiment Name: At_100uM_ABA_Mutants_cDNA_P Parameter: Treatment Value: 100uM ABA vs. No Treatment
  misc_feature: MA Experiment ID: 20000086 Result: Up-regulated in Transcription
  misc_feature: MA Experiment 20000086 PARAMETER Experiment Name: At_100uM_ABA_Mutants_cDNA_P Parameter: Plant Line Value: CS22
  misc_feature: MA Experiment 20000086 PARAMETER Experiment Name: At_100uM_ABA_Mutants_cDNA_P Parameter: Timepoint (hr) Value: 6
  misc_feature: MA Experiment 20000086 PARAMETER Experiment Name: At_100uM_ABA_Mutants_cDNA_P Parameter: Tissue Value: Aerial
  misc_feature: MA Experiment 20000086 PARAMETER Experiment Name: At_100uM_ABA_Mutants_cDNA_P Parameter: Treatment Value: 100uM ABA vs. No Treatment
  misc_feature: MA Experiment ID: 20000088 Result: Up-regulated in Transcription
  misc_feature: MA Experiment 20000088 PARAMETER Experiment Name: At_100uM_ABA_Mutants_cDNA_P Parameter: Plant Line Value: Landsberg
  misc_feature: MA Experiment 20000088 PARAMETER Experiment Name: At_100uM_ABA_Mutants_cDNA_P Parameter: Timepoint (hr) Value: 6
  misc_feature: MA Experiment 20000088 PARAMETER Experiment Name: At_100uM_ABA_Mutants_cDNA_P Parameter: Tissue Value: Aerial
  misc_feature: MA Experiment 20000088 PARAMETER Experiment Name: At_100uM_ABA_Mutants_cDNA_P Parameter: Treatment Value: 100uM ABA vs. No Treatment
atttcttcttcaccgttagatttttcctcgcttaatttctcaataacgctctcagagagaccatttgatgaagcttctcgcttctggaatttgaaaaggatttgataagacgagttcatagaagattaccgcaagttcatcaactttttgaacttgttatggagataatctcactgaacgttgtgccccagtgctctgtggttacttggagtagtaaattagcaacgataagattggtcccaaatcggtcaagtttgttattctcaggggtcaaaaaatccagacttgtgattcgaagtggaaattccgatggttatgttgttggtgagaatgatgacttgggtcgtatagccagaagaggagaatcaacgtcaaaggttttgattcctggtttgcctgatgaatcaaatggtgaaattgctgctcgaatcagtcattctcactgcgagtggaagcccaagcttagagtacattatgagaaagccggttgtgacaatctcgatgctcctgcggtgttgtttcttcctggctttggcgttggttcatttcactatgagaagcagcttaccgatttgggaagggattatcgagtatgggctattgattttcttggacagggtttatctctccctactgaagatcctactaccatgactgaagaaaccagttcctcggaagataaggaaccattttggggatttggtgacaaaactgaaccgtgggctgatcaacttgtattctctctggatctctggagggatcaagttcagtattttgtagaagaggttatcggtgagcctgtgtacattgctgggaactcacttggagggtatgtagctctctactttgcagcaacccatcctcacctggttaagggtgttaccttgcttaatgcaacacctttctggggtttcttccctaatccagtaagatccccaaagctagcacgtctctttccatggcccggagcattccctctgccggaaagagtgaaaaaaaatcacagaattggtgtggcaaaagataagtgatcctgaaagcatagctgagatacttaaacaggtctacacagaccattctaccaatgtggataaagtattctcacgtattgtggaggtcacacagcatccggctgctgcagcatcgtttgcttcaattatgcttgctcctggtggagagctatctttctccgaagctttatctaggtgtaaggaaaacaatgttcagatatgtctcatgtatggaagagaagatccatgggtgagaccgttatgggg

SEQ ID NO: 36439 - protein, 290 aa, Arabidopsis thaliana
  peptide (1)..(290): Ceres Seq. ID no. 12738379
  misc_feature (143)..(280): Pfam Name: alpha/beta hydrolase fold Pfam Description: alpha/beta hydrolase fold
  misc_feature (91)..(156): Homolog of NCBI NO: 23126297 NR Description: hypothetical protein [Nostoc punctiforme]
  misc_feature (180)..(249): Homolog of NCBI NO: 23126297 NR Description: hypothetical protein [Nostoc punctiforme]
  misc_feature (91)..(156): Homolog of NCBI NO: 17229548 NR Description: hypothetical protein [Nostoc sp. PCC 7120]
  misc_feature (180)..(277): Homolog of NCBI NO: 17229548 NR Description: hypothetical protein [Nostoc sp. PCC 7120]
  misc_feature (174)..(262): Homolog of NCBI NO: 37521904 NR Description: hypothetical protein gll2335 [Gloeobacter
  misc_feature (94)..(156): Homolog of NCBI NO: 16330114 NR Description: unknown protein [Synechocystis sp. PCC 6803]
  misc_feature (180)..(249): Homolog of NCBI NO: 16330114 NR Description: unknown protein [Synechocystis sp. PCC 6803]
  misc_feature (94)..(156): Homolog of NCBI NO: 23040754 NR Description: hypothetical protein [Trichodesmium erythraeum
  misc_feature (180)..(266): Homolog of NCBI NO: 23040754 NR Description: hypothetical protein [Trichodesmium erythraeum
  misc_feature (1)..(280): Homolog of NCBI NO: 15240707 NR Description: putative protein
MEIISLNVVPQCSVVTWSSKLATIRLVPNRSSLLFSGVKKSRLVIRSGNSDGYVVGENDDLGRIARRGESTSKVLIPGLPDESNGEIAARISHSHCEWKPKLRVHYEKAGCDNLDAPAVLFLPGFGVGSFHYEKQLTDLGRDYRVWAIDFLGQGLSLPTEDPTTMTEETSSSEDKEPFWGFGDKTEPWADQLVFSLDLWRDQVQYFVEEVIGEPVYIAGNSLGGYVALYFAATHPHLVKGVTLLNATPFWGFFPNPVRSPKLARLFPWPGAFPLPERVKKNHRIGVAKDK

SEQ ID NO: 36440 - DNA, 1737 bp, Arabidopsis thaliana
  misc_feature (1)..(1737): Ceres Seq. ID no. 12395169
  misc_feature: MA Experiment ID: 108573 Result: Up-regulated in Transcription
  misc_feature: MA Experiment 108573 PARAMETER Experiment Name: At_Drought_cDNA_P Parameter: Timepoint (hr) Value: 6
  misc_feature: MA Experiment 108573 PARAMETER Experiment Name: At_Drought_cDNA_P Parameter: Tissue Value: Aerial
  misc_feature: MA Experiment 108573 PARAMETER Experiment Name: At_Drought_cDNA_P Parameter: Treatment Value: Drought vs. No Drought
  misc_feature: MA Experiment ID: 108577 Result: Down-regulated in Transcription
  misc_feature: MA Experiment 108577 PARAMETER Experiment Name: At_42deg_Heat_cDNA_P Parameter: Temperature (deg C) Value: 42 vs. 22
  misc_feature: MA Experiment 108577 PARAMETER Experiment Name: At_42deg_Heat_cDNA_P Parameter: Timepoint (hr) Value: 6
  misc_feature: MA Experiment 108577 PARAMETER Experiment Name: At_42deg_Heat_cDNA_P Parameter: Tissue Value: Aerial
  misc_feature: MA Experiment ID: 20000113 Result: Down-regulated in Transcription
  misc_feature: MA Experiment 20000113 PARAMETER Experiment Name: At_42deg_Heat_cDNA_P Parameter: Temperature (deg C) Value: 42 vs. 22
  misc_feature: MA Experiment 20000113 PARAMETER Experiment Name: At_42deg_Heat_cDNA_P Parameter: Timepoint (hr) Value: 8
  misc_feature: MA Experiment 20000113 PARAMETER Experiment Name: At_42deg_Heat_cDNA_P Parameter: Tissue Value: Aerial
aatttgacagattcattcattagaagaagaagacaacaatccatcttcttctccccattcctcgtttcaattttgcagatctcgtctccttctcgatttattattaatatagagatggcaagttcaaaggggtctcagaatcatagaaatctgggatgcaatgggaaacaagctttactgcctccgaaaagtccgtttacgggtggtccaacgtttagtgcagattttgttccaagtagtgtgattggatccaaggctgttcagaagcttggagaaggaaatgccaatcatcatcgaacttcatctgagagttttcttattgaggaacagccttcttggcttgacgatcttctcaacgaacctgaaacacctgtacggaaaggagggcatcgacggtcatcgagtgattcatttgcatatgtagatgttcctgttggttttgatgttgattacacgctttgggatggtggtagatataataacaataatggtttctctaatcacgttagaggtcccaaggagtctgattaccttagaagccagcctgttcctttctacccttcagctcatttgtccaaacagaaaataagaccgtgggattcattaccagattccggtgctcgcccgaacagtagttctggttgttaggagagcagctctatcacaagatcagggtcttctggtagcctacgtgatacagaaaaggcttattctgctgctgatagcaagaaagatttcataaataatttcgcaaagtcgtcattcgaaaaacgggataatcctctggctaagtctgctacttccgaggctgatacgaaacgtgctagacagcagtttgcacagcgctctcgagtccgtaaaattcagtacatagctgaactggaaaggaacgttcagatgttacaagtagagggttctgaagtgtctgcggagcttgagtttctcaatcagcagaatctaattctcagcttggagaacaagtcccttaagaatcggttggaaagcttagcacaagagcagcttataaagtacttagaacatgatgtattggagaaagagattgtgaggctaagggctttataccagcttcaacagcagcaagagccgcagcagcaacatcagacaaaaaagcaaggatcatctagccaccagcgttcgaagagtagagatctagagtcgcaattcacgaatctgtccttgaggccttaacggttcaaagttcctgccgaaaatatttttatgcttatggctagagcttgagctgtcttcatggttccaggccagcttcttgtgtgtctttccctatcgcattagtagctgctcagtttgtgcttatgcttcttagtttattttcatctttgttgacccggtttgacatctcgatgagcaagtgccagcgattgatgggaaaacggcataaatgaaacaacgagttcgctggaggcggtttggtctgtctctgcgcacatcaggtatttatgataagatattattaactcatttgttcatgtctgctcaatagactgcaatccttatcacgatagtggcttcattctagggctctcaaatctcgggctgtgtctcgcttgtattgtgtgtctgaagagaatgttccctgtaaaacgtgtagtggtgtaagctttgtatcaactgtcgtttgtcttgctcatctgtttgtgtaaccaaattctcatcatttatcagaaacttgaacaccttaagaaatattttggttct

SEQ ID NO: 36441 - protein, 215 aa, Arabidopsis thaliana
  peptide (1)..(215): Ceres Seq. ID no. 12395170
  misc_feature (109)..(215): Homolog of NCBI NO: 18491297 NR Description: At2g42380/MHK10.10 [Arabidopsis thaliana]
  misc_feature (58)..(215): Homolog of NCBI NO: 15230964 NR Description: putative protein
  misc_feature (94)..(142): Homolog of NCBI NO: 21592919 NR Description: unknown [Arabidopsis thaliana]
  misc_feature (94)..(142): Homolog of NCBI NO: 25403436 NR Description: protein F15O4.49 [imported] - Arabidopsis
  misc_feature (94)..(142): Homolog of NCBI NO: 18399693 NR Description: bZIP family transcription factor
  misc_feature (39)..(215): Homolog of NCBI NO: 30696210 NR Description: bZIP family transcription factor [Arabidopsis
  misc_feature (39)..(215): Homolog of NCBI NO: 25404190 NR Description: hypothetical protein T18I24.3 [imported] -
  misc_feature (39)..(215): Homolog of NCBI NO: 28393180 NR Description: putative bZIP family transcription factor
  misc_feature (39)..(215): Homolog of NCBI NO: 27311723 NR Description: Unknown protein [Arabidopsis thaliana]
  misc_feature (1)..(215): Homolog of NCBI NO: 30680232 NR Description: bZIP transcriptional activator protein -related
NLTDSFIRRRRQQSIFFSPFLVSILQISSPSRFIINIEMASSKGSQNHRNLGCNGKQALLPPKSPFTGGPTFSADFVPSSVIGSKAVQKLGEGNANHHRTSSESFLIEEQPSWLDDLLNEPETPVRKGGHRRSSSDSFAYVDVPVGFDVDYTLWDGGRYNNNNGFSNHVRGPKESDYLRSQPVPFYPSAHLSKQKIRPWDSLPDSGARPNSSSGC

SEQ ID NO: 36442 - protein, 177 aa, Arabidopsis thaliana
  peptide (1)..(177): Ceres Seq. ID no. 12395171
  misc_feature (71)..(177): Homolog of NCBI NO: 18491297 NR Description: At2g42380/MHK10.10 [Arabidopsis thaliana]
  misc_feature (20)..(177): Homolog of NCBI NO: 15230964 NR Description: putative protein
  misc_feature (56)..(104): Homolog of NCBI NO: 21592919 NR Description: unknown [Arabidopsis thaliana]
  misc_feature (56)..(104): Homolog of NCBI NO: 25403436 NR Description: protein F15O4.49 [imported] - Arabidopsis
  misc_feature (56)..(104): Homolog of NCBI NO: 18399693 NR Description: bZIP family transcription factor
  misc_feature (1)..(177): Homolog of NCBI NO: 30696210 NR Description: bZIP family transcription factor [Arabidopsis
  misc_feature (1)..(177): Homolog of NCBI NO: 25404190 NR Description: hypothetical protein T18I24.3 [imported] -
  misc_feature (1)..(177): Homolog of NCBI NO: 28393180 NR Description: putative bZIP family transcription factor
  misc_feature (1)..(177): Homolog of NCBI NO: 27311723 NR Description: Unknown protein [Arabidopsis thaliana]
  misc_feature (1)..(177): Homolog of NCBI NO: 30680232 NR Description: bZIP transcriptional activator protein -related
MASSKGSQNHRNLGCNGKQALLPPKSPFTGGPTFSADFVPSSVIGSKAVQKLGEGNANHHRTSSESFLIEEQPSWLDDLLNEPETPVRKGGHRRSSSDSFAYVDVPVGFDVDYTLWDGGRYNNNNGFSNHVRGPKESDYLRSQPVPFYPSAHLSKQKIRPWDSLPDSGARPNSSSGC

SEQ ID NO: 36443 - DNA, 1910 bp, Arabidopsis thaliana
  misc_feature (1)..(1910): Ceres Seq. ID no. 12370285
  misc_feature: MA Experiment ID: 20000173 Result: Down-regulated in Transcription
  misc_feature: MA Experiment 20000173 PARAMETER Experiment Name: At_42deg_Heat_P Parameter: Age (day) Value: 14
  misc_feature: MA Experiment 20000173 PARAMETER Experiment Name: At_42deg_Heat_P Parameter: Organism Value: A. thaliana
  misc_feature: MA Experiment 20000173 PARAMETER Experiment Name: At_42deg_Heat_P Parameter: Plant Line Value: WS
  misc_feature: MA Experiment 20000173 PARAMETER Experiment Name: At_42deg_Heat_P Parameter: Temperature (deg C) Value: 42 vs. 22
  misc_feature: MA Experiment 20000173 PARAMETER Experiment Name: At_42deg_Heat_P Parameter: Timepoint (hr) Value: 6
  misc_feature: MA Experiment 20000173 PARAMETER Experiment Name: At_42deg_Heat_P Parameter: Tissue Value: Aerial
  misc_feature: MA Experiment ID: 20000185 Result: Up-regulated in Transcription
  misc_feature: MA Experiment 20000185 PARAMETER Experiment Name: At_Roots__P Parameter: Age (day) Value: 7 vs. 21
  misc_feature: MA Experiment 20000185 PARAMETER Experiment Name: At_Roots__P Parameter: Organism Value: A. thaliana
  misc_feature: MA Experiment 20000185 PARAMETER Experiment Name: At_Roots__P Parameter: Tissue Value: Roots vs. Whole Plant
  misc_feature: MA Experiment ID: 20000211 Result: Up-regulated in Transcription
  misc_feature: MA Experiment 20000211 PARAMETER Experiment Name: At_0.001percent_MeJA__P Parameter: Age (day) Value: 14
  misc_feature: MA Experiment 20000211 PARAMETER Experiment Name: At_0.001percent_MeJA__P Parameter: Organism Value: A. thaliana
  misc_feature: MA Experiment 20000211 PARAMETER Experiment Name: At_0.001percent_MeJA__P Parameter: Plant Line Value: WS
  misc_feature: MA Experiment 20000211 PARAMETER Experiment Name: At_0.001percent_MeJA__P Parameter: Timepoint (hr) Value: 1
  misc_feature: MA Experiment 20000211 PARAMETER Experiment Name: At_0.001percent_MeJA__P Parameter: Tissue Value: Aerial
  misc_feature: MA Experiment 20000211 PARAMETER Experiment Name: At_0.001percent_MeJA__P Parameter: Treatment Value: 0.001percent MeJA vs. No Treatment
  misc_feature: MA Experiment ID: 20000227 Result: Down-regulated in Transcription
  misc_feature: MA Experiment 20000227 PARAMETER Experiment Name: At_Root-Tips-vs-Tops_P Parameter: Tissue Value: Root Tips vs. Root Tops
  misc_feature: MA Experiment ID: 20000439 Result: Up-regulated in Transcription
  misc_feature: MA Experiment 20000439 PARAMETER Experiment Name: At_Roots__P Parameter: Age (day) Value: 14 vs. 21
  misc_feature: MA Experiment 20000439 PARAMETER Experiment Name: At_Roots__P Parameter: Organism Value: A. thaliana
  misc_feature: MA Experiment 20000439 PARAMETER Experiment Name: At_Roots__P Parameter: Tissue Value: Roots vs. Whole Plant
  misc_feature: MA Experiment ID: 20000495 Result: Up-regulated in Transcription
  misc_feature: MA Experiment 20000495 PARAMETER Experiment Name: At_Guard_Cells_P Parameter: Harvest Date Value: 8/2/2002
  misc_feature: MA Experiment 20000495 PARAMETER Experiment Name: At_Guard_Cells_P Parameter: Organism Value: A. thaliana
  misc_feature: MA Experiment 20000495 PARAMETER Experiment Name: At_Guard_Cells_P Parameter: Tissue Value: Guard Cells vs. Leaves
  misc_feature: MA Experiment ID: 20001558 Result: Down-regulated in Transcription
  misc_feature: MA Experiment 20001558 PARAMETER Experiment Name: At_Drought_Soil_Dry_P Parameter: Age (day) Value: 27
  misc_feature: MA Experiment 20001558 PARAMETER Experiment Name: At_Drought_Soil_Dry_P Parameter: Organism Value: A. thaliana
  misc_feature: MA Experiment 20001558 PARAMETER Experiment Name: At_Drought_Soil_Dry_P Parameter: Plant Line Value: WS
  misc_feature: MA Experiment 20001558 PARAMETER Experiment Name: At_Drought_Soil_Dry_P Parameter: Post Timepoint (hr) Value: 6
  misc_feature: MA Experiment 20001558 PARAMETER Experiment Name: At_Drought_Soil_Dry_P Parameter: Post-Treatment Value: Re-Water vs. No Drought
  misc_feature: MA Experiment 20001558 PARAMETER Experiment Name: At_Drought_Soil_Dry_P Parameter: Timepoint (day) Value: 13
  misc_feature: MA Experiment 20001558 PARAMETER Experiment Name: At_Drought_Soil_Dry_P Parameter: Treatment Value: Drought vs. No Drought
atttaaaaaagaaaaaagaagaaaagagagagagagactcacaaatcataatatctccttcattaactcataatcactttaaagaacattggaatcagattcattacatagggattgatatggaaaagtcaaaccaaccagttcatgtaaccttgtccgaattgaaggacggagataaagaaatcgttgatgctgaatttttggttgatcttcttgagagctatagatttggtaaagataatgttcccgcccgagaatttcgatccaaggcggcagcgacggctccggcgccggtcaacaccaccgagatagagttggaagaggataatgatggatctcaagctcaaggtaacaattctgttagtgaaagtacatcatcgctattttccgattcagatccaatagtacttgagagtactgtgagcgaaaccggttcaaacgaagaatctgaaaccggttcaaacgaagaaaatggtaataattggttagagtcgagctccacaaacttgccaaatgtagagaacaaaaggcaacggaatggagaagattgtgagatagaagaggaagaagaaaataacgagagatcattatcggattcagaagagaagtcaaacctagagaagttgcttgggacacaagaaaactatgagcttggaaatgaggatgaagaaaagaacgagagatcatcgtcagattcagaagagaagtcaaacctagagaattttcttgcgacacaagaaaactacgagctttactgtcctagctgtagcacatgtatcaccagaaatgtggttctcaagaaaagaaaacgagggaagcacgttaattcatctctggatctgaaacccgatataccggttgttgaaccggacgaaccaagcgacattgaggagatggaatcaccagttaaggtttatgtccctgagactcggattgaggatgatcaagaagataaagagggaactatctttacttgcttggtttgtgatctaaagtacttcatccggttaggaacaaagttcttacaacttgattatatcaggggaaaaccggttgagaaatcagttgaagaatatatagatgtgaggaagagtataaacaccacacaatcaccaccacaaattcaaccggacggagaaagattcgccattgagttgttaaagagcaccgtctacggcggtctcactgagaccatcaccagcctcggcgttgtatcatctgcttctgcctctggttcctccaccatgaatatattggctcttgctgtcgcaaatttggccggtgggctcatcgtcctcgctcaaaactttcaagatctaagaaacagttcagatcaagagaaagataggtacgaggaattgttagggagacgtactaaatcccggatacatatcttagtagcggtcatgtcttacattttcttcggcctaattcctccgttagtttacgcattttccttctacgaaaccggaatcaagaactacaagctcatctcggttttcttgggttctctggtttgcgtaattttgctcggttcgatcaaggtctatgtccgaaaaccaaccaattcatgtggatcgactaaagcttatctcaaatctgcggcttattatacgtctattgttgttgcttcttgcggaatctcatacgttgtcggagatattatgggagagtatatcgagaagctcagtttggttggtttagaccagatcagtataacttcaccatgttatggaattaaacccgaggagtgccggtttacttccttttaatatacagtgggactaagaaccggtctgaccaacgttgtataatttctgttctaattacttactaaatctctgtatcttttctagtaaaaaatcaaaactaatgctttcatagaataaatgtgttttgaggtttttctc

SEQ ID NO: 36444 - protein, 589 aa, Arabidopsis thaliana
  peptide (1)..(589): Ceres Seq. ID no. 12370286
  misc_feature (383)..(561): Homolog of NCBI NO: 15912253 NR Description: AT4g27870/T27E11_110 [Arabidopsis thaliana]
  misc_feature (349)..(552): Homolog of NCBI NO: 24413974 NR Description: contains ESTs
  misc_feature (87)..(340): Homolog of NCBI NO: 24413974 NR Description: contains ESTs
  misc_feature (165)..(270): Homolog of NCBI NO: 7487471 NR Description: hypothetical protein T27E11.110 - Arabidopsis
  misc_feature (383)..(561): Homolog of NCBI NO: 7487471 NR Description: hypothetical protein T27E11.110 - Arabidopsis
  misc_feature (383)..(561): Homolog of NCBI NO: 30687764 NR Description: expressed protein [Arabidopsis thaliana]
  misc_feature (41)..(270): Homolog of NCBI NO: 30687764 NR Description: expressed protein [Arabidopsis thaliana]
  misc_feature (40)..(589): Homolog of NCBI NO: 30689371 NR Description: expressed protein [Arabidopsis thaliana]
  misc_feature (40)..(589): Homolog of NCBI NO: 30689367 NR Description: expressed protein [Arabidopsis thaliana]
  misc_feature (40)..(589): Homolog of NCBI NO: 21592516 NR Description: unknown [Arabidopsis thaliana]
LKKKKEEKRERDSQIIISPSLTHNHFKEHWNQIHYIGIDMEKSNQPVHVTLSELKDGDKEIVDAEFLVDLLESYRFGKDNVPAREFRSKAAATAPAPVNTTEIELEEDNDGSQAQGNNSVSESTSSLFSDSDPIVLESTVSETGSNEESETGSNEENGNNWLESSSTNLPNVENKRQRNGEDCEIEEEEENNERSLSDSEEKSNLEKLLGTQENYELGNEDEEKNERSSSDSEEKSNLENFLATQENYELYCPSCSTCITRNVVLKKRKRGKHVNSSLDLKPDIPVVEPDEPSDIEEMESPVKVYVPETRIEDDQEDKEGTIFTCLVCDLKYFIRLGTKFLQLDYIRGKPVEKSVEEYIDVRKSINTTQSPPQIQPDGERFAIELLKSTVYGGLTETITSLGVVSSASASGSSTMNILALAVANLAGGLIVLAQNFQDLRNSSDQEKDRYEELLGRRTKSRIHILVAVMSYIFFGLIPPLVYAFSFYETGIKNYKLISVFLGSLVCVILLGSIKVYVRKPTNSCGSTKAYLKSAAYYTSIVVASCGISYVVGDIMGEYIEKLSLVGLDQISITSPCYGIKPEECRFTSF

SEQ ID NO: 36445 - protein, 550 aa, Arabidopsis thaliana
  peptide (1)..(550): Ceres Seq. ID no. 12370287
  misc_feature (344)..(522): Homolog of NCBI NO: 15912253 NR Description: AT4g27870/T27E11_110 [Arabidopsis thaliana]
  misc_feature (310)..(513): Homolog of NCBI NO: 24413974 NR Description: contains ESTs
  misc_feature (48)..(301): Homolog of NCBI NO: 24413974 NR Description: contains ESTs
  misc_feature (126)..(231): Homolog of NCBI NO: 7487471 NR Description: hypothetical protein T27E11.110 - Arabidopsis
  misc_feature (344)..(522): Homolog of NCBI NO: 7487471 NR Description: hypothetical protein T27E11.110 - Arabidopsis
  misc_feature (344)..(522): Homolog of NCBI NO: 30687764 NR Description: expressed protein [Arabidopsis thaliana]
  misc_feature (2)..(231): Homolog of NCBI NO: 30687764 NR Description: expressed protein [Arabidopsis thaliana]
  misc_feature (1)..(550): Homolog of NCBI NO: 30689371 NR Description: expressed protein [Arabidopsis thaliana]
  misc_feature (1)..(550): Homolog of NCBI NO: 30689367 NR Description: expressed protein [Arabidopsis thaliana]
  misc_feature (1)..(550): Homolog of NCBI NO: 21592516 NR Description: unknown [Arabidopsis thaliana]
MEKSNQPVHVTLSELKDGDKEIVDAEFLVDLLESYRFGKDNVPAREFRSKAAATAPAPVNTTEIELEEDNDGSQAQGNNSVSESTSSLFSDSDPIVLESTVSETGSNEESETGSNEENGNNWLESSSTNLPNVENKRQRNGEDCEIEEEEENNERSLSDSEEKSNLEKLLGTQENYELGNEDEEKNERSSSDSEEKSNLENFLATQENYELYCPSCSTCITRNVVLKKRKRGKHVNSSLDLKPDIPVVEPDEPSDIEEMESPVKVYVPETRIEDDQEDKEGTIFTCLVCDLKYFIRLGTKFLQLDYIRGKPVEKSVEEYIDVRKSINTTQSPPQIQPDGERFAIELLKSTVYGGLTETITSLGVVSSASASGSSTMNILALAVANLAGGLIVLAQNFQDLRNSSDQEKDRYEELLGRRTKSRIHILVAVMSYIFFGLIPPLVYAFSFYETGIKNYKLISVFLGSLVCVILLGSIKVYVRKPTNSCGSTKAYLKSAAYYTSIVVASCGISYVVGDIMGEYIEKLSLVGLDQISITSPCYGIKPEECRFTSF

SEQ ID NO: 36446 - DNA, 1616 bp, Arabidopsis thaliana
  misc_feature (1)..(1616): Ceres Seq. ID no. 13493832
  misc_feature: MA Experiment ID: 20000179 Result: Up-regulated in Transcription
  misc_feature: MA Experiment 20000179 PARAMETER Experiment Name: At_Germinating_Seeds_P Parameter: Age (hr) Value: 6 vs. 0
  misc_feature: MA Experiment 20000179 PARAMETER Experiment Name: At_Germinating_Seeds_P Parameter: Tissue Value: Germinating Seeds
  misc_feature: MA Experiment ID: 20000180 Result: Up-regulated in Transcription
  misc_feature: MA Experiment 20000180 PARAMETER Experiment Name: At_Germinating_Seeds_P Parameter: Age (hr) Value: 24 vs. 0
  misc_feature: MA Experiment 20000180 PARAMETER Experiment Name: At_Germinating_Seeds_P Parameter: Tissue Value: Germinating Seeds
  misc_feature: MA Experiment ID: 20000184 Result: Up-regulated in Transcription
  misc_feature: MA Experiment 20000184 PARAMETER Experiment Name: At_Shoots__P Parameter: Age (day) Value: 7
  misc_feature: MA Experiment 20000184 PARAMETER Experiment Name: At_Shoots__P Parameter: Tissue Value: Shoots vs. Whole Plant
  misc_feature: MA Experiment ID: 20000185 Result: Up-regulated in Transcription
  misc_feature: MA Experiment 20000185 PARAMETER Experiment Name: At_Roots__P Parameter: Age (day) Value: 7 vs. 21
  misc_feature: MA Experiment 20000185 PARAMETER Experiment Name: At_Roots__P Parameter: Organism Value: A. thaliana
  misc_feature: MA Experiment 20000185 PARAMETER Experiment Name: At_Roots__P Parameter: Tissue Value: Roots vs. Whole Plant
  misc_feature: MA Experiment ID: 20001450 Result: Up-regulated in Transcription
  misc_feature: MA Experiment 20001450 PARAMETER Experiment Name: At_Far-red-induction_P Parameter: Age (day) Value: 7
  misc_feature: MA Experiment 20001450 PARAMETER Experiment Name: At_Far-red-induction_P Parameter: Light Value: Far-red vs. White
  misc_feature: MA Experiment 20001450 PARAMETER Experiment Name: At_Far-red-induction_P Parameter: Organism Value: A. thaliana
  misc_feature: MA Experiment 20001450 PARAMETER Experiment Name: At_Far-red-induction_P Parameter: Plant Line Value: Columbia
  misc_feature: MA Experiment 20001450 PARAMETER Experiment Name: At_Far-red-induction_P Parameter: Timepoint (hr) Value: 8
  misc_feature: MA Experiment 20001450 PARAMETER Experiment Name: At_Far-red-induction_P Parameter: Tissue Value: Whole Plant
  misc_feature: Phenotype: INFLORESCENCE Flowering Time-Late Flowering
  misc_feature: Phenotype: INFLORESCENCE Flowering Time-Late Flowering
ccacgcgtccgcatctcttgttctctccgcccatctctgctctcttttattttcccagaaagtttttttttttttttttttccgaattccgttaatctcattggggtttccattgatagcaatggcgacggctttcgctcccactaagctcactgccacggttcctctgcatggatcccatgagaatcgtctcttgctcccgatccgattggctcctccttcttctttcctcggatccacccgttccctctcccttcgcagactcaatcactccaacgccacccgtcgatctcccgtcgtctctgtccaggaagttgtcaaggagaagcaatccaccaataataccagcctgttgataaccaaagaggaaggattggagttgtatgaagatatgatactaggtagatctttcgaagacatgtgtgctcaaatgtattaccgaggcaagatgtttggttttgttcacttgtacaatggccaagaggctgtttctactggctttatcaagctccttaccaagtctgactctgtcgttagtacctaccgtgaccatgtccatgccctcagcaaaggtgtctctgctcgtgctgttatgagcgagctcttcggcaaggttactggatgctgcagaggccaaggtggatccatgcacatgttctccaaagaacacaacatgcttggtggctttgcttttattggtgaaggcattcctgtcgccactggtgctgcctttagctccaagtacaggagggaagtcttgaaacaggattgtgatgatgtcactgtcgcctttttcggagatggaacttgtaacaacggacagttcttcgagtgtctcaacatggctgctctctataaactgcctattatctttgttgtcgagaataacttgtgggccattgggatgtctcacttgagagccacttctgaccccgagatttggaagaaaggtcctgcatttgggatgcctggtgttcatgttgacggtatggatgtcttgaaggtcagggaagtcgctaaagaagctgtcactagagctagaagaggagaaggtccaaccttggttgaatgtgagacttatagattcagaggacactccttggctgatcccgatgagctccgtgatgctgctgagaaagccaaatacgcggctagagacccaatcgcagcattgaagaagtatttgatagagaacaagcttgcaaaggaagcagagctaaagtcaatagagaaaaagatagacgagttggtggaggaagcggttgagtttgcagacgctagtccacagcccggtcgcagtcagttgctagagaatgtgtttgctgatccaaaaggatttggaattggacctgatggacggtacagatgtgaggaccccaagtttaccgaaggcacagctcaagtctgagaagacaagtttaaccataagctgtctactgtctcttcgatgtttctatatatcttattaagttaaatgctacagagaatcagtttgaatcatttgcactttttgctttttgtttggtgttactaaactatcacaaggttcttcttgtagttcgttgggttttcattggttaccacttaccagagaattgtatttttttttttaaagg

SEQ ID NO: 36447 - protein, 468 aa, Arabidopsis thaliana
  peptide (1)..(468): Ceres Seq. ID no. 13493833
  misc_feature (129)..(433): Pfam Name: Dehydrogenase E1 component Pfam Description: Dehydrogenase E1 component
  misc_feature (129)..(433): Pfam Name: Dehydrogenase E1 component Pfam Description: Dehydrogenase E1 component
  misc_feature (129)..(433): Pfam Name: Dehydrogenase E1 component Pfam Description: Dehydrogenase E1 component
  misc_feature (119)..(442): Homolog of NCBI NO: 33861844 NR Description: Pyruvate dehydrogenase E1 alpha subunit
  misc_feature (119)..(442): Homolog of NCBI NO: 22298712 NR Description: pyruvate dehydrogenase E1 component, alpha
  misc_feature (112)..(442): Homolog of NCBI NO: 11465733 NR Description: pyruvate dehydrogenase E1 component alpha subunit
  misc_feature (113)..(442): Homolog of NCBI NO: 16331186 NR Description: pyruvate dehydrogenase E1 component, alpha
  misc_feature (113)..(442): Homolog of NCBI NO: 23128827 NR Description: hypothetical protein [Nostoc punctiforme]
  misc_feature (119)..(442): Homolog of NCBI NO: 33861844 NR Description: Pyruvate dehydrogenase E1 alpha subunit
  misc_feature (112)..(442): Homolog of NCBI NO: 11465733 NR Description: pyruvate dehydrogenase E1 component alpha subunit
  misc_feature (113)..(442): Homolog of NCBI NO: 23128827 NR Description: hypothetical protein [Nostoc punctiforme]
  misc_feature (113)..(442): Homolog of NCBI NO: 16331186 NR Description: pyruvate dehydrogenase E1 component, alpha
  misc_feature (112)..(442): Homolog of NCBI NO: 11465733 NR Description: pyruvate dehydrogenase E1 component alpha subunit
  misc_feature (119)..(442): Homolog of NCBI NO: 22298712 NR Description: pyruvate dehydrogenase E1 component, alpha
  misc_feature (119)..(442): Homolog of NCBI NO: 33861844 NR Description: Pyruvate dehydrogenase E1 alpha subunit
  misc_feature (41)..(468): Homolog of NCBI NO: 15223294 NR Description: pyruvate dehydrogenase E1 alpha subunit
  misc_feature (41)..(457): Homolog of NCBI NO: 6715645 NR Description: T25K16.8 [Arabidopsis thaliana]
  misc_feature (119)..(468): Homolog of NCBI NO: 38344868 NR Description: OSJNBa0020P07.11 [Oryza sativa (japonica
  misc_feature (102)..(442): Homolog of NCBI NO: 23041416 NR Description: hypothetical protein [Trichodesmium erythraeum
  misc_feature (102)..(442): Homolog of NCBI NO: 17230200 NR Description: pyruvate dehydrogenase E1 component, alpha
  misc_feature (41)..(468): Homolog of NCBI NO: 15223294 NR Description: pyruvate dehydrogenase E1 alpha subunit
  misc_feature (41)..(457): Homolog of NCBI NO: 6715645 NR Description: T25K16.8 [Arabidopsis thaliana]
  misc_feature (119)..(468): Homolog of NCBI NO: 38344868 NR Description: OSJNBa0020P07.11 [Oryza sativa (japonica
  misc_feature (102)..(442): Homolog of NCBI NO: 23041416 NR Description: hypothetical protein [Trichodesmium erythraeum
  misc_feature (102)..(442): Homolog of NCBI NO: 17230200 NR Description: pyruvate dehydrogenase E1 component, alpha
  misc_feature (113)..(442): Homolog of NCBI NO: 23128827 NR Description: hypothetical protein [Nostoc punctiforme]
  misc_feature (113)..(442): Homolog of NCBI NO: 16331186 NR Description: pyruvate dehydrogenase E1 component, alpha
  misc_feature (119)..(442): Homolog of NCBI NO: 22298712 NR Description: pyruvate dehydrogenase E1 component, alpha
  misc_feature (102)..(442): Homolog of NCBI NO: 17230200 NR Description: pyruvate dehydrogenase E1 component, alpha
  misc_feature (102)..(442): Homolog of NCBI NO: 23041416 NR Description: hypothetical protein [Trichodesmium erythraeum
  misc_feature (119)..(468): Homolog of NCBI NO: 38344868 NR Description: OSJNBa0020P07.11 [Oryza sativa (japonica
  misc_feature (41)..(457): Homolog of NCBI NO: 6715645 NR Description: T25K16.8 [Arabidopsis thaliana]
  misc_feature (41)..(468): Homolog of NCBI NO: 15223294 NR Description: pyruvate dehydrogenase E1 alpha subunit
HASASLVLSAHLCSLLFSQKVFFFFFFRIPLISLGFPLIAMATAFAPTKLTATVPLHGSHENRLLLPIRLAPPSSFLGSTRSLSLRRLNHSNATRRSPVVSVQEVVKEKQSTNNTSLLITKEEGLELYEDMILGRSFEDMCAQMYYRGKMFGFVHLYNGQEAVSTGFIKLLTKSDSVVSTYRDHVHALSKGVSARAVMSELFGKVTGCCRGQGGSMHMFSKEHNMLGGFAFIGEGIPVATGAAFSSKYRREVLKQDCDDVTVAFFGDGTCNNGQFFECLNMAALYKLPIIFVVENNLWAIGMSHLRATSDPEIWKKGPAFGMPGVHVDGMDVLKVREVAKEAVTRARRGEGPTLVECETYRFRGHSLADPDELRDAAEKAKYAARDPIAALKKYLIENKLAKEAELKSIEKKIDELVEEAVEFADASPQPGRSQLLENVFADPKGFGIGPDGRYRCEDPKFTEGTAQV

SEQ ID NO: 36448 - protein, 428 aa, Arabidopsis thaliana
  peptide (1)..(428): Ceres Seq. ID no. 13493834
  misc_feature (89)..(393): Pfam Name: Dehydrogenase E1 component Pfam Description: Dehydrogenase E1 component
  misc_feature (89)..(393): Pfam Name: Dehydrogenase E1 component Pfam Description: Dehydrogenase E1 component
  misc_feature (89)..(393): Pfam Name: Dehydrogenase E1 component Pfam Description: Dehydrogenase E1 component
  misc_feature (79)..(402): Homolog of NCBI NO: 33861844 NR Description: Pyruvate dehydrogenase E1 alpha subunit
  misc_feature (79)..(402): Homolog of NCBI NO: 22298712 NR Description: pyruvate dehydrogenase E1 component, alpha
  misc_feature (72)..(402): Homolog of NCBI NO: 11465733 NR Description: pyruvate dehydrogenase E1 component alpha subunit
  misc_feature (73)..(402): Homolog of NCBI NO: 16331186 NR Description: pyruvate dehydrogenase E1 component, alpha
  misc_feature (73)..(402): Homolog of NCBI NO: 23128827 NR Description: hypothetical protein [Nostoc punctiforme]
  misc_feature (79)..(402): Homolog of NCBI NO: 33861844 NR Description: Pyruvate dehydrogenase E1 alpha subunit
  misc_feature (72)..(402): Homolog of NCBI NO: 11465733 NR Description: pyruvate dehydrogenase E1 component alpha subunit
  misc_feature (73)..(402): Homolog of NCBI NO: 23128827 NR Description: hypothetical protein [Nostoc punctiforme]
  misc_feature (73)..(402): Homolog of NCBI NO: 16331186 NR Description: pyruvate dehydrogenase E1 component, alpha
  misc_feature (72)..(402): Homolog of NCBI NO: 11465733 NR Description: pyruvate dehydrogenase E1 component alpha subunit
  misc_feature (79)..(402): Homolog of NCBI NO: 22298712 NR Description: pyruvate dehydrogenase E1 component, alpha
  misc_feature (79)..(402): Homolog of NCBI NO: 33861844 NR Description: Pyruvate dehydrogenase E1 alpha subunit
  misc_feature (1)..(428): Homolog of NCBI NO: 15223294 NR Description: pyruvate dehydrogenase E1 alpha subunit
  misc_feature (1)..(417): Homolog of NCBI NO: 6715645 NR Description: T25K16.8 [Arabidopsis thaliana]
  misc_feature (79)..(428): Homolog of NCBI NO: 38344868 NR Description: OSJNBa0020P07.11 [Oryza sativa (japonica
  misc_feature (62)..(402): Homolog of NCBI NO: 23041416 NR Description: hypothetical protein [Trichodesmium erythraeum
  misc_feature (62)..(402): Homolog of NCBI NO: 17230200 NR Description: pyruvate dehydrogenase E1 component, alpha
  misc_feature (1)..(428): Homolog of NCBI NO: 15223294 NR Description: pyruvate dehydrogenase E1 alpha subunit
  misc_feature (1)..(417): Homolog of NCBI NO: 6715645 NR Description: T25K16.8 [Arabidopsis thaliana]
  misc_feature (79)..(428): Homolog of NCBI NO: 38344868 NR Description: OSJNBa0020P07.11 [Oryza sativa (japonica
  misc_feature (62)..(402): Homolog of NCBI NO: 23041416 NR Description: hypothetical protein [Trichodesmium erythraeum
  misc_feature (62)..(402): Homolog of NCBI NO: 17230200 NR Description: pyruvate dehydrogenase E1 component, alpha
  misc_feature (73)..(402): Homolog of NCBI NO: 23128827 NR Description: hypothetical protein [Nostoc punctiforme]
  misc_feature (73)..(402): Homolog of NCBI NO: 16331186 NR Description: pyruvate dehydrogenase E1 component, alpha
  misc_feature (79)..(402): Homolog of NCBI NO: 22298712 NR Description: pyruvate dehydrogenase E1 component, alpha
  misc_feature (62)..(402): Homolog of NCBI NO: 17230200 NR Description: pyruvate dehydrogenase E1 component, alpha
  misc_feature (62)..(402): Homolog of NCBI NO: 23041416 NR Description: hypothetical protein [Trichodesmium erythraeum
  misc_feature (79)..(428): Homolog of NCBI NO: 38344868 NR Description: OSJNBa0020P07.11 [Oryza sativa (japonica
  misc_feature (1)..(417): Homolog of NCBI NO: 6715645 NR Description: T25K16.8 [Arabidopsis thaliana]
  misc_feature (1)..(428): Homolog of NCBI NO: 15223294 NR Description: pyruvate dehydrogenase E1 alpha subunit
MATAFAPTKLTATVPLHGSHENRLLLPIRLAPPSSFLGSTRSLSLRRLNHSNATRRSPVVSVQEVVKEKQSTNNTSLLITKEEGLELYEDMILGRSFEDMCAQMYYRGKMFGFVHLYNGQEAVSTGFIKLLTKSDSVVSTYRDHVHALSKGVSARAVMSELFGKVTGCCRGQGGSMHMFSKEHNMLGGFAFIGEGIPVATGAAFSSKYRREVLKQDCDDVTVAFFGDGTCNNGQFFECLNMAALYKLPIIFVVENNLWAIGMSHLRATSDPEIWKKGPAFGMPGVHVDGMDVLKVREVAKEAVTRARRGEGPTLVECETYRFRGHSLADPDELRDAAEKAKYAARDPIAALKKYLIENKLAKEAELKSIEKKIDELVEEAVEFADASPQPGRSQLLENVFADPKGFGIGPDGRYRCEDPKFTEGTAQV

SEQ ID NO: 36449 - protein, 338 aa, Arabidopsis thaliana; identical to SEQ ID NO: 24106
  peptide (1)..(338): Ceres Seq. ID no. 13493835
  misc_feature (1)..(303): Pfam Name: Dehydrogenase E1 component Pfam Description: Dehydrogenase E1 component
  misc_feature (1)..(303): Pfam Name: Dehydrogenase E1 component Pfam Description: Dehydrogenase E1 component
  misc_feature (1)..(303): Pfam Name: Dehydrogenase E1 component Pfam Description: Dehydrogenase E1 component
  misc_feature (1)..(312): Homolog of NCBI NO: 33861844 NR Description: Pyruvate dehydrogenase E1 alpha subunit
  misc_feature (1)..(312): Homolog of NCBI NO: 22298712 NR Description: pyruvate dehydrogenase E1 component, alpha
  misc_feature (1)..(312): Homolog of NCBI NO: 11465733 NR Description: pyruvate dehydrogenase E1 component alpha subunit
  misc_feature (1)..(312): Homolog of NCBI NO: 16331186 NR Description: pyruvate dehydrogenase E1 component, alpha
  misc_feature (1)..(312): Homolog of NCBI NO: 23128827 NR Description: hypothetical protein [Nostoc punctiforme]
  misc_feature (1)..(312): Homolog of NCBI NO: 33861844 NR Description: Pyruvate dehydrogenase E1 alpha subunit
  misc_feature (1)..(312): Homolog of NCBI NO: 11465733 NR Description: pyruvate dehydrogenase E1 component alpha subunit
  misc_feature (1)..(312): Homolog of NCBI NO: 23128827 NR Description: hypothetical protein [Nostoc punctiforme]
  misc_feature (1)..(312): Homolog of NCBI NO: 16331186 NR Description: pyruvate dehydrogenase E1 component, alpha
  misc_feature (1)..(312): Homolog of NCBI NO: 11465733 NR Description: pyruvate dehydrogenase E1 component alpha subunit
  misc_feature (1)..(312): Homolog of NCBI NO: 22298712 NR Description: pyruvate dehydrogenase E1 component, alpha
  misc_feature (1)..(312): Homolog of NCBI NO: 33861844 NR Description: Pyruvate dehydrogenase E1 alpha subunit
  misc_feature (1)..(338): Homolog of NCBI NO: 15223294 NR Description: pyruvate dehydrogenase E1 alpha subunit
  misc_feature (1)..(327): Homolog of NCBI NO: 6715645 NR Description: T25K16.8 [Arabidopsis thaliana]
  misc_feature (1)..(338): Homolog of NCBI NO: 38344868 NR Description: OSJNBa0020P07.11 [Oryza sativa (japonica
  misc_feature (1)..(312): Homolog of NCBI NO: 23041416 NR Description: hypothetical protein [Trichodesmium erythraeum
  misc_feature (1)..(312): Homolog of NCBI NO: 17230200 NR Description: pyruvate dehydrogenase E1 component, alpha
  misc_feature (1)..(338): Homolog of NCBI NO: 15223294 NR Description: pyruvate dehydrogenase E1 alpha subunit
  misc_feature (1)..(327): Homolog of NCBI NO: 6715645 NR Description: T25K16.8 [Arabidopsis thaliana]
  misc_feature (1)..(338): Homolog of NCBI NO: 38344868 NR Description: OSJNBa0020P07.11 [Oryza sativa (japonica
  misc_feature (1)..(312): Homolog of NCBI NO: 23041416 NR Description: hypothetical protein [Trichodesmium erythraeum
  misc_feature (1)..(312): Homolog of NCBI NO: 17230200 NR Description: pyruvate dehydrogenase E1 component, alpha
  misc_feature (1)..(312): Homolog of NCBI NO: 23128827 NR Description: hypothetical protein [Nostoc punctiforme]
  misc_feature (1)..(312): Homolog of NCBI NO: 16331186 NR Description: pyruvate dehydrogenase E1 component, alpha
  misc_feature (1)..(312): Homolog of NCBI NO: 22298712 NR Description: pyruvate dehydrogenase E1 component, alpha
  misc_feature (1)..(312): Homolog of NCBI NO: 17230200 NR Description: pyruvate dehydrogenase E1 component, alpha
  misc_feature (1)..(312): Homolog of NCBI NO: 23041416 NR Description: hypothetical protein [Trichodesmium erythraeum
  misc_feature (1)..(338): Homolog of NCBI NO: 38344868 NR Description: OSJNBa0020P07.11 [Oryza sativa (japonica
  misc_feature (1)..(327): Homolog of NCBI NO: 6715645 NR Description: T25K16.8 [Arabidopsis thaliana]
  misc_feature (1)..(338): Homolog of NCBI NO: 15223294 NR Description: pyruvate dehydrogenase E1 alpha subunit

SEQ ID NO: 36450 - DNA, 956 bp, Arabidopsis thaliana
  misc_feature (1)..(956): Ceres Seq. ID no. 12395374
  misc_feature: MA Experiment ID: 108434 Result: Up-regulated in Transcription
  misc_feature: MA Experiment 108434 PARAMETER Experiment Name: At_Root_Tips_cDNA_P Parameter: Tissue Value: Root Tips
  misc_feature: MA Experiment ID: 108462 Result: Down-regulated in Transcription
  misc_feature: MA Experiment 108462 PARAMETER Experiment Name: At_Germinating_Seeds_cDNA_P Parameter: Age (day) Value: 2 vs. 0
  misc_feature: MA Experiment 108462 PARAMETER Experiment Name: At_Germinating_Seeds_cDNA_P Parameter: Tissue Value: Germinating Seeds
  misc_feature: MA Experiment ID: 108463 Result: Down-regulated in Transcription
  misc_feature: MA Experiment 108463 PARAMETER Experiment Name: At_Germinating_Seeds_cDNA_P Parameter: Age (day) Value: 3 vs. 0
  misc_feature: MA Experiment 108463 PARAMETER Experiment Name: At_Germinating_Seeds_cDNA_P Parameter: Tissue Value: Germinating Seeds
  misc_feature: MA Experiment ID: 108464 Result: Down-regulated in Transcription
  misc_feature: MA Experiment 108464 PARAMETER Experiment Name: At_Germinating_Seeds_cDNA_P Parameter: Age (day) Value: 4 vs. 0
  misc_feature: MA Experiment 108464 PARAMETER Experiment Name: At_Germinating_Seeds_cDNA_P Parameter: Tissue Value: Germinating Seeds
  misc_feature: MA Experiment ID: 20000234 Result: Up-regulated in Transcription
  misc_feature: MA Experiment 20000234 PARAMETER Experiment Name: At_Siliques_P Parameter: Age (day) Value: 21
  misc_feature: MA Experiment 20000234 PARAMETER Experiment Name: At_Siliques_P Parameter: Organism Value: A. thaliana
  misc_feature: MA Experiment 20000234 PARAMETER Experiment Name: At_Siliques_P Parameter: Plant Line Value: WS
  misc_feature: MA Experiment 20000234 PARAMETER Experiment Name: At_Siliques_P Parameter: Tissue Value: Less Than 5mm Siliques vs. Whole Plant
  misc_feature: MA Experiment ID: 20001558 Result: Down-regulated in Transcription
  misc_feature: MA Experiment 20001558 PARAMETER Experiment Name: At_Drought_Soil_Dry_P Parameter: Age (day) Value: 27
  misc_feature: MA Experiment 20001558 PARAMETER Experiment Name: At_Drought_Soil_Dry_P Parameter: Organism Value: A. thaliana
  misc_feature: MA Experiment 20001558 PARAMETER Experiment Name: At_Drought_Soil_Dry_P Parameter: Plant Line Value: WS
  misc_feature: MA Experiment 20001558 PARAMETER Experiment Name: At_Drought_Soil_Dry_P Parameter: Post Timepoint (hr) Value: 6
  misc_feature: MA Experiment 20001558 PARAMETER Experiment Name: At_Drought_Soil_Dry_P Parameter: Post-Treatment Value: Re-Water vs. No Drought
  misc_feature: MA Experiment 20001558 PARAMETER Experiment Name: At_Drought_Soil_Dry_P Parameter: Timepoint (day) Value: 13
  misc_feature: MA Experiment 20001558 PARAMETER Experiment Name: At_Drought_Soil_Dry_P Parameter: Treatment Value: Drought vs. No Drought
aaatgaaatgtatagagaggtaaagtgggaattttgacattggtgggtttagggaaaaaacagagagaaagagatggattcgtcgtcagtagggaacaccaacaggtactgggtcctccgccacggcaagagcattcccaacgagagaggcctcgtcgtctcttccatggaaaatggtgtcctccccgagtaccagttagcccctgatggtgtcgctcaggctcgtctcgccggcgaatcgttcctccagcaacttaaggaaagtaacatagaactggacaaggttcgcatttgctactcccccttctccagaaccactcacaccgctagggttgttgctgaggtcctcaatctcccctttgatgctcctcaatgcaagatgatggaagatctgcgcgaacgctattttggacctacatttgaactcaagtcccatgacaagtacccagagatatgggctcttgatgaaaaagatccttttatgggaccagaaggaggtgaaagtgctgatgatgttgtttcccgacttgccactgccatgaaatccatggaagctgaatatcaaaggtgtgcaattctggtggtgagtcatggagatcctctgcagatgttgcagaacgttttccattcagcaaagcaacaggaaggagatggtttggcagagaagtttcagttgagcagagttgcttctgtcttgtcacagcaccgcaagtttgctttgctcactggggaactccgacccctcatctgattggcaatcaatgtattcagcttttggaatgtctttccttgaactcttttgttatcaattcctatttctctcccattggcattcttgcaattgccaaacttggattagcctgtttattatcacctctgtttgttagagaaaacatgaagatttactcctgtaataagaaatcatgctcatttatgttatatgtatcttcaaatct

SEQ ID NO: 36451 - protein, 225 aa, Arabidopsis thaliana
  peptide (1)..(225): Ceres Seq. ID no. 12395375
  misc_feature (10)..(220): Pfam Name: Phosphoglycerate mutase family Pfam Description: Phosphoglycerate mutase family
  misc_feature (10)..(225): Homolog of NCBI NO: 38344128 NR Description: OSJNBb0072N21.7 [Oryza sativa (japonica
  misc_feature (1)..(108): Homolog of NCBI NO: 7485952 NR Description: hypothetical protein F22I13.140 - Arabidopsis
  misc_feature (102)..(225): Homolog of NCBI NO: 7485952 NR Description: hypothetical protein F22I13.140 - Arabidopsis
  misc_feature (1)..(225): Homolog of NCBI NO: 18420226 NR Description: expressed protein
  misc_feature (1)..(225): Homolog of NCBI NO: 21592519 NR Description: unknown [Arabidopsis thaliana]
MDSSSVGNTNRYWVLRHGKSIPNERGLVVSSMENGVLPEYQLAPDGVAQARLAGESFLQQLKESNIELDKVRICYSPFSRTTHTARVVAEVLNLPFDAPQCKMMEDLRERYFGPTFELKSHDKYPEIWALDEKDPFMGPEGGESADDVVSRLATAMKSMEAEYQRCAILVVSHGDPLQMLQNVFHSAKQQEGDGLAEKFQLSRVASVLSQHRKFALLTGELRPLI

SEQ ID NO: 36452 - protein, 194 aa, Arabidopsis thaliana
  peptide (1)..(194): Ceres Seq. ID no. 12395376
  misc_feature (1)..(189): Pfam Name: Phosphoglycerate mutase family Pfam Description: Phosphoglycerate mutase family
  misc_feature (1)..(194): Homolog of NCBI NO: 38344128 NR Description: OSJNBb0072N21.7 [Oryza sativa (japonica
  misc_feature (1)..(77): Homolog of NCBI NO: 7485952 NR Description: hypothetical protein F22I13.140 - Arabidopsis
  misc_feature (71)..(194): Homolog of NCBI NO: 7485952 NR Description: hypothetical protein F22I13.140 - Arabidopsis
  misc_feature (1)..(194): Homolog of NCBI NO: 18420226 NR Description: expressed protein
  misc_feature (1)..(194): Homolog of NCBI NO: 21592519 NR Description: unknown [Arabidopsis thaliana]
MENGVLPEYQLAPDGVAQARLAGESFLQQLKESNIELDKVRICYSPFSRTTHTARVVAEVLNLPFDAPQCKMMEDLRERYFGPTFELKSHDKYPEIWALDEKDPFMGPEGGESADDVVSRLATAMKSMEAEYQRCAILVVSHGDPLQMLQNVFHSAKQQEGDGLAEKFQLSRVASVLSQHRKFALLTGELRPLI

SEQ ID NO: 36453 - protein, 123 aa, Arabidopsis thaliana
  peptide (1)..(123): Ceres Seq. ID no. 12395377
  misc_feature (1)..(118): Pfam Name: Phosphoglycerate mutase family Pfam Description: Phosphoglycerate mutase family
  misc_feature (1)..(123): Homolog of NCBI NO: 38344128 NR Description: OSJNBb0072N21.7 [Oryza sativa (japonica
  misc_feature (1)..(123): Homolog of NCBI NO: 7485952 NR Description: hypothetical protein F22I13.140 - Arabidopsis
  misc_feature (1)..(123): Homolog of NCBI NO: 18420226 NR Description: expressed protein
  misc_feature (1)..(123): Homolog of NCBI NO: 21592519 NR Description: unknown [Arabidopsis thaliana]
MMEDLRERYFGPTFELKSHDKYPEIWALDEKDPFMGPEGGESADDVVSRLATAMKSMEAEYQRCAILVVSHGDPLQMLQNVFHSAKQQEGDGLAEKFQLSRVASVLSQHRKFALLTGELRPLI

SEQ ID NO: 36454 - DNA, 1348 bp, Arabidopsis thaliana
  misc_feature (1)..(1348): Ceres Seq. ID no. 13497108
  misc_feature: MA Experiment ID: 108434 Result: Up-regulated in Transcription
  misc_feature: MA Experiment 108434 PARAMETER Experiment Name: At_Root_Tips_cDNA_P Parameter: Tissue Value: Root Tips
  misc_feature: MA Experiment ID: 108462 Result: Down-regulated in Transcription
  misc_feature: MA Experiment 108462 PARAMETER Experiment Name: At_Germinating_Seeds_cDNA_P Parameter: Age (day) Value: 2 vs. 0
  misc_feature: MA Experiment 108462 PARAMETER Experiment Name: At_Germinating_Seeds_cDNA_P Parameter: Tissue Value: Germinating Seeds
  misc_feature: MA Experiment ID: 108463 Result: Down-regulated in Transcription
  misc_feature: MA Experiment 108463 PARAMETER Experiment Name: At_Germinating_Seeds_cDNA_P Parameter: Age (day) Value: 3 vs. 0
  misc_feature: MA Experiment 108463 PARAMETER Experiment Name: At_Germinating_Seeds_cDNA_P Parameter: Tissue Value: Germinating Seeds
  misc_feature: MA Experiment ID: 108501 Result: Down-regulated in Transcription
  misc_feature: MA Experiment 108501 PARAMETER Experiment Name: At_ap2_floral_buds_cDNA_P Parameter: Plant Line Value: ap2 (Ler.)
  misc_feature: MA Experiment 108501 PARAMETER Experiment Name: At_ap2_floral_buds_cDNA_P Parameter: Tissue Value: Closed Flower
  misc_feature: MA Experiment ID: 108595 Result: Down-regulated in Transcription
  misc_feature: MA Experiment 108595 PARAMETER Experiment Name: At_Ler-pi_Ovule_cDNA_P Parameter: Plant Line Value: null
  misc_feature: MA Experiment ID: 108668 Result: Down-regulated in Transcription
  misc_feature: MA Experiment 108668 PARAMETER Experiment Name: At_2mM_SA_cDNA_P Parameter: Plant Line Value: WS
  misc_feature: MA Experiment 108668 PARAMETER Experiment Name: At_2mM_SA_cDNA_P Parameter: Timepoint (hr) Value: 6
  misc_feature: MA Experiment 108668 PARAMETER Experiment Name: At_2mM_SA_cDNA_P Parameter: Treatment Value: 2mM SA vs. No Treatment
  misc_feature: MA Experiment ID: 20000185 Result: Down-regulated in Transcription
  misc_feature: MA Experiment 20000185 PARAMETER Experiment Name: At_Roots__P Parameter: Age (day) Value: 7 vs. 21
  misc_feature: MA Experiment 20000185 PARAMETER Experiment Name: At_Roots__P Parameter: Organism Value: A. thaliana
  misc_feature: MA Experiment 20000185 PARAMETER Experiment Name: At_Roots__P Parameter: Tissue Value: Roots vs. Whole Plant
  misc_feature: MA Experiment ID: 20000224 Result: Up-regulated in Transcription
  misc_feature: MA Experiment ID: 20000265 Result: Up-regulated in Transcription
  misc_feature: MA Experiment 20000265 PARAMETER Experiment Name: At_Open_Flower_P Parameter: Age (day) Value: 21
  misc_feature: MA Experiment 20000265 PARAMETER Experiment Name: At_Open_Flower_P Parameter: Plant Line Value: WS
  misc_feature: MA Experiment 20000265 PARAMETER Experiment Name: At_Open_Flower_P Parameter: Tissue Value: Closed Flower vs. Whole Plant
  misc_feature: MA Experiment ID: 20000439 Result: Down-regulated in Transcription
  misc_feature: MA Experiment 20000439 PARAMETER Experiment Name: At_Roots__P Parameter: Age (day) Value: 14 vs. 21
  misc_feature: MA Experiment 20000439 PARAMETER Experiment Name: At_Roots__P Parameter: Organism Value: A. thaliana
  misc_feature: MA Experiment 20000439 PARAMETER Experiment Name: At_Roots__P Parameter: Tissue Value: Roots vs. Whole Plant
cttcaccttccgtcgtagttccccgacaagctaactactgttgagccccgccgcatccgaagccgacttttcaaatcgtcgagcttcaacaatgacgtctcttctccttccttcatctcaatttctccagactcgaacccaaaacaatggccaaccattccttctccctctaacaccactgttcgcaccactaccttctctccgtcagttgagaccgaaacacatctctatttccgccgcagcgccgaagaaaaaatcggagactgtcacggcgccgacaccggcagcgaagaagaattcgagcgtggaggaggaaacagaagaggaagtagaggaagatatgccgtggattcaagagaaggcgttagacctagtcgagttcactggatcggtgagtcaggcgattcctggtcctcgagttggaagtagcaaattgccgtggatgctcgccgttccgttagcttacgccggcgtcactttcgtcactgctttcgtcaaaaccgttcagaagttctcttctcctaaagctcagcgcaagaaactggtgaatcagaatgctatgctttgcagatctatagatgagctattaaggaaagctggaacagtgcatagctctgagcttaaggcacttgaacaaaagacagagtttaacatggaggagatattgcggaaatacattcgttatgcgttgaatgagaaaccgtttaatcccgaccttgttgctgatctcattcatctaagaaaagcttctggtttgaatgattctcagattcctgagattttaaatgagatctctcgtcgtattgtcaaggaaaaaggtccggtagtgatgaaaatgcaaggctttaccgaaaaaggattcaagagaaaactcgccgtgcaagcgctttttggaaagatttactatctttctgagcttcctgacttctgctcaaaagacaactccttaatcgtcaaggaaatattcggcgttacagatgaagacgcagagaagctgcggatacacgctcttgctgaagctggagacatagaggcacttgagaaaatggtggaatttgagaaaactgcggagtcttcttcggataaagaagaagattcaaatgaagaagatgactctaacaccacttcctaagatgtttgttcaacgaccaactttcaacagtagattctttccaaagggggttttcttcttctgttctttgacttataccccaagttgtgttgtttacagcagaagacgtctgattccaacagaaattgtcttttgcaaaaaaccatgacacagctcgtaatacaaattaactgcatctatagtgcagcacagcaatacaagttggggcttatattc

SEQ ID NO: 36455 - protein, 346 aa, Arabidopsis thaliana
  peptide (1)..(346): Ceres Seq. ID no. 13497109
  misc_feature (261)..(346): Homolog of NCBI NO: 9759348 NR Description: gene_id:MAH20.10~pir||T27191~similar to unknown
  misc_feature (30)..(321): Homolog of NCBI NO: 38344450 NR Description: OSJNBa0038O10.22 [Oryza sativa (japonica
  misc_feature (40)..(296): Homolog of NCBI NO: 9759348 NR Description: gene_id:MAH20.10~pir||T27191~similar to unknown
  misc_feature (1)..(346): Homolog of NCBI NO: 21592521 NR Description: unknown [Arabidopsis thaliana]
  misc_feature (1)..(346): Homolog of NCBI NO: 18415850 NR Description: expressed protein [Arabidopsis thaliana]
MTSLLLPSSQFLQTRTQNNGQPFLLPLTPLFAPLPSLRQLRPKHISISAAAPKKKSETVTAPTPAAKKNSSVEEETEEEVEEDMPWIQEKALDLVEFTGSVSQAIPGPRVGSSKLPWMLAVPLAYAGVTFVTAFVKTVQKFSSPKAQRKKLVNQNAMLCRSIDELLRKAGTVHSSELKALEQKTEFNMEEILRKYIRYALNEKPFNPDLVADLIHLRKASGLNDSQIPEILNEISRRIVKEKGPVVMKMQGFTEKGFKRKLAVQALFGKIYYLSELPDFCSKDNSLIVKEIFGVTDEDAEKLRIHALAEAGDIEALEKMVEFEKTAESSSDKEEDSNEEDDSNTTS

SEQ ID NO: 36456 - protein, 263 aa, Arabidopsis thaliana
  peptide (1)..(263): Ceres Seq. ID no. 13497110
  misc_feature (178)..(263): Homolog of NCBI NO: 9759348 NR Description: gene_id:MAH20.10~pir||T27191~similar to unknown
  misc_feature (1)..(238): Homolog of NCBI NO: 38344450 NR Description: OSJNBa0038O10.22 [Oryza sativa (japonica
  misc_feature (1)..(213): Homolog of NCBI NO: 9759348 NR Description: gene_id:MAH20.10~pir||T27191~similar to unknown
  misc_feature (1)..(263): Homolog of NCBI NO: 21592521 NR Description: unknown [Arabidopsis thaliana]
  misc_feature (1)..(263): Homolog of NCBI NO: 18415850 NR Description: expressed protein [Arabidopsis thaliana]
MPWIQEKALDLVEFTGSVSQAIPGPRVGSSKLPWMLAVPLAYAGVTFVTAFVKTVQKFSSPKAQRKKLVNQNAMLCRSIDELLRKAGTVHSSELKALEQKTEFNMEEILRKYIRYALNEKPFNPDLVADLIHLRKASGLNDSQIPEILNEISRRIVKEKGPVVMKMQGFTEKGFKRKLAVQALFGKIYYLSELPDFCSKDNSLIVKEIFGVTDEDAEKLRIHALAEAGDIEALEKMVEFEKTAESSSDKEEDSNEEDDSNTTS

SEQ ID NO: 36457 - protein, 229 aa, Arabidopsis thaliana
  peptide (1)..(229): Ceres Seq. ID no. 13497111
  misc_feature (144)..(229): Homolog of NCBI NO: 9759348 NR Description: gene_id:MAH20.10~pir||T27191~similar to unknown
  misc_feature (1)..(204): Homolog of NCBI NO: 38344450 NR Description: OSJNBa0038O10.22 [Oryza sativa (japonica
  misc_feature (1)..(179): Homolog of NCBI NO: 9759348 NR Description: gene_id:MAH20.10~pir||T27191~similar to unknown
  misc_feature (1)..(229): Homolog of NCBI NO: 21592521 NR Description: unknown [Arabidopsis thaliana]
  misc_feature (1)..(229): Homolog of NCBI NO: 18415850 NR Description: expressed protein [Arabidopsis thaliana]
MLAVPLAYAGVTFVTAFVKTVQKFSSPKAQRKKLVNQNAMLCRSIDELLRKAGTVHSSELKALEQKTEFNMEEILRKYIRYALNEKPFNPDLVADLIHLRKASGLNDSQIPEILNEISRRIVKEKGPVVMKMQGFTEKGFKRKLAVQALFGKIYYLSELPDFCSKDNSLIVKEIFGVTDEDAEKLRIHALAEAGDIEALEKMVEFEKTAESSSDKEEDSNEEDDSNTTS

SEQ ID NO: 36458 - DNA, 1350 bp, Arabidopsis thaliana
  misc_feature (1)..(1350): Ceres Seq. ID no. 12421311
  misc_feature: MA Experiment ID: 108462 Result: Up-regulated in Transcription
  misc_feature: MA Experiment 108462 PARAMETER Experiment Name: At_Germinating_Seeds_cDNA_P Parameter: Age (day) Value: 2 vs. 0
  misc_feature: MA Experiment 108462 PARAMETER Experiment Name: At_Germinating_Seeds_cDNA_P Parameter: Tissue Value: Germinating Seeds
  misc_feature: MA Experiment ID: 108463 Result: Up-regulated in Transcription
  misc_feature: MA Experiment 108463 PARAMETER Experiment Name: At_Germinating_Seeds_cDNA_P Parameter: Age (day) Value: 3 vs. 0
  misc_feature: MA Experiment 108463 PARAMETER Experiment Name: At_Germinating_Seeds_cDNA_P Parameter: Tissue Value: Germinating Seeds
  misc_feature: MA Experiment ID: 108464 Result: Up-regulated in Transcription
  misc_feature: MA Experiment 108464 PARAMETER Experiment Name: At_Germinating_Seeds_cDNA_P Parameter: Age (day) Value: 4 vs. 0
  misc_feature: MA Experiment 108464 PARAMETER Experiment Name: At_Germinating_Seeds_cDNA_P Parameter: Tissue Value: Germinating Seeds
  misc_feature: MA Experiment ID: 108501 Result: Up-regulated in Transcription
  misc_feature: MA Experiment 108501 PARAMETER Experiment Name: At_ap2_floral_buds_cDNA_P Parameter: Plant Line Value: ap2 (Ler.)
  misc_feature: MA Experiment 108501 PARAMETER Experiment Name: At_ap2_floral_buds_cDNA_P Parameter: Tissue Value: Closed Flower
  misc_feature: MA Experiment ID: 108595 Result: Up-regulated in Transcription
  misc_feature: MA Experiment 108595 PARAMETER Experiment Name: At_Ler-pi_Ovule_cDNA_P Parameter: Plant Line Value: null
  misc_feature: MA Experiment ID: 20000070 Result: Down-regulated in Transcription
  misc_feature: MA Experiment 20000070 PARAMETER Experiment Name: At_100uM_ABA_Mutants_cDNA_P Parameter: Plant Line Value: CS24
  misc_feature: MA Experiment 20000070 PARAMETER Experiment Name: At_100uM_ABA_Mutants_cDNA_P Parameter: Timepoint (hr) Value: 6
  misc_feature: MA Experiment 20000070 PARAMETER Experiment Name: At_100uM_ABA_Mutants_cDNA_P Parameter: Tissue Value: Aerial
  misc_feature: MA Experiment 20000070 PARAMETER Experiment Name: At_100uM_ABA_Mutants_cDNA_P Parameter: Treatment Value: 100uM ABA vs. No Treatment
  misc_feature: MA Experiment ID: 20000071 Result: Down-regulated in Transcription
  misc_feature: MA Experiment 20000071 PARAMETER Experiment Name: At_100uM_ABA_Mutants_cDNA_P Parameter: Plant Line Value: CS8104
  misc_feature: MA Experiment 20000071 PARAMETER Experiment Name: At_100uM_ABA_Mutants_cDNA_P Parameter: Timepoint (hr) Value: 6
  misc_feature: MA Experiment 20000071 PARAMETER Experiment Name: At_100uM_ABA_Mutants_cDNA_P Parameter: Tissue Value: Aerial
  misc_feature: MA Experiment 20000071 PARAMETER Experiment Name: At_100uM_ABA_Mutants_cDNA_P Parameter: Treatment Value: 100uM ABA vs. No Treatment
  misc_feature: MA Experiment ID: 20000086 Result: Down-regulated in Transcription
  misc_feature: MA Experiment 20000086 PARAMETER Experiment Name: At_100uM_ABA_Mutants_cDNA_P Parameter: Plant Line Value: CS22
  misc_feature: MA Experiment 20000086 PARAMETER Experiment Name: At_100uM_ABA_Mutants_cDNA_P Parameter: Timepoint (hr) Value: 6
  misc_feature: MA Experiment 20000086 PARAMETER Experiment Name: At_100uM_ABA_Mutants_cDNA_P Parameter: Tissue Value: Aerial
  misc_feature: MA Experiment 20000086 PARAMETER Experiment Name: At_100uM_ABA_Mutants_cDNA_P Parameter: Treatment Value: 100uM ABA vs. No Treatment
  misc_feature: MA Experiment ID: 20000088 Result: Down-regulated in Transcription
  misc_feature: MA Experiment 20000088 PARAMETER Experiment Name: At_100uM_ABA_Mutants_cDNA_P Parameter: Plant Line Value: Landsberg
  misc_feature: MA Experiment 20000088 PARAMETER Experiment Name: At_100uM_ABA_Mutants_cDNA_P Parameter: Timepoint (hr) Value: 6
  misc_feature: MA Experiment 20000088 PARAMETER Experiment Name: At_100uM_ABA_Mutants_cDNA_P Parameter: Tissue Value: Aerial
  misc_feature: MA Experiment 20000088 PARAMETER Experiment Name: At_100uM_ABA_Mutants_cDNA_P Parameter: Treatment Value: 100uM ABA vs. No Treatment
  misc_feature: MA Experiment ID: 20000089 Result: Down-regulated in Transcription
  misc_feature: MA Experiment ID: 20000090 Result: Down-regulated in Transcription
  misc_feature: MA Experiment ID: 20000117 Result: Down-regulated in Transcription
  misc_feature: MA Experiment 20000117 PARAMETER Experiment Name: At_100uM_ABA_Mutants_cDNA_P Parameter: Plant Line Value: Columbia
  misc_feature: MA Experiment 20000117 PARAMETER Experiment Name: At_100uM_ABA_Mutants_cDNA_P Parameter: Timepoint (hr) Value: 6
  misc_feature: MA Experiment 20000117 PARAMETER Experiment Name: At_100uM_ABA_Mutants_cDNA_P Parameter: Tissue Value: Aerial
  misc_feature: MA Experiment 20000117 PARAMETER Experiment Name: At_100uM_ABA_Mutants_cDNA_P Parameter: Treatment Value: 100uM ABA vs. No Treatment
  misc_feature: MA Experiment ID: 20000184 Result: Up-regulated in Transcription
  misc_feature: MA Experiment 20000184 PARAMETER Experiment Name: At_Shoots__P Parameter: Age (day) Value: 7
  misc_feature: MA Experiment 20000184 PARAMETER Experiment Name: At_Shoots__P Parameter: Tissue Value: Shoots vs. Whole Plant
  misc_feature: MA Experiment ID: 20000185 Result: Up-regulated in Transcription
  misc_feature: MA Experiment 20000185 PARAMETER Experiment Name: At_Roots__P Parameter: Age (day) Value: 7 vs. 21
  misc_feature: MA Experiment 20000185 PARAMETER Experiment Name: At_Roots__P Parameter: Organism Value: A. thaliana
  misc_feature: MA Experiment 20000185 PARAMETER Experiment Name: At_Roots__P Parameter: Tissue Value: Roots vs. Whole Plant
  misc_feature: MA Experiment ID: 20000234 Result: Up-regulated in Transcription
  misc_feature: MA Experiment 20000234 PARAMETER Experiment Name: At_Siliques_P Parameter: Age (day) Value: 21
  misc_feature: MA Experiment 20000234 PARAMETER Experiment Name: At_Siliques_P Parameter: Organism Value: A. thaliana
  misc_feature: MA Experiment 20000234 PARAMETER Experiment Name: At_Siliques_P Parameter: Plant Line Value: WS
  misc_feature: MA Experiment 20000234 PARAMETER Experiment Name: At_Siliques_P Parameter: Tissue Value: Less Than 5mm Siliques vs. Whole Plant
  misc_feature: MA Experiment ID: 20000264 Result: Up-regulated in Transcription
  misc_feature: MA Experiment 20000264 PARAMETER Experiment Name: At_Open_Flower_P Parameter: Age (day) Value: 21
  misc_feature: MA Experiment 20000264 PARAMETER Experiment Name: At_Open_Flower_P Parameter: Plant Line Value: WS
  misc_feature: MA Experiment 20000264 PARAMETER Experiment Name: At_Open_Flower_P Parameter: Tissue Value: Open Flower vs. Whole Plant
  misc_feature: MA Experiment ID: 20000265 Result: Up-regulated in Transcription
  misc_feature: MA Experiment 20000265 PARAMETER Experiment Name: At_Open_Flower_P Parameter: Age (day) Value: 21
  misc_feature: MA Experiment 20000265 PARAMETER Experiment Name: At_Open_Flower_P Parameter: Plant Line Value: WS
  misc_feature: MA Experiment 20000265 PARAMETER Experiment Name: At_Open_Flower_P Parameter: Tissue Value: Closed Flower vs. Whole Plant
  misc_feature: MA Experiment ID: 20000286 Result: Up-regulated in Transcription
  misc_feature: MA Experiment 20000286 PARAMETER Experiment Name: At_Open_Flower_P Parameter: Age (day) Value: 21
  misc_feature: MA Experiment 20000286 PARAMETER Experiment Name: At_Open_Flower_P Parameter: Plant Line Value: WS
  misc_feature: MA Experiment 20000286 PARAMETER Experiment Name: At_Open_Flower_P Parameter: Tissue Value: Half Open vs. Whole Plant
  misc_feature: MA Experiment ID: 20000438 Result: Up-regulated in Transcription
  misc_feature: MA Experiment 20000438 PARAMETER Experiment Name: At_Shoots__P Parameter: Age (day) Value: 14
  misc_feature: MA Experiment 20000438 PARAMETER Experiment Name: At_Shoots__P Parameter: Tissue Value: Shoots vs. Whole Plant
  misc_feature: MA Experiment ID: 20000439 Result: Up-regulated in Transcription
  misc_feature: MA Experiment 20000439 PARAMETER Experiment Name: At_Roots__P Parameter: Age (day) Value: 14 vs. 21
  misc_feature: MA Experiment 20000439 PARAMETER Experiment Name: At_Roots__P Parameter: Organism Value: A. thaliana
  misc_feature: MA Experiment 20000439 PARAMETER Experiment Name: At_Roots__P Parameter: Tissue Value: Roots vs. Whole Plant
  misc_feature: MA Experiment ID: 20000451 Result: Up-regulated in Transcription
  misc_feature: MA Experiment 20000451 PARAMETER Experiment Name: At_CS6879_Shoots-Roots_P Parameter: Age (day) Value: 14
  misc_feature: MA Experiment 20000451 PARAMETER Experiment Name: At_CS6879_Shoots-Roots_P Parameter: Organism Value: A. thaliana
  misc_feature: MA Experiment 20000451 PARAMETER Experiment Name: At_CS6879_Shoots-Roots_P Parameter: Plant Line Value: CS6879 vs. WS
  misc_feature: MA Experiment 20000451 PARAMETER Experiment Name: At_CS6879_Shoots-Roots_P Parameter: Tissue Value: Roots
  misc_feature: MA Experiment ID: 20000495 Result: Up-regulated in Transcription
  misc_feature: MA Experiment 20000495 PARAMETER Experiment Name: At_Guard_Cells_P Parameter: Harvest Date Value: 8/2/2002
  misc_feature: MA Experiment 20000495 PARAMETER Experiment Name: At_Guard_Cells_P Parameter: Organism Value: A. thaliana
  misc_feature: MA Experiment 20000495 PARAMETER Experiment Name: At_Guard_Cells_P Parameter: Tissue Value: Guard Cells vs. Leaves
  misc_feature: MA Experiment ID: 20000794 Result: Up-regulated in Transcription
  misc_feature: MA Experiment 20000794 PARAMETER Experiment Name: At_Petals_P Parameter: Age (day) Value: 23-25 days
  misc_feature: MA Experiment 20000794 PARAMETER Experiment Name: At_Petals_P Parameter: Plant Line Value: WS
  misc_feature: MA Experiment 20000794 PARAMETER Experiment Name: At_Petals_P Parameter: Tissue Value: Petals vs. Whole plant
  misc_feature: MA Experiment ID: 20001247 Result: Down-regulated in Transcription
  misc_feature: MA Experiment 20001247 PARAMETER Experiment Name: At_Far-red-induction_P Parameter: Age (day) Value: 7
  misc_feature: MA Experiment 20001247 PARAMETER Experiment Name: At_Far-red-induction_P Parameter: Light Value: Far-red vs. White
  misc_feature: MA Experiment 20001247 PARAMETER Experiment Name: At_Far-red-induction_P Parameter: Organism Value: A. thaliana
  misc_feature: MA Experiment 20001247 PARAMETER Experiment Name: At_Far-red-induction_P Parameter: Plant Line Value: Columbia
  misc_feature: MA Experiment 20001247 PARAMETER Experiment Name: At_Far-red-induction_P Parameter: Timepoint (hr) Value: 1
  misc_feature: MA Experiment 20001247 PARAMETER Experiment Name: At_Far-red-induction_P Parameter: Tissue Value: Whole Plant
  misc_feature: MA Experiment ID: 20001248 Result: Down-regulated in Transcription
  misc_feature: MA Experiment 20001248 PARAMETER Experiment Name: At_Far-red-induction_P Parameter: Age (day) Value: 7
  misc_feature: MA Experiment 20001248 PARAMETER Experiment Name: At_Far-red-induction_P Parameter: Light Value: Far-red vs. White
  misc_feature: MA Experiment 20001248 PARAMETER Experiment Name: At_Far-red-induction_P Parameter: Organism Value: A. thaliana
  misc_feature: MA Experiment 20001248 PARAMETER Experiment Name: At_Far-red-induction_P Parameter: Plant Line Value: Columbia
  misc_feature: MA Experiment 20001248 PARAMETER Experiment Name: At_Far-red-induction_P Parameter: Timepoint (hr) Value: 4
  misc_feature: MA Experiment 20001248 PARAMETER Experiment Name: At_Far-red-induction_P Parameter: Tissue Value: Whole Plant
  misc_feature: MA Experiment ID: 20001450 Result: Down-regulated in Transcription
  misc_feature: MA Experiment 20001450 PARAMETER Experiment Name: At_Far-red-induction_P Parameter: Age (day) Value: 7
  misc_feature: MA Experiment 20001450 PARAMETER Experiment Name: At_Far-red-induction_P Parameter: Light Value: Far-red vs. White
  misc_feature: MA Experiment 20001450 PARAMETER Experiment Name: At_Far-red-induction_P Parameter: Organism Value: A. thaliana
  misc_feature: MA Experiment 20001450 PARAMETER Experiment Name: At_Far-red-induction_P Parameter: Plant Line Value: Columbia
  misc_feature: MA Experiment 20001450 PARAMETER Experiment Name: At_Far-red-induction_P Parameter: Timepoint (hr) Value: 8
  misc_feature: MA Experiment 20001450 PARAMETER Experiment Name: At_Far-red-induction_P Parameter: Tissue Value: Whole Plant
acatagccatatatttttttggtcgtactttgtatctttggcaaaacacaaaaaacaaaaacaaaaaaaaactccttatatttttgtatttgatgctaattgtcgtatagatgcccaaattcaattcaacccaagctcccaatttatttcttctccttctcctccttctcgttatccttctttgttcaacgcaaacacaatgccacaccaaaggtctacgattacgaccaagaaaccagaagaatatgaacacgacgagagatcggacacaaaacccggaagatgagttcatgaaatgggtgagattcgttggaagccttaaacactcagtgttcaaggcagccaagaacaaactcttcccttcttatacactaactgtccacaagaaatccaataaaggtgacttcactaaaatccaagacgccattgattctctccctctcatcaactttgttcgtgtcgtcatcaaggttcatgccggngtttacaaggagaaggtgagcatacccccactgaaggcatttataacaatagaaggagaaggagcagagaagacaacagtggaatggggagacacagcacaaacccctgactcaaaaggcaaccccatgggcacttacaactcggcctcgttcgcggtcaactctcctttctttgtcgctaagaatatcacattcaggaacacgaccccagtccccttgcccggtgcagttggtaaacaggcggtagcattgagggtgtcggcagacaatgccgcgttttttgggtgtagaatgcttggtgctcaagacactctctatgaccatttgggaagacattattacaaagattgttacattgagggatcagtggacttcatctttggaaatgccctttctctttatgaagggtgccacgtgcatgcgatagcggataagctaggagcagtgacggcacaggggaggagcagtgttctagaggacaccggattctcgttcgtaaagtgtaaggtgacagggacaggggttttgtatcttgggagggcatggggtcccttctcaagagtcgtttttgcttacacttacatggacaacatcatcctccctagaggctggtacaattggggagacccttcccgtgagatgacggtgttctatgggcagtacaagtgcacgggagcaggagcaaactatggagggagggtggcttgggcaagagagctcaccgacgaagaagctaagccttttctttctcttacctttatcgacggctctgaatggatcaaactctaaccatatacacctttttttattttctttccacctaattaataatgtacattttccctgtaataaaataaaaatatttttt

SEQ ID NO: 36459 - protein, 386 aa, Arabidopsis thaliana
  peptide (1)..(386): Ceres Seq. ID no. 12421312
  misc_feature (96)..(381): Pfam Name: Pectinesterase Pfam Description: Pectinesterase
  misc_feature (98)..(385): Homolog of NCBI NO: 25325338 NR Description: hypothetical protein [imported] - Arabidopsis
  misc_feature (93)..(386): Homolog of NCBI NO: 15240544 NR Description: pectinesterase family; protein id: At5g55590.1
  misc_feature (98)..(385): Homolog of NCBI NO: 15220471 NR Description: pectinesterase family; protein id: At1g05310.1
  misc_feature (97)..(385): Homolog of NCBI NO: 27754550 NR Description: putative pectinesterase family protein
  misc_feature (97)..(385): Homolog of NCBI NO: 15228023 NR Description: pectinesterase family; protein id: At2g36710.1
  misc_feature (99)..(384): Homolog of NCBI NO: 9758778 NR Description: pectin methylesterase-like [Arabidopsis thaliana]
  misc_feature (99)..(384): Homolog of NCBI NO: 15238111 NR Description: pectinesterase family
  misc_feature (94)..(384): Homolog of NCBI NO: 38345478 NR Description: OSJNBa0010H02.16 [Oryza sativa (japonica
  misc_feature (32)..(386): Homolog of NCBI NO: 34909402 NR Description: putative pectin methylesterase
  misc_feature (1)..(386): Homolog of NCBI NO: 15241163 NR Description: pectinesterase family
  misc_feature (124)..(124): Xaa is any aa, unknown or other
MPKFNSTQAPNLFLLLLLLLVILLCSTQTQCHTKGLRLRPRNQKNMNTTRDRTQNPEDEFMKWVRFVGSLKHSVFKAAKNKLFPSYTLTVHKKSNKGDFTKIQDAIDSLPLINFVRVVIKVHAXVYKEKVSIPPLKAFITIEGEGAEKTTVEWGDTAQTPDSKGNPMGTYNSASFAVNSPFFVAKNITFRNTTPVPLPGAVGKQAVALRVSADNAAFFGCRMLGAQDTLYDHLGRHYYKDCYIEGSVDFIFGNALSLYEGCHVHAIADKLGAVTAQGRSSVLEDTGFSFVKCKVTGTGVLYLGRAWGPFSRVVFAYTYMDNIILPRGWYNWGDPSREMTVFYGQYKCTGAGANYGGRVAWARELTDEEAKPFLSLTFIDGSEWIKL

SEQ ID NO: 36460 - protein, 341 aa, Arabidopsis thaliana
  peptide (1)..(341): Ceres Seq. ID no. 12421313
  misc_feature (51)..(336): Pfam Name: Pectinesterase Pfam Description: Pectinesterase
  misc_feature (53)..(340): Homolog of NCBI NO: 25325338 NR Description: hypothetical protein [imported] - Arabidopsis
  misc_feature (48)..(341): Homolog of NCBI NO: 15240544 NR Description: pectinesterase family; protein id: At5g55590.1
  misc_feature (53)..(340): Homolog of NCBI NO: 15220471 NR Description: pectinesterase family; protein id: At1g05310.1
  misc_feature (52)..(340): Homolog of NCBI NO: 27754550 NR Description: putative pectinesterase family protein
  misc_feature (52)..(340): Homolog of NCBI NO: 15228023 NR Description: pectinesterase family; protein id: At2g36710.1
  misc_feature (54)..(339): Homolog of NCBI NO: 9758778 NR Description: pectin methylesterase-like [Arabidopsis thaliana]
  misc_feature (54)..(339): Homolog of NCBI NO: 15238111 NR Description: pectinesterase family
  misc_feature (49)..(339): Homolog of NCBI NO: 38345478 NR Description: OSJNBa0010H02.16 [Oryza sativa (japonica
  misc_feature (1)..(341): Homolog of NCBI NO: 34909402 NR Description: putative pectin methylesterase
  misc_feature (1)..(341): Homolog of NCBI NO: 15241163 NR Description: pectinesterase family
  misc_feature (79)..(79): Xaa is any aa, unknown or other
MNTTRDRTQNPEDEFMKWVRFVGSLKHSVFKAAKNKLFPSYTLTVHKKSNKGDFTKIQDAIDSLPLINFVRVVIKVHAXVYKEKVSIPPLKAFITIEGEGAEKTTVEWGDTAQTPDSKGNPMGTYNSASFAVNSPFFVAKNITFRNTTPVPLPGAVGKQAVALRVSADNAAFFGCRMLGAQDTLYDHLGRHYYKDCYIEGSVDFIFGNALSLYEGCHVHAIADKLGAVTAQGRSSVLEDTGFSFVKCKVTGTGVLYLGRAWGPFSRVVFAYTYMDNIILPRGWYNWGDPSREMTVFYGQYKCTGAGANYGGRVAWARELTDEEAKPFLSLTFIDGSEWIKL

SEQ ID NO: 36461 - protein, 326 aa, Arabidopsis thaliana
  peptide (1)..(326): Ceres Seq. ID no. 12421314
  misc_feature (36)..(321): Pfam Name: Pectinesterase Pfam Description: Pectinesterase
  misc_feature (38)..(325): Homolog of NCBI NO: 25325338 NR Description: hypothetical protein [imported] - Arabidopsis
  misc_feature (33)..(326): Homolog of NCBI NO: 15240544 NR Description: pectinesterase family; protein id: At5g55590.1
  misc_feature (38)..(325): Homolog of NCBI NO: 15220471 NR Description: pectinesterase family; protein id: At1g05310.1
  misc_feature (37)..(325): Homolog of NCBI NO: 27754550 NR Description: putative pectinesterase family protein
  misc_feature (37)..(325): Homolog of NCBI NO: 15228023 NR Description: pectinesterase family; protein id: At2g36710.1
  misc_feature (39)..(324): Homolog of NCBI NO: 9758778 NR Description: pectin methylesterase-like [Arabidopsis thaliana]
  misc_feature (39)..(324): Homolog of NCBI NO: 15238111 NR Description: pectinesterase family
  misc_feature (34)..(324): Homolog of NCBI NO: 38345478 NR Description: OSJNBa0010H02.16 [Oryza sativa (japonica
  misc_feature (1)..(326): Homolog of NCBI NO: 34909402 NR Description: putative pectin methylesterase
  misc_feature (1)..(326): Homolog of NCBI NO: 15241163 NR Description: pectinesterase family
  misc_feature (64)..(64): Xaa is any aa, unknown or other
MKWVRFVGSLKHSVFKAAKNKLFPSYTLTVHKKSNKGDFTKIQDAIDSLPLINFVRVVIKVHAXVYKEKVSIPPLKAFITIEGEGAEKTTVEWGDTAQTPDSKGNPMGTYNSASFAVNSPFFVAKNITFRNTTPVPLPGAVGKQAVALRVSADNAAFFGCRMLGAQDTLYDHLGRHYYKDCYIEGSVDFIFGNALSLYEGCHVHAIADKLGAVTAQGRSSVLEDTGFSFVKCKVTGTGVLYLGRAWGPFSRVVFAYTYMDNIILPRGWYNWGDPSREMTVFYGQYKCTGAGANYGGRVAWARELTDEEAKPFLSLTFIDGSEWIKL

SEQ ID NO: 36462 - DNA, 1993 bp, Arabidopsis thaliana
  misc_feature (1)..(1993): Ceres Seq. ID no. 13497104
  misc_feature: MA Experiment ID: 108463 Result: Up-regulated in Transcription
  misc_feature: MA Experiment 108463 PARAMETER Experiment Name: At_Germinating_Seeds_cDNA_P Parameter: Age (day) Value: 3 vs. 0
  misc_feature: MA Experiment 108463 PARAMETER Experiment Name: At_Germinating_Seeds_cDNA_P Parameter: Tissue Value: Germinating Seeds
  misc_feature: MA Experiment ID: 108488 Result: Down-regulated in Transcription
  misc_feature: MA Experiment ID: 108489 Result: Up-regulated in Transcription
  misc_feature: MA Experiment ID: 108561 Result: Down-regulated in Transcription
  misc_feature: MA Experiment 108561 PARAMETER Experiment Name: At_100uM_ABA_cDNA_P Parameter: Timepoint (hr) Value: 6
  misc_feature: MA Experiment 108561 PARAMETER Experiment Name: At_100uM_ABA_cDNA_P Parameter: Tissue Value: Aerial
  misc_feature: MA Experiment 108561 PARAMETER Experiment Name: At_100uM_ABA_cDNA_P Parameter: Treatment Value: 100uM ABA vs. No Treatment
  misc_feature: MA Experiment ID: 108574 Result: Up-regulated in Transcription
  misc_feature: MA Experiment 108574 PARAMETER Experiment Name: At_Wounding__cDNA_P Parameter: Timepoint (hr) Value: 1
  misc_feature: MA Experiment 108574 PARAMETER Experiment Name: At_Wounding__cDNA_P Parameter: Tissue Value: Aerial
  misc_feature: MA Experiment 108574 PARAMETER Experiment Name: At_Wounding__cDNA_P Parameter: Treatment Value: Wounding vs. No Wounding
  misc_feature: MA Experiment ID: 108577 Result: Down-regulated in Transcription
  misc_feature: MA Experiment 108577 PARAMETER Experiment Name: At_42deg_Heat_cDNA_P Parameter: Temperature (deg C) Value: 42 vs. 22
  misc_feature: MA Experiment 108577 PARAMETER Experiment Name: At_42deg_Heat_cDNA_P Parameter: Timepoint (hr) Value: 6
  misc_feature: MA Experiment 108577 PARAMETER Experiment Name: At_42deg_Heat_cDNA_P Parameter: Tissue Value: Aerial
  misc_feature: MA Experiment ID: 108579 Result: Up-regulated in Transcription
  misc_feature: MA Experiment 108579 PARAMETER Experiment Name: At_4deg_Cold_cDNA_P Parameter: Temperature (deg C) Value: 4 vs. 22
  misc_feature: MA Experiment 108579 PARAMETER Experiment Name: At_4deg_Cold_cDNA_P Parameter: Timepoint (hr) Value: 6
  misc_feature: MA Experiment 108579 PARAMETER Experiment Name: At_4deg_Cold_cDNA_P Parameter: Tissue Value: Aerial
  misc_feature: MA Experiment ID: 108585 Result: Up-regulated in Transcription
  misc_feature: MA Experiment 108585 PARAMETER Experiment Name: At_5mM_NaNP_cDNA_P Parameter: Timepoint (hr) Value: 6
  misc_feature: MA Experiment 108585 PARAMETER Experiment Name: At_5mM_NaNP_cDNA_P Parameter: Tissue Value: Aerial
  misc_feature: MA Experiment 108585 PARAMETER Experiment Name: At_5mM_NaNP_cDNA_P Parameter: Treatment Value: null
  misc_feature: MA Experiment ID: 108594 Result: Up-regulated in Transcription
  misc_feature: MA Experiment 108594 PARAMETER Experiment Name: At_Ler-rhl_Root_cDNA_P Parameter: Plant Line Value: null
  misc_feature: MA Experiment ID: 108595 Result: Up-regulated in Transcription
  misc_feature: MA Experiment 108595 PARAMETER Experiment Name: At_Ler-pi_Ovule_cDNA_P Parameter: Plant Line Value: null
  misc_feature: MA Experiment ID: 108667 Result: Up-regulated in Transcription
  misc_feature: MA Experiment 108667 PARAMETER Experiment Name: At_2mM_SA_cDNA_P Parameter: Plant Line Value: WS
  misc_feature: MA Experiment 108667 PARAMETER Experiment Name: At_2mM_SA_cDNA_P Parameter: Timepoint (hr) Value: 1
  misc_feature: MA Experiment 108667 PARAMETER Experiment Name: At_2mM_SA_cDNA_P Parameter: Treatment Value: 2mM SA vs. No Treatment
  misc_feature: MA Experiment ID: 20000144 Result: Down-regulated in Transcription
  misc_feature: MA Experiment 20000144 PARAMETER Experiment Name: At_42deg_Heat_cDNA_P Parameter: Temperature (deg C) Value: 42 vs. 22
  misc_feature: MA Experiment 20000144 PARAMETER Experiment Name: At_42deg_Heat_cDNA_P Parameter: Timepoint (hr) Value: 1
  misc_feature: MA Experiment 20000144 PARAMETER Experiment Name: At_42deg_Heat_cDNA_P Parameter: Tissue Value: Aerial
  misc_feature: MA Experiment ID: 20000171 Result: Down-regulated in Transcription
  misc_feature: MA Experiment 20000171 PARAMETER Experiment Name: At_42deg_Heat_P Parameter: Age (day) Value: 14
  misc_feature: MA Experiment 20000171 PARAMETER Experiment Name: At_42deg_Heat_P Parameter: Organism Value: A. thaliana
  misc_feature: MA Experiment 20000171 PARAMETER Experiment Name: At_42deg_Heat_P Parameter: Plant Line Value: WS
  misc_feature: MA Experiment 20000171 PARAMETER Experiment Name: At_42deg_Heat_P Parameter: Temperature (deg C) Value: 42 vs. 22
  misc_feature: MA Experiment 20000171 PARAMETER Experiment Name: At_42deg_Heat_P Parameter: Timepoint (hr) Value: 1
  misc_feature: MA Experiment 20000171 PARAMETER Experiment Name: At_42deg_Heat_P Parameter: Tissue Value: Aerial
  misc_feature: MA Experiment ID: 20000180 Result: Down-regulated in Transcription
  misc_feature: MA Experiment 20000180 PARAMETER Experiment Name: At_Germinating_Seeds_P Parameter: Age (hr) Value: 24 vs. 0
  misc_feature: MA Experiment 20000180 PARAMETER Experiment Name: At_Germinating_Seeds_P Parameter: Tissue Value: Germinating Seeds
  misc_feature: MA Experiment ID: 20000182 Result: Up-regulated in Transcription
  misc_feature: MA Experiment 20000182 PARAMETER Experiment Name: At_2mM_SA_P Parameter: Age (day) Value: 14
  misc_feature: MA Experiment 20000182 PARAMETER Experiment Name: At_2mM_SA_P Parameter: Organism Value: A. thaliana
  misc_feature: MA Experiment 20000182 PARAMETER Experiment Name: At_2mM_SA_P Parameter: Plant Line Value: WS
  misc_feature: MA Experiment 20000182 PARAMETER Experiment Name: At_2mM_SA_P Parameter: Timepoint (hr) Value: 6
  misc_feature: MA Experiment 20000182 PARAMETER Experiment Name: At_2mM_SA_P Parameter: Tissue Value: Aerial
  misc_feature: MA Experiment 20000182 PARAMETER Experiment Name: At_2mM_SA_P Parameter: Treatment Value: 2mM SA vs. No Treatment
  misc_feature: MA Experiment ID: 20000184 Result: Down-regulated in Transcription
  misc_feature: MA Experiment 20000184 PARAMETER Experiment Name: At_Shoots__P Parameter: Age (day) Value: 7
  misc_feature: MA Experiment 20000184 PARAMETER Experiment Name: At_Shoots__P Parameter: Tissue Value: Shoots vs. Whole Plant
  misc_feature: MA Experiment ID: 20000185 Result: Down-regulated in Transcription
  misc_feature: MA Experiment 20000185 PARAMETER Experiment Name: At_Roots__P Parameter: Age (day) Value: 7 vs. 21
  misc_feature: MA Experiment 20000185 PARAMETER Experiment Name: At_Roots__P Parameter: Organism Value: A. thaliana
  misc_feature: MA Experiment 20000185 PARAMETER Experiment Name: At_Roots__P Parameter: Tissue Value: Roots vs. Whole Plant
  misc_feature: MA Experiment ID: 20000234 Result: Down-regulated in Transcription
  misc_feature: MA Experiment 20000234 PARAMETER Experiment Name: At_Siliques_P Parameter: Age (day) Value: 21
  misc_feature: MA Experiment 20000234 PARAMETER Experiment Name: At_Siliques_P Parameter: Organism Value: A. thaliana
  misc_feature: MA Experiment 20000234 PARAMETER Experiment Name: At_Siliques_P Parameter: Plant Line Value: WS
  misc_feature: MA Experiment 20000234 PARAMETER Experiment Name: At_Siliques_P Parameter: Tissue Value: Less Than 5mm Siliques vs. Whole Plant
  misc_feature: MA Experiment ID: 20000264 Result: Down-regulated in Transcription
  misc_feature: MA Experiment 20000264 PARAMETER Experiment Name: At_Open_Flower_P Parameter: Age (day) Value: 21
  misc_feature: MA Experiment 20000264 PARAMETER Experiment Name: At_Open_Flower_P Parameter: Plant Line Value: WS
  misc_feature: MA Experiment 20000264 PARAMETER Experiment Name: At_Open_Flower_P Parameter: Tissue Value: Open Flower vs. Whole Plant
  misc_feature: MA Experiment ID: 20000265 Result: Down-regulated in Transcription
  misc_feature: MA Experiment 20000265 PARAMETER Experiment Name: At_Open_Flower_P Parameter: Age (day) Value: 21
  misc_feature: MA Experiment 20000265 PARAMETER Experiment Name: At_Open_Flower_P Parameter: Plant Line Value: WS
  misc_feature: MA Experiment 20000265 PARAMETER Experiment Name: At_Open_Flower_P Parameter: Tissue Value: Closed Flower vs. Whole Plant
  misc_feature: MA Experiment ID: 20000267 Result: Up-regulated in Transcription
  misc_feature: MA Experiment 20000267 PARAMETER Experiment Name: At_Drought_P Parameter: Age (day) Value: 7
  misc_feature: MA Experiment 20000267 PARAMETER Experiment Name: At_Drought_P Parameter: Organism Value: A. thaliana
  misc_feature: MA Experiment 20000267 PARAMETER Experiment Name: At_Drought_P Parameter: Plant Line Value: WS
  misc_feature: MA Experiment 20000267 PARAMETER Experiment Name: At_Drought_P Parameter: Timepoint (hr) Value: 6
  misc_feature: MA Experiment 20000267 PARAMETER Experiment Name: At_Drought_P Parameter: Tissue Value: Whole Plant
  misc_feature: MA Experiment 20000267 PARAMETER Experiment Name: At_Drought_P Parameter: Treatment Value: Drought vs. No Drought
  misc_feature: MA Experiment ID: 20000286 Result: Down-regulated in Transcription
  misc_feature: MA Experiment 20000286 PARAMETER Experiment Name: At_Open_Flower_P Parameter: Age (day) Value: 21
  misc_feature: MA Experiment 20000286 PARAMETER Experiment Name: At_Open_Flower_P Parameter: Plant Line Value: WS
  misc_feature: MA Experiment 20000286 PARAMETER Experiment Name: At_Open_Flower_P Parameter: Tissue Value: Half Open vs. Whole Plant
  misc_feature: MA Experiment ID: 20000288 Result: Down-regulated in Transcription
  misc_feature: MA Experiment 20000288 PARAMETER Experiment Name: At_Drought_P Parameter: Age (day) Value: 7
  misc_feature: MA Experiment 20000288 PARAMETER Experiment Name: At_Drought_P Parameter: Organism Value: A. thaliana
  misc_feature: MA Experiment 20000288 PARAMETER Experiment Name: At_Drought_P Parameter: Plant Line Value: WS
  misc_feature: MA Experiment 20000288 PARAMETER Experiment Name: At_Drought_P Parameter: Timepoint (hr) Value: 1
  misc_feature: MA Experiment 20000288 PARAMETER Experiment Name: At_Drought_P Parameter: Tissue Value: Whole Plant
  misc_feature: MA Experiment 20000288 PARAMETER Experiment Name: At_Drought_P Parameter: Treatment Value: Drought vs. No Drought
  misc_feature: MA Experiment ID: 20000439 Result: Down-regulated in Transcription
  misc_feature: MA Experiment 20000439 PARAMETER Experiment Name: At_Roots__P Parameter: Age (day) Value: 14 vs. 21
  misc_feature: MA Experiment 20000439 PARAMETER Experiment Name: At_Roots__P Parameter: Organism Value: A. thaliana
  misc_feature: MA Experiment 20000439 PARAMETER Experiment Name: At_Roots__P Parameter: Tissue Value: Roots vs. Whole Plant
  misc_feature: MA Experiment ID: 20000441 Result: Up-regulated in Transcription
  misc_feature: MA Experiment 20000441 PARAMETER Experiment Name: At_1uM_BR-BRZ__P Parameter: Tissue Value: Shoot Apices
  misc_feature: MA Experiment 20000441 PARAMETER Experiment Name: At_1uM_BR-BRZ__P Parameter: Treatment Value: 1uM BR vs. No Treatment
  misc_feature: MA Experiment ID: 20000443 Result: Up-regulated in Transcription
  misc_feature: MA Experiment 20000443 PARAMETER Experiment Name: At_1uM_BR-BRZ__P Parameter: Tissue Value: Shoot Apices
  misc_feature: MA Experiment 20000443 PARAMETER Experiment Name: At_1uM_BR-BRZ__P Parameter: Treatment Value: 1uM BRZ vs. No Treatment
  misc_feature: MA Experiment ID: 20000452 Result: Up-regulated in Transcription
  misc_feature: MA Experiment 20000452 PARAMETER Experiment Name: At_CS6879_Shoots-Roots_P Parameter: Age (day) Value: 14
  misc_feature: MA Experiment 20000452 PARAMETER Experiment Name: At_CS6879_Shoots-Roots_P Parameter: Organism Value: A. thaliana
  misc_feature: MA Experiment 20000452 PARAMETER Experiment Name: At_CS6879_Shoots-Roots_P Parameter: Plant Line Value: CS6879 vs. WS
  misc_feature: MA Experiment 20000452 PARAMETER Experiment Name: At_CS6879_Shoots-Roots_P Parameter: Tissue Value: Shoots
  misc_feature: MA Experiment ID: 20000495 Result: Down-regulated in Transcription
  misc_feature: MA Experiment 20000495 PARAMETER Experiment Name: At_Guard_Cells_P Parameter: Harvest Date Value: 8/2/2002
  misc_feature: MA Experiment 20000495 PARAMETER Experiment Name: At_Guard_Cells_P Parameter: Organism Value: A. thaliana
  misc_feature: MA Experiment 20000495 PARAMETER Experiment Name: At_Guard_Cells_P Parameter: Tissue Value: Guard Cells vs. Leaves
  misc_feature: MA Experiment ID: 20000506 Result: Down-regulated in Transcription
  misc_feature: MA Experiment 20000506 PARAMETER Experiment Name: At_Wounding_P Parameter: Organism Value: A. thaliana
  misc_feature: MA Experiment 20000506 PARAMETER Experiment Name: At_Wounding_P Parameter: Plant Line Value: WS
  misc_feature: MA Experiment 20000506 PARAMETER Experiment Name: At_Wounding_P Parameter: Timepoint (hr) Value: 6
  misc_feature: MA Experiment 20000506 PARAMETER Experiment Name: At_Wounding_P Parameter: Tissue Value: Aerial
  misc_feature: MA Experiment 20000506 PARAMETER Experiment Name: At_Wounding_P Parameter: Treatment Value: Wounding vs. No Wounding
  misc_feature: MA Experiment ID: 20000527 Result: Up-regulated in Transcription
  misc_feature: MA Experiment 20000527 PARAMETER Experiment Name: At_10percent_PEG_P Parameter: Age (day) Value: 20
  misc_feature: MA Experiment 20000527 PARAMETER Experiment Name: At_10percent_PEG_P Parameter: Organism Value: A. thaliana
  misc_feature: MA Experiment 20000527 PARAMETER Experiment Name: At_10percent_PEG_P Parameter: Plant Line Value: WS
  misc_feature: MA Experiment 20000527 PARAMETER Experiment Name: At_10percent_PEG_P Parameter: Timepoint (day) Value: 20
  misc_feature: MA Experiment 20000527 PARAMETER Experiment Name: At_10percent_PEG_P Parameter: Tissue Value: Whole Plant
  misc_feature: MA Experiment 20000527 PARAMETER Experiment Name: At_10percent_PEG_P Parameter: Treatment Value: 10percent PEG vs. No Treatment
  misc_feature: MA Experiment ID: 20000573 Result: Down-regulated in Transcription
  misc_feature: MA Experiment 20000573 PARAMETER Experiment Name: At_100uM_ABA_Mutants__P Parameter: Organism Value: A. thaliana
  misc_feature: MA Experiment 20000573 PARAMETER Experiment Name: At_100uM_ABA_Mutants__P Parameter: Plant Line Value: CS22 vs. Ler wt
  misc_feature: MA Experiment 20000573 PARAMETER Experiment Name: At_100uM_ABA_Mutants__P Parameter: Timepoint (hr) Value: N/A
  misc_feature: MA Experiment 20000573 PARAMETER Experiment Name: At_100uM_ABA_Mutants__P Parameter: Tissue Value: Whole Plant
  misc_feature: MA Experiment 20000573 PARAMETER Experiment Name: At_100uM_ABA_Mutants__P Parameter: Treatment Value: None
  misc_feature: MA Experiment ID: 20000574 Result: Down-regulated in Transcription
  misc_feature: MA Experiment 20000574 PARAMETER Experiment Name: At_100uM_ABA_Mutants__P Parameter: Organism Value: A. thaliana
  misc_feature: MA Experiment 20000574 PARAMETER Experiment Name: At_100uM_ABA_Mutants__P Parameter: Plant Line Value: CS23 vs. Ler wt
  misc_feature: MA Experiment 20000574 PARAMETER Experiment Name: At_100uM_ABA_Mutants__P Parameter: Timepoint (hr) Value: N/A
  misc_feature: MA Experiment 20000574 PARAMETER Experiment Name: At_100uM_ABA_Mutants__P Parameter: Tissue Value: Whole Plant
  misc_feature: MA Experiment 20000574 PARAMETER Experiment Name: At_100uM_ABA_Mutants__P Parameter: Treatment Value: None
  misc_feature: MA Experiment ID: 20000578 Result: Down-regulated in Transcription
  misc_feature: MA Experiment 20000578 PARAMETER Experiment Name: At_CS3726__P Parameter: Organism Value: A. thaliana
  misc_feature: MA Experiment 20000578 PARAMETER Experiment Name: At_CS3726__P Parameter: Plant Line Value: CS3726
  misc_feature: MA Experiment 20000578 PARAMETER Experiment Name: At_CS3726__P Parameter: Tissue Value: Whole Plant
  misc_feature: MA Experiment ID: 20000709 Result: Up-regulated in Transcription
  misc_feature: MA Experiment 20000709 PARAMETER Experiment Name: At_15mM_NH4NO3_L-to-H_P Parameter: Age (hr) Value: 14
  misc_feature: MA Experiment 20000709 PARAMETER Experiment Name: At_15mM_NH4NO3_L-to-H_P Parameter: Organism Value: A. thaliana
  misc_feature: MA Experiment 20000709 PARAMETER Experiment Name: At_15mM_NH4NO3_L-to-H_P Parameter: Plant Line Value: WS
  misc_feature: MA Experiment 20000709 PARAMETER Experiment Name: At_15mM_NH4NO3_L-to-H_P Parameter: Timepoint (hr) Value: 4
  misc_feature: MA Experiment 20000709 PARAMETER Experiment Name: At_15mM_NH4NO3_L-to-H_P Parameter: Tissue Value: Aerial
  misc_feature: MA Experiment 20000709 PARAMETER Experiment Name: At_15mM_NH4NO3_L-to-H_P Parameter: Treatment Value: 15mM NH4NO3 vs. 30mM Mannitol
  misc_feature: MA Experiment ID: 20000794 Result: Down-regulated in Transcription
  misc_feature: MA Experiment 20000794 PARAMETER Experiment Name: At_Petals_P Parameter: Age (day) Value: 23-25 days
  misc_feature: MA Experiment 20000794 PARAMETER Experiment Name: At_Petals_P Parameter: Plant Line Value: WS
  misc_feature: MA Experiment 20000794 PARAMETER Experiment Name: At_Petals_P Parameter: Tissue Value: Petals vs. Whole plant
  misc_feature: MA Experiment ID: 20001247 Result: Up-regulated in Transcription
  misc_feature: MA Experiment 20001247 PARAMETER Experiment Name: At_Far-red-induction_P Parameter: Age (day) Value: 7
  misc_feature: MA Experiment 20001247 PARAMETER Experiment Name: At_Far-red-induction_P Parameter: Light Value: Far-red vs. White
  misc_feature: MA Experiment 20001247 PARAMETER Experiment Name: At_Far-red-induction_P Parameter: Organism Value: A. thaliana
  misc_feature: MA Experiment 20001247 PARAMETER Experiment Name: At_Far-red-induction_P Parameter: Plant Line Value: Columbia
  misc_feature: MA Experiment 20001247 PARAMETER Experiment Name: At_Far-red-induction_P Parameter: Timepoint (hr) Value: 1
  misc_feature: MA Experiment 20001247 PARAMETER Experiment Name: At_Far-red-induction_P Parameter: Tissue Value: Whole Plant
  misc_feature: MA Experiment ID: 20001556 Result: Up-regulated in Transcription
  misc_feature: MA Experiment 20001556 PARAMETER Experiment Name: At_Drought_Soil_Dry_P Parameter: Age (day) Value: 26
  misc_feature: MA Experiment 20001556 PARAMETER Experiment Name: At_Drought_Soil_Dry_P Parameter: Organism Value: A. thaliana
  misc_feature: MA Experiment 20001556 PARAMETER Experiment Name: At_Drought_Soil_Dry_P Parameter: Plant Line Value: WS
  misc_feature: MA Experiment 20001556 PARAMETER Experiment Name: At_Drought_Soil_Dry_P Parameter: Post Timepoint (hr) Value: None
  misc_feature: MA Experiment 20001556 PARAMETER Experiment Name: At_Drought_Soil_Dry_P Parameter: Post-Treatment Value: None
  misc_feature: MA Experiment 20001556 PARAMETER Experiment Name: At_Drought_Soil_Dry_P Parameter: Timepoint (day) Value: 12
  misc_feature: MA Experiment 20001556 PARAMETER Experiment Name: At_Drought_Soil_Dry_P Parameter: Treatment Value: Drought vs. No Drought
  misc_feature: MA Experiment ID: 20001557 Result: Up-regulated in Transcription
  misc_feature: MA Experiment 20001557 PARAMETER Experiment Name: At_Drought_Soil_Dry_P Parameter: Age (day) Value: 27
  misc_feature: MA Experiment 20001557 PARAMETER Experiment Name: At_Drought_Soil_Dry_P Parameter: Organism Value: A. thaliana
  misc_feature: MA Experiment 20001557 PARAMETER Experiment Name: At_Drought_Soil_Dry_P Parameter: Plant Line Value: WS
  misc_feature: MA Experiment 20001557 PARAMETER Experiment Name: At_Drought_Soil_Dry_P Parameter: Post Timepoint (hr) Value: 3
  misc_feature: MA Experiment 20001557 PARAMETER Experiment Name: At_Drought_Soil_Dry_P Parameter: Post-Treatment Value: Re-Water vs. No Drought
  misc_feature: MA Experiment 20001557 PARAMETER Experiment Name: At_Drought_Soil_Dry_P Parameter: Timepoint (day) Value: 13
  misc_feature: MA Experiment 20001557 PARAMETER Experiment Name: At_Drought_Soil_Dry_P Parameter: Treatment Value: Drought vs. No Drought
  misc_feature: MA Experiment ID: 20001558 Result: Up-regulated in Transcription
  misc_feature: MA Experiment 20001558 PARAMETER Experiment Name: At_Drought_Soil_Dry_P Parameter: Age (day) Value: 27
  misc_feature: MA Experiment 20001558 PARAMETER Experiment Name: At_Drought_Soil_Dry_P Parameter: Organism Value: A. thaliana
  misc_feature: MA Experiment 20001558 PARAMETER Experiment Name: At_Drought_Soil_Dry_P Parameter: Plant Line Value: WS
  misc_feature: MA Experiment 20001558 PARAMETER Experiment Name: At_Drought_Soil_Dry_P Parameter: Post Timepoint (hr) Value: 6
  misc_feature: MA Experiment 20001558 PARAMETER Experiment Name: At_Drought_Soil_Dry_P Parameter: Post-Treatment Value: Re-Water vs. No Drought
  misc_feature: MA Experiment 20001558 PARAMETER Experiment Name: At_Drought_Soil_Dry_P Parameter: Timepoint (day) Value: 13
  misc_feature: MA Experiment 20001558 PARAMETER Experiment Name: At_Drought_Soil_Dry_P Parameter: Treatment Value: Drought vs. No Drought
  misc_feature: MA Experiment ID: 20001760 Result: Down-regulated in Transcription
  misc_feature: MA Experiment 20001760 PARAMETER Experiment Name: At_50mM_NH4NO3_L-to-H_P Parameter: Timepoint (hr) Value: 2
  misc_feature: MA Experiment 20001760 PARAMETER Experiment Name: At_50mM_NH4NO3_L-to-H_P Parameter: Tissue Value: Siliques
  misc_feature: MA Experiment 20001760 PARAMETER Experiment Name: At_50mM_NH4NO3_L-to-H_P Parameter: Treatment Value: 50mM NH4NO3 vs 100mM Mannitol
  misc_feature: MA Experiment ID: 20001761 Result: Down-regulated in Transcription
  misc_feature: MA Experiment 20001761 PARAMETER Experiment Name: At_50mM_NH4NO3_L-to-H_P Parameter: Timepoint (hr) Value: 4
  misc_feature: MA Experiment 20001761 PARAMETER Experiment Name: At_50mM_NH4NO3_L-to-H_P Parameter: Tissue Value: Siliques
  misc_feature: MA Experiment 20001761 PARAMETER Experiment Name: At_50mM_NH4NO3_L-to-H_P Parameter: Treatment Value: 50mM NH4NO3 vs 100mM Mannitol
  misc_feature: MA Experiment ID: 20001773 Result: Down-regulated in Transcription
  misc_feature: MA Experiment 20001773 PARAMETER Experiment Name: At_Far-red-enriched-adult_P Parameter: Age (day) Value: 30
  misc_feature: MA Experiment 20001773 PARAMETER Experiment Name: At_Far-red-enriched-adult_P Parameter: Light Value: Far-red enriched vs. White
  misc_feature: MA Experiment 20001773 PARAMETER Experiment Name: At_Far-red-enriched-adult_P Parameter: Organism Value: A. thaliana
  misc_feature: MA Experiment 20001773 PARAMETER Experiment Name: At_Far-red-enriched-adult_P Parameter: Plant Line Value: Columbia
  misc_feature: MA Experiment 20001773 PARAMETER Experiment Name: At_Far-red-enriched-adult_P Parameter: Timepoint (hr) Value: 48
  misc_feature: MA Experiment 20001773 PARAMETER Experiment Name: At_Far-red-enriched-adult_P Parameter: Tissue Value: Aerial
  misc_feature: MA Experiment ID: 20001774 Result: Down-regulated in Transcription
  misc_feature: MA Experiment 20001774 PARAMETER Experiment Name: At_Far-red-enriched-adult_P Parameter: Age (day) Value: 31
  misc_feature: MA Experiment 20001774 PARAMETER Experiment Name: At_Far-red-enriched-adult_P Parameter: Light Value: Far-red enriched vs. White
  misc_feature: MA Experiment 20001774 PARAMETER Experiment Name: At_Far-red-enriched-adult_P Parameter: Organism Value: A. thaliana
  misc_feature: MA Experiment 20001774 PARAMETER Experiment Name: At_Far-red-enriched-adult_P Parameter: Plant Line Value: Columbia
  misc_feature: MA Experiment 20001774 PARAMETER Experiment Name: At_Far-red-enriched-adult_P Parameter: Timepoint (hr) Value: 72
  misc_feature: MA Experiment 20001774 PARAMETER Experiment Name: At_Far-red-enriched-adult_P Parameter: Tissue Value: Aerial
cataaaactcaaaaatctttggtcttcaaacttcaaacacttgagaaaaaagcttttgatttcacatcttaatctaacaagtcaaacacttttcaaaccacaaaattcgtcaaagctctgaaacaaataaacattttttaatttctccctttttaatggaaatctcttctttcccatttccatacctacaagacgacgagtgttcccatttccttggtctatttcaagacatggactcttctccttctactttcggattagaaggttttaatagcaacgacaataatactaatcaaaagaaacgcccaagaaaagacgacgaaggcggtggtggtggcggcggaggaacagaagttctaggagctgttaatggtaataataaggctgcttttggagatatactcgcgacgcttctgttgttagacgaggaagctaaacagcaacaagaacagtgggattttgaatttattaaagagaagtctttacttgaagctaatcataagaagaaagtgaaaacaatggatggttattacaatcaaatgcaagatcattactctgcagctggtgaaaccgatggttcgcgttcaaaacgcgcacggaaaaccgcggttgcggctgtggtttccgcggtagcttccggggcggacacaaccggtttagctgctccggttccgaccgcggatatcgctagcggttccgggtcaggaccgagtcataggaggttatgggttaaagaacgaaccacggactggtgggacagagtaagccggcctgattttccagaagacgagtttcggcgagagttccgtatgagcaaatcgacgtttaacctaatatgcgaggagctagatacgacggtgacgaagaaaaacacgatgttaagagacgcgattccagctccaaaacgcgtaggcgtttgcgtttggcgtttggcgacaggagctccgcttcgccacgtgtcggagcgtttcggtctgggaatctcaacttgccacaaactagtcatcgaagtctgccgcgcgatctacgacgttctcatgcccaagtatctcctctggccgtcggattcagagataaactcaacgaaagccaaattcgaatcggtccacaaaataccaaacgtcgtcggatcaatctacaccacacatattccgatcatcgctccgaaagtccacgtggcggcgtattttaacaagagacacacggagaggaatcagaagacgtcgtactcgataacagtacaaggagtggtcaacgccgacgggatcttcaccgacgtttgtatcggaaacccaggatctctcaccgacgatcagatcctggagaaatcttcgctttcacggcaaagagcggcgcgtgggatgttacgtgacagctggatagttggaaactctgggtttccgttgactgattatcttcttgtaccgtacacgagacagaatctgacgtggacgcagcacgcgtttaacgagagtatcggagagattcaggggattgcgacggctgcgtttgagaggctcaaaggacggtgggcttgtttgcagaaacggacggaggtgaagcttcaggatctgccgtacgtgcttggagcttgttgtgtgttgcataacatttgtgagatgaggaaggaggagatgttgccggagttgaagtttgaggtttttgatgatgtggcggtgccggagaataatatccgatctgctagtgcggttaatacgagggatcatatctctcacaatctcttgcatcgtggacttgccgggacaagaactctataggctctgtttttcaccttttcttattttgaaactgattttttattgcaaattctttttccaaattaggaataaaaacattttagggattggttggatacagaaagaatagttgaattgagagtagaagtggctgatgatattgtttgtgttacttattagcattgtgtaatctttagttcatgtattttctatacaaattgaatctgaaacctctt

SEQ ID NO: 36463 - protein, 540 aa, Arabidopsis thaliana
  peptide (1)..(540): Ceres Seq. ID no. 13497105
  misc_feature (203)..(510): Homolog of NCBI NO: 25553597 NR Description: OJ1656_E11.28 [Oryza sativa (japonica
  misc_feature (198)..(486): Homolog of NCBI NO: 34908114 NR Description: P0031D11.14 [Oryza sativa (japonica
  misc_feature (199)..(486): Homolog of NCBI NO: 18412695 NR Description: expressed protein [Arabidopsis thaliana]
  misc_feature (143)..(529): Homolog of NCBI NO: 15233248 NR Description: expressed protein [Arabidopsis thaliana]
  misc_feature (137)..(533): Homolog of NCBI NO: 34906342 NR Description: unnamed protein product [Oryza sativa (japonica
  misc_feature (13)..(537): Homolog of NCBI NO: 21902022 NR Description: B1097D05.23 [Oryza sativa (japonica
  misc_feature (38)..(540): Homolog of NCBI NO: 15239835 NR Description: expressed protein [Arabidopsis thaliana]
  misc_feature (26)..(540): Homolog of NCBI NO: 21592524 NR Description: unknown [Arabidopsis thaliana]
  misc_feature (26)..(540): Homolog of NCBI NO: 7452044 NR Description: hypothetical protein F27B13.20 - Arabidopsis
  misc_feature (1)..(540): Homolog of NCBI NO: 30688449 NR Description: expressed protein [Arabidopsis thaliana]
MEISSFPFPYLQDDECSHFLGLFQDMDSSPSTFGLEGFNSNDNNTNQKKRPRKDDEGGGGGGGGTEVLGAVNGNNKAAFGDILATLLLLDEEAKQQQEQWDFEFIKEKSLLEANHKKKVKTMDGYYNQMQDHYSAAGETDGSRSKRARKTAVAAVVSAVASGADTTGLAAPVPTADIASGSGSGPSHRRLWVKERTTDWWDRVSRPDFPEDEFRREFRMSKSTFNLICEELDTTVTKKNTMLRDAIPAPKRVGVCVWRLATGAPLRHVSERFGLGISTCHKLVIEVCRAIYDVLMPKYLLWPSDSEINSTKAKFESVHKIPNVVGSIYTTHIPIIAPKVHVAAYFNKRHTERNQKTSYSITVQGVVNADGIFTDVCIGNPGSLTDDQILEKSSLSRQRAARGMLRDSWIVGNSGFPLTDYLLVPYTRQNLTWTQHAFNESIGEIQGIATAAFERLKGRWACLQKRTEVKLQDLPYVLGACCVLHNICEMRKEEMLPELKFEVFDDVAVPENNIRSASAVNTRDHISHNLLHRGLAGTRTL

SEQ ID NO: 36464 - protein, 515 aa, Arabidopsis thaliana
  peptide (1)..(515): Ceres Seq. ID no. 13497106
  misc_feature (178)..(485): Homolog of NCBI NO: 25553597 NR Description: OJ1656_E11.28 [Oryza sativa (japonica
  misc_feature (173)..(461): Homolog of NCBI NO: 34908114 NR Description: P0031D11.14 [Oryza sativa (japonica
  misc_feature (174)..(461): Homolog of NCBI NO: 18412695 NR Description: expressed protein [Arabidopsis thaliana]
  misc_feature (118)..(504): Homolog of NCBI NO: 15233248 NR Description: expressed protein [Arabidopsis thaliana]
  misc_feature (112)..(508): Homolog of NCBI NO: 34906342 NR Description: unnamed protein product [Oryza sativa (japonica
  misc_feature (1)..(512): Homolog of NCBI NO: 21902022 NR Description: B1097D05.23 [Oryza sativa (japonica
  misc_feature (13)..(515): Homolog of NCBI NO: 15239835 NR Description: expressed protein [Arabidopsis thaliana]
  misc_feature (1)..(515): Homolog of NCBI NO: 21592524 NR Description: unknown [Arabidopsis thaliana]
  misc_feature (1)..(515): Homolog of NCBI NO: 7452044 NR Description: hypothetical protein F27B13.20 - Arabidopsis
  misc_feature (1)..(515): Homolog of NCBI NO: 30688449 NR Description: expressed protein [Arabidopsis thaliana]
MDSSPSTFGLEGFNSNDNNTNQKKRPRKDDEGGGGGGGGTEVLGAVNGNNKAAFGDILATLLLLDEEAKQQQEQWDFEFIKEKSLLEANHKKKVKTMDGYYNQMQDHYSAAGETDGSRSKRARKTAVAAVVSAVASGADTTGLAAPVPTADIASGSGSGPSHRRLWVKERTTDWWDRVSRPDFPEDEFRREFRMSKSTFNLICEELDTTVTKKNTMLRDAIPAPKRVGVCVWRLATGAPLRHVSERFGLGISTCHKLVIEVCRAIYDVLMPKYLLWPSDSEINSTKAKFESVHKIPNVVGSIYTTHIPIIAPKVHVAAYFNKRHTERNQKTSYSITVQGVVNADGIFTDVCIGNPGSLTDDQILEKSSLSRQRAARGMLRDSWIVGNSGFPLTDYLLVPYTRQNLTWTQHAFNESIGEIQGIATAAFERLKGRWACLQKRTEVKLQDLPYVLGACCVLHNICEMRKEEMLPELKFEVFDDVAVPENNIRSASAVNTRDHISHNLLHRGLAGTRTL

SEQ ID NO: 36465 - protein, 419 aa, Arabidopsis thaliana
  peptide (1)..(419): Ceres Seq. ID no. 13497107
  misc_feature (82)..(389): Homolog of NCBI NO: 25553597 NR Description: OJ1656_E11.28 [Oryza sativa (japonica
  misc_feature (77)..(365): Homolog of NCBI NO: 34908114 NR Description: P0031D11.14 [Oryza sativa (japonica
  misc_feature (78)..(365): Homolog of NCBI NO: 18412695 NR Description: expressed protein [Arabidopsis thaliana]
  misc_feature (22)..(408): Homolog of NCBI NO: 15233248 NR Description: expressed protein [Arabidopsis thaliana]
  misc_feature (16)..(412): Homolog of NCBI NO: 34906342 NR Description: unnamed protein product [Oryza sativa (japonica
  misc_feature (1)..(416): Homolog of NCBI NO: 21902022 NR Description: B1097D05.23 [Oryza sativa (japonica
  misc_feature (1)..(419): Homolog of NCBI NO: 15239835 NR Description: expressed protein [Arabidopsis thaliana]
  misc_feature (1)..(419): Homolog of NCBI NO: 21592524 NR Description: unknown [Arabidopsis thaliana]
  misc_feature (1)..(419): Homolog of NCBI NO: 7452044 NR Description: hypothetical protein F27B13.20 - Arabidopsis
  misc_feature (1)..(419): Homolog of NCBI NO: 30688449 NR Description: expressed protein [Arabidopsis thaliana]
MDGYYNQMQDHYSAAGETDGSRSKRARKTAVAAVVSAVASGADTTGLAAPVPTADIASGSGSGPSHRRLWVKERTTDWWDRVSRPDFPEDEFRREFRMSKSTFNLICEELDTTVTKKNTMLRDAIPAPKRVGVCVWRLATGAPLRHVSERFGLGISTCHKLVIEVCRAIYDVLMPKYLLWPSDSEINSTKAKFESVHKIPNVVGSIYTTHIPIIAPKVHVAAYFNKRHTERNQKTSYSITVQGVVNADGIFTDVCIGNPGSLTDDQILEKSSLSRQRAARGMLRDSWIVGNSGFPLTDYLLVPYTRQNLTWTQHAFNESIGEIQGIATAAFERLKGRWACLQKRTEVKLQDLPYVLGACCVLHNICEMRKEEMLPELKFEVFDDVAVPENNIRSASAVNTRDHISHNLLHRGLAGTRTL

SEQ ID NO: 36466 - DNA, 1429 bp, Arabidopsis thaliana
  misc_feature (1)..(1429): Ceres Seq. ID no. 12489625
  misc_feature: MA Experiment ID: 20000169 Result: Up-regulated in Transcription
  misc_feature: MA Experiment 20000169 PARAMETER Experiment Name: At_100uM_ABA_P Parameter: Age (day) Value: 14
  misc_feature: MA Experiment 20000169 PARAMETER Experiment Name: At_100uM_ABA_P Parameter: Organism Value: A. thaliana
  misc_feature: MA Experiment 20000169 PARAMETER Experiment Name: At_100uM_ABA_P Parameter: Plant Line Value: WS
  misc_feature: MA Experiment 20000169 PARAMETER Experiment Name: At_100uM_ABA_P Parameter: Timepoint (hr) Value: 6
  misc_feature: MA Experiment 20000169 PARAMETER Experiment Name: At_100uM_ABA_P Parameter: Tissue Value: Aerial
  misc_feature: MA Experiment 20000169 PARAMETER Experiment Name: At_100uM_ABA_P Parameter: Treatment Value: 100uM ABA vs. No Treatment
  misc_feature: MA Experiment ID: 20000184 Result: Down-regulated in Transcription
  misc_feature: MA Experiment 20000184 PARAMETER Experiment Name: At_Shoots__P Parameter: Age (day) Value: 7
  misc_feature: MA Experiment 20000184 PARAMETER Experiment Name: At_Shoots__P Parameter: Tissue Value: Shoots vs. Whole Plant
  misc_feature: MA Experiment ID: 20000185 Result: Down-regulated in Transcription
  misc_feature: MA Experiment 20000185 PARAMETER Experiment Name: At_Roots__P Parameter: Age (day) Value: 7 vs. 21
  misc_feature: MA Experiment 20000185 PARAMETER Experiment Name: At_Roots__P Parameter: Organism Value: A. thaliana
  misc_feature: MA Experiment 20000185 PARAMETER Experiment Name: At_Roots__P Parameter: Tissue Value: Roots vs. Whole Plant
  misc_feature: MA Experiment ID: 20000234 Result: Down-regulated in Transcription
  misc_feature: MA Experiment 20000234 PARAMETER Experiment Name: At_Siliques_P Parameter: Age (day) Value: 21
  misc_feature: MA Experiment 20000234 PARAMETER Experiment Name: At_Siliques_P Parameter: Organism Value: A. thaliana
  misc_feature: MA Experiment 20000234 PARAMETER Experiment Name: At_Siliques_P Parameter: Plant Line Value: WS
  misc_feature: MA Experiment 20000234 PARAMETER Experiment Name: At_Siliques_P Parameter: Tissue Value: Less Than 5mm Siliques vs. Whole Plant
  misc_feature: MA Experiment ID: 20000235 Result: Down-regulated in Transcription
  misc_feature: MA Experiment 20000235 PARAMETER Experiment Name: At_Siliques_P Parameter: Age (day) Value: 21
  misc_feature: MA Experiment 20000235 PARAMETER Experiment Name: At_Siliques_P Parameter: Organism Value: A. thaliana
  misc_feature: MA Experiment 20000235 PARAMETER Experiment Name: At_Siliques_P Parameter: Plant Line Value: WS
  misc_feature: MA Experiment 20000235 PARAMETER Experiment Name: At_Siliques_P Parameter: Tissue Value: 5-10mm Siliques vs. Whole Plant
  misc_feature: MA Experiment ID: 20000439 Result: Down-regulated in Transcription
  misc_feature: MA Experiment 20000439 PARAMETER Experiment Name: At_Roots__P Parameter: Age (day) Value: 14 vs. 21
  misc_feature: MA Experiment 20000439 PARAMETER Experiment Name: At_Roots__P Parameter: Organism Value: A. thaliana
  misc_feature: MA Experiment 20000439 PARAMETER Experiment Name: At_Roots__P Parameter: Tissue Value: Roots vs. Whole Plant
  misc_feature: MA Experiment ID: 20000496 Result: Down-regulated in Transcription
  misc_feature: MA Experiment 20000496 PARAMETER Experiment Name: At_Guard_Cells_P Parameter: Harvest Date Value: 7/19/2002
  misc_feature: MA Experiment 20000496 PARAMETER Experiment Name: At_Guard_Cells_P Parameter: Organism Value: Canola
  misc_feature: MA Experiment 20000496 PARAMETER Experiment Name: At_Guard_Cells_P Parameter: Tissue Value: Guard Cells vs. Leaves
  misc_feature: MA Experiment ID: 20000794 Result: Up-regulated in Transcription
  misc_feature: MA Experiment 20000794 PARAMETER Experiment Name: At_Petals_P Parameter: Age (day) Value: 23-25 days
  misc_feature: MA Experiment 20000794 PARAMETER Experiment Name: At_Petals_P Parameter: Plant Line Value: WS
  misc_feature: MA Experiment 20000794 PARAMETER Experiment Name: At_Petals_P Parameter: Tissue Value: Petals vs. Whole plant
  misc_feature: MA Experiment ID: 20001557 Result: Down-regulated in Transcription
  misc_feature: MA Experiment 20001557 PARAMETER Experiment Name: At_Drought_Soil_Dry_P Parameter: Age (day) Value: 27
  misc_feature: MA Experiment 20001557 PARAMETER Experiment Name: At_Drought_Soil_Dry_P Parameter: Organism Value: A. thaliana
  misc_feature: MA Experiment 20001557 PARAMETER Experiment Name: At_Drought_Soil_Dry_P Parameter: Plant Line Value: WS
  misc_feature: MA Experiment 20001557 PARAMETER Experiment Name: At_Drought_Soil_Dry_P Parameter: Post Timepoint (hr) Value: 3
  misc_feature: MA Experiment 20001557 PARAMETER Experiment Name: At_Drought_Soil_Dry_P Parameter: Post-Treatment Value: Re-Water vs. No Drought
  misc_feature: MA Experiment 20001557 PARAMETER Experiment Name: At_Drought_Soil_Dry_P Parameter: Timepoint (day) Value: 13
  misc_feature: MA Experiment 20001557 PARAMETER Experiment Name: At_Drought_Soil_Dry_P Parameter: Treatment Value: Drought vs. No Drought
  misc_feature: MA Experiment ID: 20001558 Result: Down-regulated in Transcription
  misc_feature: MA Experiment 20001558 PARAMETER Experiment Name: At_Drought_Soil_Dry_P Parameter: Age (day) Value: 27
  misc_feature: MA Experiment 20001558 PARAMETER Experiment Name: At_Drought_Soil_Dry_P Parameter: Organism Value: A. thaliana
  misc_feature: MA Experiment 20001558 PARAMETER Experiment Name: At_Drought_Soil_Dry_P Parameter: Plant Line Value: WS
  misc_feature: MA Experiment 20001558 PARAMETER Experiment Name: At_Drought_Soil_Dry_P Parameter: Post Timepoint (hr) Value: 6
  misc_feature: MA Experiment 20001558 PARAMETER Experiment Name: At_Drought_Soil_Dry_P Parameter: Post-Treatment Value: Re-Water vs. No Drought
  misc_feature: MA Experiment 20001558 PARAMETER Experiment Name: At_Drought_Soil_Dry_P Parameter: Timepoint (day) Value: 13
  misc_feature: MA Experiment 20001558 PARAMETER Experiment Name: At_Drought_Soil_Dry_P Parameter: Treatment Value: Drought vs. No Drought
  misc_feature: MA Experiment ID: 20001757 Result: Down-regulated in Transcription
  misc_feature: MA Experiment 20001757 PARAMETER Experiment Name: At_50mM_NH4NO3_L-to-H_P Parameter: Timepoint (hr) Value: 6
  misc_feature: MA Experiment 20001757 PARAMETER Experiment Name: At_50mM_NH4NO3_L-to-H_P Parameter: Tissue Value: Leaf
  misc_feature: MA Experiment 20001757 PARAMETER Experiment Name: At_50mM_NH4NO3_L-to-H_P Parameter: Treatment Value: 50mM NH4NO3 vs 100mM Mannitol
aaaatctcctccaactccgagttatggctacatgttccctcttaccaccaccgtctttttctccgcgccggcgattctgtagtttttctcacaatcgccggtctctaccttcaatattcagtttcaacaaagagcgtgtctcacgaagagtcttctgtagctccaaagagaacgatataaacagagatcggaatcagtctacaggaattcaagtctacggcgaaatcgagaggttattaacagagactgtaaaaaattctcagagtagctccggtggatcctctgattggtcagaagttgagggagcatgggtgctgaaaccaagaaactcgaaaccgaagatggttgttcatttcattggcggtatatttgtcggtgcagcaccacagcttacttatcgattgtttctcgagagattagcggagaaggatgttttggttattgcgacaccatatgctagtggttttgaccacttcaatattgcagatgaagtacaatttaagtatgatagatgttgccgatctctacaagaagaagtgcaggatcttccgtcttttgggatcggtcattcactgggatctgttattcaccttctgattggatcaaggtatgctgttcagcgaaatgggaacgtatttatggcattcaacaacaaggaagcaagcttagctattcctttgttctccccagttcttgtcccgatggctcaaagccttggaccactgttgtcacaggtggcaacatccccaacaatccgccttggggcagagatgacgcgaaagcaattagaaacgcttagccctcccatcatgaagcaaattctgcctttagtggaacagctccctcccttgtacatggacttagtaaagggaagagaagattttgttccaaaaccagaagaaacaagacgccttataagatcctactatggaatctctaggaatctgttgataaaattcgaggatgattcaatagatgaaacatcaatcctagctcaggtgcttggtgtggaatcatccataagctcaaagctagacatgtctatccgtacactgcccggagatcacggtctccctctgcaacaggctcttccggatgttccaccaggaatggcagaagcggtgaatcgaggaagtgagtttttagcgaatattgctgtcgggactccgtgggaatctatggctaaagaggttggaggttcgctgggaatggactcgaagatccttcgtgctgacatgtccaaagatcttgcgcagctcgttgatgcaatcacttcttggatgatttcaaatatgggtccaaagcttctgagaccataatgttttctcatgtacacaaaacatacaaaaatctattaacacagggcgattgcatactatttaatgtaatgtaactgtatatattataacatgaagagtttggttataca

SEQ ID NO: 36467 - protein, 438 aa, Arabidopsis thaliana
  peptide (1)..(438): Ceres Seq. ID no. 12489626
  misc_feature (95)..(288): Homolog of NCBI NO: 23129803 NR Description: hypothetical protein [Nostoc punctiforme]
  misc_feature (95)..(288): Homolog of NCBI NO: 17228580 NR Description: hypothetical protein [Nostoc sp. PCC 7120]
  misc_feature (271)..(363): Homolog of NCBI NO: 23039808 NR Description: hypothetical protein [Trichodesmium erythraeum
  misc_feature (95)..(230): Homolog of NCBI NO: 23039808 NR Description: hypothetical protein [Trichodesmium erythraeum
  misc_feature (251)..(361): Homolog of NCBI NO: 16329812 NR Description: hypothetical protein [Synechocystis sp. PCC 6803]
  misc_feature (95)..(225): Homolog of NCBI NO: 16329812 NR Description: hypothetical protein [Synechocystis sp. PCC 6803]
  misc_feature (177)..(425): Homolog of NCBI NO: 38569178 NR Description: OJ000315_02.20 [Oryza sativa (japonica
  misc_feature (264)..(437): Homolog of NCBI NO: 38347589 NR Description: OSJNBa0042I15.2 [Oryza sativa (japonica
  misc_feature (15)..(256): Homolog of NCBI NO: 38347589 NR Description: OSJNBa0042I15.2 [Oryza sativa (japonica
  misc_feature (8)..(438): Homolog of NCBI NO: 15238825 NR Description: putative protein
NLLQLRVMATCSLLPPPSFSPRRRFCSFSHNRRSLPSIFSFNKERVSRRVFCSSKENDINRDRNQSTGIQVYGEIERLLTETVKNSQSSSGGSSDWSEVEGAWVLKPRNSKPKMVVHFIGGIFVGAAPQLTYRLFLERLAEKDVLVIATPYASGFDHFNIADEVQFKYDRCCRSLQEEVQDLPSFGIGHSLGSVIHLLIGSRYAVQRNGNVFMAFNNKEASLAIPLFSPVLVPMAQSLGPLLSQVATSPTIRLGAEMTRKQLETLSPPIMKQILPLVEQLPPLYMDLVKGREDFVPKPEETRRLIRSYYGISRNLLIKFEDDSIDETSILAQVLGVESSISSKLDMSIRTLPGDHGLPLQQALPDVPPGMAEAVNRGSEFLANIAVGTPWESMAKEVGGSLGMDSKILRADMSKDLAQLVDAITSWMISNMGPKLLRP

SEQ ID NO: 36468 - protein, 431 aa, Arabidopsis thaliana
  peptide (1)..(431): Ceres Seq. ID no. 12489627
  misc_feature (88)..(281): Homolog of NCBI NO: 23129803 NR Description: hypothetical protein [Nostoc punctiforme]
  misc_feature (88)..(281): Homolog of NCBI NO: 17228580 NR Description: hypothetical protein [Nostoc sp. PCC 7120]
  misc_feature (264)..(356): Homolog of NCBI NO: 23039808 NR Description: hypothetical protein [Trichodesmium erythraeum
  misc_feature (88)..(223): Homolog of NCBI NO: 23039808 NR Description: hypothetical protein [Trichodesmium erythraeum
  misc_feature (244)..(354): Homolog of NCBI NO: 16329812 NR Description: hypothetical protein [Synechocystis sp. PCC 6803]
  misc_feature (88)..(218): Homolog of NCBI NO: 16329812 NR Description: hypothetical protein [Synechocystis sp. PCC 6803]
  misc_feature (170)..(418): Homolog of NCBI NO: 38569178 NR Description: OJ000315_02.20 [Oryza sativa (japonica
  misc_feature (257)..(430): Homolog of NCBI NO: 38347589 NR Description: OSJNBa0042I15.2 [Oryza sativa (japonica
  misc_feature (8)..(249): Homolog of NCBI NO: 38347589 NR Description: OSJNBa0042I15.2 [Oryza sativa (japonica
  misc_feature (1)..(431): Homolog of NCBI NO: 15238825 NR Description: putative protein
MATCSLLPPPSFSPRRRFCSFSHNRRSLPSIFSFNKERVSRRVFCSSKENDINRDRNQSTGIQVYGEIERLLTETVKNSQSSSGGSSDWSEVEGAWVLKPRNSKPKMVVHFIGGIFVGAAPQLTYRLFLERLAEKDVLVIATPYASGFDHFNIADEVQFKYDRCCRSLQEEVQDLPSFGIGHSLGSVIHLLIGSRYAVQRNGNVFMAFNNKEASLAIPLFSPVLVPMAQSLGPLLSQVATSPTIRLGAEMTRKQLETLSPPIMKQILPLVEQLPPLYMDLVKGREDFVPKPEETRRLIRSYYGISRNLLIKFEDDSIDETSILAQVLGVESSISSKLDMSIRTLPGDHGLPLQQALPDVPPGMAEAVNRGSEFLANIAVGTPWESMAKEVGGSLGMDSKILRADMSKDLAQLVDAITSWMISNMGPKLLRP

SEQ ID NO: 36469 - protein, 325 aa, Arabidopsis thaliana
  peptide (1)..(325): Ceres Seq. ID no. 12489628
  misc_feature (1)..(175): Homolog of NCBI NO: 23129803 NR Description: hypothetical protein [Nostoc punctiforme]
  misc_feature (1)..(175): Homolog of NCBI NO: 17228580 NR Description: hypothetical protein [Nostoc sp. PCC 7120]
  misc_feature (158)..(250): Homolog of NCBI NO: 23039808 NR Description: hypothetical protein [Trichodesmium erythraeum
  misc_feature (1)..(117): Homolog of NCBI NO: 23039808 NR Description: hypothetical protein [Trichodesmium erythraeum
  misc_feature (138)..(248): Homolog of NCBI NO: 16329812 NR Description: hypothetical protein [Synechocystis sp. PCC 6803]
  misc_feature (1)..(112): Homolog of NCBI NO: 16329812 NR Description: hypothetical protein [Synechocystis sp. PCC 6803]
  misc_feature (64)..(312): Homolog of NCBI NO: 38569178 NR Description: OJ000315_02.20 [Oryza sativa (japonica
  misc_feature (151)..(324): Homolog of NCBI NO: 38347589 NR Description: OSJNBa0042I15.2 [Oryza sativa (japonica
  misc_feature (1)..(143): Homolog of NCBI NO: 38347589 NR Description: OSJNBa0042I15.2 [Oryza sativa (japonica
  misc_feature (1)..(325): Homolog of NCBI NO: 15238825 NR Description: putative protein
MVVHFIGGIFVGAAPQLTYRLFLERLAEKDVLVIATPYASGFDHFNIADEVQFKYDRCCRSLQEEVQDLPSFGIGHSLGSVIHLLIGSRYAVQRNGNVFMAFNNKEASLAIPLFSPVLVPMAQSLGPLLSQVATSPTIRLGAEMTRKQLETLSPPIMKQILPLVEQLPPLYMDLVKGREDFVPKPEETRRLIRSYYGISRNLLIKFEDDSIDETSILAQVLGVESSISSKLDMSIRTLPGDHGLPLQQALPDVPPGMAEAVNRGSEFLANIAVGTPWESMAKEVGGSLGMDSKILRADMSKDLAQLVDAITSWMISNMGPKLLRP

SEQ ID NO: 36470 - DNA, 618 bp, Arabidopsis thaliana
  misc_feature (1)..(618): Ceres Seq. ID no. 12603263
  misc_feature: MA Experiment ID: 20000439 Result: Down-regulated in Transcription
  misc_feature: MA Experiment 20000439 PARAMETER Experiment Name: At_Roots__P Parameter: Age (day) Value: 14 vs. 21
  misc_feature: MA Experiment 20000439 PARAMETER Experiment Name: At_Roots__P Parameter: Organism Value: A. thaliana
  misc_feature: MA Experiment 20000439 PARAMETER Experiment Name: At_Roots__P Parameter: Tissue Value: Roots vs. Whole Plant
  misc_feature: MA Experiment ID: 20001905 Result: Down-regulated in Transcription
  misc_feature: MA Experiment 20001905 PARAMETER Experiment Name: At_Drought_Reproduction_P Parameter: Age (day) Value: 40
  misc_feature: MA Experiment 20001905 PARAMETER Experiment Name: At_Drought_Reproduction_P Parameter: Organism Value: A. thaliana
  misc_feature: MA Experiment 20001905 PARAMETER Experiment Name: At_Drought_Reproduction_P Parameter: Plant Line Value: WS
  misc_feature: MA Experiment 20001905 PARAMETER Experiment Name: At_Drought_Reproduction_P Parameter: Timepoint (day) Value: 10
  misc_feature: MA Experiment 20001905 PARAMETER Experiment Name: At_Drought_Reproduction_P Parameter: Tissue Value: Rosettes
  misc_feature: MA Experiment 20001905 PARAMETER Experiment Name: At_Drought_Reproduction_P Parameter: Treatment Value: Drought vs. No Drought
atcctaatcgaaaaattggttggatcatacacattgtgacaagaaacagttatttggctcatgagagaagaatgttgctttttgtgctttagagtaaacatatcttgattctctataccatcagataacgattttggttatcactagcattgatattctacgattttagatagttcaagtggtcaatgactcgacatgggactctctagttcttaaagcaactgggcctgtagttgtcgacttttgggcaccatggtgtggaccttgcaagatgattgatccgcttgtaaacgatctagcacagcattacactgggaagatcaagttctacaaattaaacactgatgaatctcctaatactcccggccagtacggagttagaagcatcccaacgatcatgatctttgtcggtggcgagaagaaggatacaatcataggtgcagtgcccaaaaccacactcacatctagcctcgacaagttcttgccatgaaatatcacttgtggagtctgtaagatctcgtatctctctgtctctcgttcttgttctcattatctctgtaactcattatcactgaacatctagacctggataaataatatgatgtcatgtcttatgtc

SEQ ID NO: 36471 - protein, 72 aa, Arabidopsis thaliana
  peptide (1)..(72): Ceres Seq. ID no. 12603264
  misc_feature (1)..(71): Homolog of NCBI NO: 21354 NR Description: thioredoxin M precursor (AA -67 to 114) [Spinacia
  misc_feature (1)..(71): Homolog of NCBI NO: 15232567 NR Description: thioredoxin m4
  misc_feature (1)..(71): Homolog of NCBI NO: 6539614 NR Description: thioredoxin m4 [Arabidopsis thaliana]
  misc_feature (1)..(71): Homolog of NCBI NO: 1388088 NR Description: thioredoxin m
  misc_feature (1)..(71): Homolog of NCBI NO: 1351239 NR Description: Thioredoxin M-type, chloroplast precursor (TRX-M)
  misc_feature (1)..(71): Homolog of NCBI NO: 30678634 NR Description: thioredoxin M-type 1, chloroplast precursor
  misc_feature (1)..(71): Homolog of NCBI NO: 11135407 NR Description: Thioredoxin M-type, chloroplast precursor (TRX-M)
  misc_feature (1)..(72): Homolog of NCBI NO: 21618235 NR Description: putative M-type thioredoxin [Arabidopsis thaliana]
  misc_feature (1)..(72): Homolog of NCBI NO: 6539610 NR Description: thioredoxin m2 [Arabidopsis thaliana]
  misc_feature (1)..(72): Homolog of NCBI NO: 15236327 NR Description: putative M-type thioredoxin
MIDPLVNDLAQHYTGKIKFYKLNTDESPNTPGQYGVRSIPTIMIFVGGEKKDTIIGAVPKTTLTSSLDKFLP

SEQ ID NO: 36472 - DNA, 1226 bp, Arabidopsis thaliana
  misc_feature (1)..(1226): Ceres Seq. ID no. 12330458
  misc_feature: MA Experiment ID: 108435 Result: Down-regulated in Transcription
  misc_feature: MA Experiment 108435 PARAMETER Experiment Name: At_stm_Mutants_cDNA_P Parameter: Plant Line Value: wt Landsburg vs stm
  misc_feature: MA Experiment 108435 PARAMETER Experiment Name: At_stm_Mutants_cDNA_P Parameter: Tissue Value: Shoot Apical Meristem Region
  misc_feature: MA Experiment ID: 108473 Result: Up-regulated in Transcription
  misc_feature: MA Experiment 108473 PARAMETER Experiment Name: At_Drought_Flowers_cDNA_P Parameter: Timepoint (hr) Value: 7 d
  misc_feature: MA Experiment 108473 PARAMETER Experiment Name: At_Drought_Flowers_cDNA_P Parameter: Tissue Value: Flower
  misc_feature: MA Experiment 108473 PARAMETER Experiment Name: At_Drought_Flowers_cDNA_P Parameter: Treatment Value: Drought vs. No Drought
  misc_feature: MA Experiment ID: 108488 Result: Down-regulated in Transcription
  misc_feature: MA Experiment ID: 108501 Result: Down-regulated in Transcription
  misc_feature: MA Experiment 108501 PARAMETER Experiment Name: At_ap2_floral_buds_cDNA_P Parameter: Plant Line Value: ap2 (Ler.)
  misc_feature: MA Experiment 108501 PARAMETER Experiment Name: At_ap2_floral_buds_cDNA_P Parameter: Tissue Value: Closed Flower
  misc_feature: MA Experiment ID: 108573 Result: Up-regulated in Transcription
  misc_feature: MA Experiment 108573 PARAMETER Experiment Name: At_Drought_cDNA_P Parameter: Timepoint (hr) Value: 6
  misc_feature: MA Experiment 108573 PARAMETER Experiment Name: At_Drought_cDNA_P Parameter: Tissue Value: Aerial
  misc_feature: MA Experiment 108573 PARAMETER Experiment Name: At_Drought_cDNA_P Parameter: Treatment Value: Drought vs. No Drought
  misc_feature: MA Experiment ID: 108574 Result: Down-regulated in Transcription
  misc_feature: MA Experiment 108574 PARAMETER Experiment Name: At_Wounding__cDNA_P Parameter: Timepoint (hr) Value: 1
  misc_feature: MA Experiment 108574 PARAMETER Experiment Name: At_Wounding__cDNA_P Parameter: Tissue Value: Aerial
  misc_feature: MA Experiment 108574 PARAMETER Experiment Name: At_Wounding__cDNA_P Parameter: Treatment Value: Wounding vs. No Wounding
  misc_feature: MA Experiment ID: 108576 Result: Up-regulated in Transcription
  misc_feature: MA Experiment 108576 PARAMETER Experiment Name: At_42deg_Heat_cDNA_P Parameter: Temperature (deg C) Value: 42 vs. 22
  misc_feature: MA Experiment 108576 PARAMETER Experiment Name: At_42deg_Heat_cDNA_P Parameter: Timepoint (hr) Value: 1
  misc_feature: MA Experiment 108576 PARAMETER Experiment Name: At_42deg_Heat_cDNA_P Parameter: Tissue Value: Aerial
  misc_feature: MA Experiment ID: 108577 Result: Up-regulated in Transcription
  misc_feature: MA Experiment 108577 PARAMETER Experiment Name: At_42deg_Heat_cDNA_P Parameter: Temperature (deg C) Value: 42 vs. 22
  misc_feature: MA Experiment 108577 PARAMETER Experiment Name: At_42deg_Heat_cDNA_P Parameter: Timepoint (hr) Value: 6
  misc_feature: MA Experiment 108577 PARAMETER Experiment Name: At_42deg_Heat_cDNA_P Parameter: Tissue Value: Aerial
  misc_feature: MA Experiment ID: 108579 Result: Down-regulated in Transcription
  misc_feature: MA Experiment 108579 PARAMETER Experiment Name: At_4deg_Cold_cDNA_P Parameter: Temperature (deg C) Value: 4 vs. 22
  misc_feature: MA Experiment 108579 PARAMETER Experiment Name: At_4deg_Cold_cDNA_P Parameter: Timepoint (hr) Value: 6
  misc_feature: MA Experiment 108579 PARAMETER Experiment Name: At_4deg_Cold_cDNA_P Parameter: Tissue Value: Aerial
  misc_feature: MA Experiment ID: 108585 Result: Up-regulated in Transcription
  misc_feature: MA Experiment 108585 PARAMETER Experiment Name: At_5mM_NaNP_cDNA_P Parameter: Timepoint (hr) Value: 6
  misc_feature: MA Experiment 108585 PARAMETER Experiment Name: At_5mM_NaNP_cDNA_P Parameter: Tissue Value: Aerial
  misc_feature: MA Experiment 108585 PARAMETER Experiment Name: At_5mM_NaNP_cDNA_P Parameter: Treatment Value: null
  misc_feature: MA Experiment ID: 108595 Result: Up-regulated in Transcription
  misc_feature: MA Experiment 108595 PARAMETER Experiment Name: At_Ler-pi_Ovule_cDNA_P Parameter: Plant Line Value: null
  misc_feature: MA Experiment ID: 20000070 Result: Up-regulated in Transcription
  misc_feature: MA Experiment 20000070 PARAMETER Experiment Name: At_100uM_ABA_Mutants_cDNA_P Parameter: Plant Line Value: CS24
  misc_feature: MA Experiment 20000070 PARAMETER Experiment Name: At_100uM_ABA_Mutants_cDNA_P Parameter: Timepoint (hr) Value: 6
  misc_feature: MA Experiment 20000070 PARAMETER Experiment Name: At_100uM_ABA_Mutants_cDNA_P Parameter: Tissue Value: Aerial
  misc_feature: MA Experiment 20000070 PARAMETER Experiment Name: At_100uM_ABA_Mutants_cDNA_P Parameter: Treatment Value: 100uM ABA vs. No Treatment
  misc_feature: MA Experiment ID: 20000071 Result: Up-regulated in Transcription
  misc_feature: MA Experiment 20000071 PARAMETER Experiment Name: At_100uM_ABA_Mutants_cDNA_P Parameter: Plant Line Value: CS8104
  misc_feature: MA Experiment 20000071 PARAMETER Experiment Name: At_100uM_ABA_Mutants_cDNA_P Parameter: Timepoint (hr) Value: 6
  misc_feature: MA Experiment 20000071 PARAMETER Experiment Name: At_100uM_ABA_Mutants_cDNA_P Parameter: Tissue Value: Aerial
  misc_feature: MA Experiment 20000071 PARAMETER Experiment Name: At_100uM_ABA_Mutants_cDNA_P Parameter: Treatment Value: 100uM ABA vs. No Treatment
  misc_feature: MA Experiment ID: 20000089 Result: Up-regulated in Transcription
  misc_feature: MA Experiment ID: 20000090 Result: Up-regulated in Transcription
  misc_feature: MA Experiment ID: 20000093 Result: Up-regulated in Transcription
  misc_feature: MA Experiment 20000093 PARAMETER Experiment Name: At_42deg_Heat_cDNA_P Parameter: Temperature (deg C) Value: 42 vs. 22
  misc_feature: MA Experiment 20000093 PARAMETER Experiment Name: At_42deg_Heat_cDNA_P Parameter: Timepoint (hr) Value: 0.5
  misc_feature: MA Experiment 20000093 PARAMETER Experiment Name: At_42deg_Heat_cDNA_P Parameter: Tissue Value: Aerial
  misc_feature: MA Experiment ID: 20000112 Result: Up-regulated in Transcription
  misc_feature: MA Experiment 20000112 PARAMETER Experiment Name: At_42deg_Heat_cDNA_P Parameter: Temperature (deg C) Value: 42 vs. 22
  misc_feature: MA Experiment 20000112 PARAMETER Experiment Name: At_42deg_Heat_cDNA_P Parameter: Timepoint (hr) Value: 2
  misc_feature: MA Experiment 20000112 PARAMETER Experiment Name: At_42deg_Heat_cDNA_P Parameter: Tissue Value: Aerial
  misc_feature: MA Experiment ID: 20000113 Result: Up-regulated in Transcription
  misc_feature: MA Experiment 20000113 PARAMETER Experiment Name: At_42deg_Heat_cDNA_P Parameter: Temperature (deg C) Value: 42 vs. 22
  misc_feature: MA Experiment 20000113 PARAMETER Experiment Name: At_42deg_Heat_cDNA_P Parameter: Timepoint (hr) Value: 8
  misc_feature: MA Experiment 20000113 PARAMETER Experiment Name: At_42deg_Heat_cDNA_P Parameter: Tissue Value: Aerial
  misc_feature: MA Experiment ID: 20000171 Result: Up-regulated in Transcription
  misc_feature: MA Experiment 20000171 PARAMETER Experiment Name: At_42deg_Heat_P Parameter: Age (day) Value: 14
  misc_feature: MA Experiment 20000171 PARAMETER Experiment Name: At_42deg_Heat_P Parameter: Organism Value: A. thaliana
  misc_feature: MA Experiment 20000171 PARAMETER Experiment Name: At_42deg_Heat_P Parameter: Plant Line Value: WS
  misc_feature: MA Experiment 20000171 PARAMETER Experiment Name: At_42deg_Heat_P Parameter: Temperature (deg C) Value: 42 vs. 22
  misc_feature: MA Experiment 20000171 PARAMETER Experiment Name: At_42deg_Heat_P Parameter: Timepoint (hr) Value: 1
  misc_feature: MA Experiment 20000171 PARAMETER Experiment Name: At_42deg_Heat_P Parameter: Tissue Value: Aerial
  misc_feature: MA Experiment ID: 20000173 Result: Up-regulated in Transcription
  misc_feature: MA Experiment 20000173 PARAMETER Experiment Name: At_42deg_Heat_P Parameter: Age (day) Value: 14
  misc_feature: MA Experiment 20000173 PARAMETER Experiment Name: At_42deg_Heat_P Parameter: Organism Value: A. thaliana
  misc_feature: MA Experiment 20000173 PARAMETER Experiment Name: At_42deg_Heat_P Parameter: Plant Line Value: WS
  misc_feature: MA Experiment 20000173 PARAMETER Experiment Name: At_42deg_Heat_P Parameter: Temperature (deg C) Value: 42 vs. 22
  misc_feature: MA Experiment 20000173 PARAMETER Experiment Name: At_42deg_Heat_P Parameter: Timepoint (hr) Value: 6
  misc_feature: MA Experiment 20000173 PARAMETER Experiment Name: At_42deg_Heat_P Parameter: Tissue Value: Aerial
  misc_feature: MA Experiment ID: 20000185 Result: Down-regulated in Transcription
  misc_feature: MA Experiment 20000185 PARAMETER Experiment Name: At_Roots__P Parameter: Age (day) Value: 7 vs. 21
  misc_feature: MA Experiment 20000185 PARAMETER Experiment Name: At_Roots__P Parameter: Organism Value: A. thaliana
  misc_feature: MA Experiment 20000185 PARAMETER Experiment Name: At_Roots__P Parameter: Tissue Value: Roots vs. Whole Plant
  misc_feature: MA Experiment ID: 20000224 Result: Down-regulated in Transcription
  misc_feature: MA Experiment ID: 20000227 Result: Down-regulated in Transcription
  misc_feature: MA Experiment 20000227 PARAMETER Experiment Name: At_Root-Tips-vs-Tops_P Parameter: Tissue Value: Root Tips vs. Root Tops
  misc_feature: MA Experiment ID: 20000234 Result: Down-regulated in Transcription
  misc_feature: MA Experiment 20000234 PARAMETER Experiment Name: At_Siliques_P Parameter: Age (day) Value: 21
  misc_feature: MA Experiment 20000234 PARAMETER Experiment Name: At_Siliques_P Parameter: Organism Value: A. thaliana
  misc_feature: MA Experiment 20000234 PARAMETER Experiment Name: At_Siliques_P Parameter: Plant Line Value: WS
  misc_feature: MA Experiment 20000234 PARAMETER Experiment Name: At_Siliques_P Parameter: Tissue Value: Less Than 5mm Siliques vs. Whole Plant
  misc_feature: MA Experiment ID: 20000264 Result: Down-regulated in Transcription
  misc_feature: MA Experiment 20000264 PARAMETER Experiment Name: At_Open_Flower_P Parameter: Age (day) Value: 21
  misc_feature: MA Experiment 20000264 PARAMETER Experiment Name: At_Open_Flower_P Parameter: Plant Line Value: WS
  misc_feature: MA Experiment 20000264 PARAMETER Experiment Name: At_Open_Flower_P Parameter: Tissue Value: Open Flower vs. Whole Plant
  misc_feature: MA Experiment ID: 20000265 Result: Down-regulated in Transcription
  misc_feature: MA Experiment 20000265 PARAMETER Experiment Name: At_Open_Flower_P Parameter: Age (day) Value: 21
  misc_feature: MA Experiment 20000265 PARAMETER Experiment Name: At_Open_Flower_P Parameter: Plant Line Value: WS
  misc_feature: MA Experiment 20000265 PARAMETER Experiment Name: At_Open_Flower_P Parameter: Tissue Value: Closed Flower vs. Whole Plant
  misc_feature: MA Experiment ID: 20000286 Result: Down-regulated in Transcription
  misc_feature: MA Experiment 20000286 PARAMETER Experiment Name: At_Open_Flower_P Parameter: Age (day) Value: 21
  misc_feature: MA Experiment 20000286 PARAMETER Experiment Name: At_Open_Flower_P Parameter: Plant Line Value: WS
  misc_feature: MA Experiment 20000286 PARAMETER Experiment Name: At_Open_Flower_P Parameter: Tissue Value: Half Open vs. Whole Plant
  misc_feature: MA Experiment ID: 20000436 Result: Up-regulated in Transcription
  misc_feature: MA Experiment 20000436 PARAMETER Experiment Name: At_Drought_P Parameter: Age (day) Value: 7
  misc_feature: MA Experiment 20000436 PARAMETER Experiment Name: At_Drought_P Parameter: Organism Value: A. thaliana
  misc_feature: MA Experiment 20000436 PARAMETER Experiment Name: At_Drought_P Parameter: Plant Line Value: WS
  misc_feature: MA Experiment 20000436 PARAMETER Experiment Name: At_Drought_P Parameter: Timepoint (hr) Value: 12
  misc_feature: MA Experiment 20000436 PARAMETER Experiment Name: At_Drought_P Parameter: Tissue Value: Whole Plant
  misc_feature: MA Experiment 20000436 PARAMETER Experiment Name: At_Drought_P Parameter: Treatment Value: Drought vs. No Drought
  misc_feature: MA Experiment ID: 20000437 Result: Up-regulated in Transcription
  misc_feature: MA Experiment 20000437 PARAMETER Experiment Name: At_Drought_P Parameter: Age (day) Value: 8
  misc_feature: MA Experiment 20000437 PARAMETER Experiment Name: At_Drought_P Parameter: Organism Value: A. thaliana
  misc_feature: MA Experiment 20000437 PARAMETER Experiment Name: At_Drought_P Parameter: Plant Line Value: WS
  misc_feature: MA Experiment 20000437 PARAMETER Experiment Name: At_Drought_P Parameter: Timepoint (hr) Value: 24
  misc_feature: MA Experiment 20000437 PARAMETER Experiment Name: At_Drought_P Parameter: Tissue Value: Whole Plant
  misc_feature: MA Experiment 20000437 PARAMETER Experiment Name: At_Drought_P Parameter: Treatment Value: Drought vs. No Drought
  misc_feature: MA Experiment ID: 20000441 Result: Up-regulated in Transcription
  misc_feature: MA Experiment 20000441 PARAMETER Experiment Name: At_1uM_BR-BRZ__P Parameter: Tissue Value: Shoot Apices
  misc_feature: MA Experiment 20000441 PARAMETER Experiment Name: At_1uM_BR-BRZ__P Parameter: Treatment Value: 1uM BR vs. No Treatment
  misc_feature: MA Experiment ID: 20000443 Result: Up-regulated in Transcription
  misc_feature: MA Experiment 20000443 PARAMETER Experiment Name: At_1uM_BR-BRZ__P Parameter: Tissue Value: Shoot Apices
  misc_feature: MA Experiment 20000443 PARAMETER Experiment Name: At_1uM_BR-BRZ__P Parameter: Treatment Value: 1uM BRZ vs. No Treatment
  misc_feature: MA Experiment ID: 20000794 Result: Down-regulated in Transcription
  misc_feature: MA Experiment 20000794 PARAMETER Experiment Name: At_Petals_P Parameter: Age (day) Value: 23-25 days
  misc_feature: MA Experiment 20000794 PARAMETER Experiment Name: At_Petals_P Parameter: Plant Line Value: WS
  misc_feature: MA Experiment 20000794 PARAMETER Experiment Name: At_Petals_P Parameter: Tissue Value: Petals vs. Whole plant
  misc_feature: MA Experiment ID: 20001451 Result: Up-regulated in Transcription
  misc_feature: MA Experiment 20001451 PARAMETER Experiment Name: At_Far-red-induction_P Parameter: Age (day) Value: 7
  misc_feature: MA Experiment 20001451 PARAMETER Experiment Name: At_Far-red-induction_P Parameter: Light Value: Far-red vs. White
  misc_feature: MA Experiment 20001451 PARAMETER Experiment Name: At_Far-red-induction_P Parameter: Organism Value: A. thaliana
  misc_feature: MA Experiment 20001451 PARAMETER Experiment Name: At_Far-red-induction_P Parameter: Plant Line Value: Columbia
  misc_feature: MA Experiment 20001451 PARAMETER Experiment Name: At_Far-red-induction_P Parameter: Timepoint (hr) Value: 24
  misc_feature: MA Experiment 20001451 PARAMETER Experiment Name: At_Far-red-induction_P Parameter: Tissue Value: Whole Plant
  misc_feature: MA Experiment ID: 20001457 Result: Down-regulated in Transcription
  misc_feature: MA Experiment 20001457 PARAMETER Experiment Name: At_50mM_NH4NO3_L-to-H_P Parameter: Age (day) Value: Undefined
  misc_feature: MA Experiment 20001457 PARAMETER Experiment Name: At_50mM_NH4NO3_L-to-H_P Parameter: Organism Value: Undefined
  misc_feature: MA Experiment 20001457 PARAMETER Experiment Name: At_50mM_NH4NO3_L-to-H_P Parameter: Plant Line Value: Undefined
  misc_feature: MA Experiment 20001457 PARAMETER Experiment Name: At_50mM_NH4NO3_L-to-H_P Parameter: Timepoint (hr) Value: 0.5
  misc_feature: MA Experiment 20001457 PARAMETER Experiment Name: At_50mM_NH4NO3_L-to-H_P Parameter: Tissue Value: Siliques
  misc_feature: MA Experiment 20001457 PARAMETER Experiment Name: At_50mM_NH4NO3_L-to-H_P Parameter: Treatment Value: 50mM NH4NO3 vs. 100mM Manitol
  misc_feature: MA Experiment ID: 20001557 Result: Down-regulated in Transcription
  misc_feature: MA Experiment 20001557 PARAMETER Experiment Name: At_Drought_Soil_Dry_P Parameter: Age (day) Value: 27
  misc_feature: MA Experiment 20001557 PARAMETER Experiment Name: At_Drought_Soil_Dry_P Parameter: Organism Value: A. thaliana
  misc_feature: MA Experiment 20001557 PARAMETER Experiment Name: At_Drought_Soil_Dry_P Parameter: Plant Line Value: WS
  misc_feature: MA Experiment 20001557 PARAMETER Experiment Name: At_Drought_Soil_Dry_P Parameter: Post Timepoint (hr) Value: 3
  misc_feature: MA Experiment 20001557 PARAMETER Experiment Name: At_Drought_Soil_Dry_P Parameter: Post-Treatment Value: Re-Water vs. No Drought
  misc_feature: MA Experiment 20001557 PARAMETER Experiment Name: At_Drought_Soil_Dry_P Parameter: Timepoint (day) Value: 13
  misc_feature: MA Experiment 20001557 PARAMETER Experiment Name: At_Drought_Soil_Dry_P Parameter: Treatment Value: Drought vs. No Drought
  misc_feature: MA Experiment ID: 20001558 Result: Down-regulated in Transcription
  misc_feature: MA Experiment 20001558 PARAMETER Experiment Name: At_Drought_Soil_Dry_P Parameter: Age (day) Value: 27
  misc_feature: MA Experiment 20001558 PARAMETER Experiment Name: At_Drought_Soil_Dry_P Parameter: Organism Value: A. thaliana
  misc_feature: MA Experiment 20001558 PARAMETER Experiment Name: At_Drought_Soil_Dry_P Parameter: Plant Line Value: WS
  misc_feature: MA Experiment 20001558 PARAMETER Experiment Name: At_Drought_Soil_Dry_P Parameter: Post Timepoint (hr) Value: 6
  misc_feature: MA Experiment 20001558 PARAMETER Experiment Name: At_Drought_Soil_Dry_P Parameter: Post-Treatment Value: Re-Water vs. No Drought
  misc_feature: MA Experiment 20001558 PARAMETER Experiment Name: At_Drought_Soil_Dry_P Parameter: Timepoint (day) Value: 13
  misc_feature: MA Experiment 20001558 PARAMETER Experiment Name: At_Drought_Soil_Dry_P Parameter: Treatment Value: Drought vs. No Drought
  misc_feature: MA Experiment ID: 20001560 Result: Down-regulated in Transcription
  misc_feature: MA Experiment 20001560 PARAMETER Experiment Name: At_Drought_Soil_Dry_P Parameter: Age (day) Value: 28
  misc_feature: MA Experiment 20001560 PARAMETER Experiment Name: At_Drought_Soil_Dry_P Parameter: Organism Value: A. thaliana
  misc_feature: MA Experiment 20001560 PARAMETER Experiment Name: At_Drought_Soil_Dry_P Parameter: Plant Line Value: WS
  misc_feature: MA Experiment 20001560 PARAMETER Experiment Name: At_Drought_Soil_Dry_P Parameter: Post Timepoint (hr) Value: None
  misc_feature: MA Experiment 20001560 PARAMETER Experiment Name: At_Drought_Soil_Dry_P Parameter: Post-Treatment Value: None
  misc_feature: MA Experiment 20001560 PARAMETER Experiment Name: At_Drought_Soil_Dry_P Parameter: Timepoint (day) Value: 14
  misc_feature: MA Experiment 20001560 PARAMETER Experiment Name: At_Drought_Soil_Dry_P Parameter: Treatment Value: Drought vs. No Drought
  misc_feature: MA Experiment ID: 20001768 Result: Up-regulated in Transcription
  misc_feature: MA Experiment 20001768 PARAMETER Experiment Name: At_Far-red-enriched-adult_P Parameter: Age (day) Value: 28
  misc_feature: MA Experiment 20001768 PARAMETER Experiment Name: At_Far-red-enriched-adult_P Parameter: Light Value: Far-red enriched vs. White
  misc_feature: MA Experiment 20001768 PARAMETER Experiment Name: At_Far-red-enriched-adult_P Parameter: Organism Value: A. thaliana
  misc_feature: MA Experiment 20001768 PARAMETER Experiment Name: At_Far-red-enriched-adult_P Parameter: Plant Line Value: Columbia
  misc_feature: MA Experiment 20001768 PARAMETER Experiment Name: At_Far-red-enriched-adult_P Parameter: Timepoint (hr) Value: 1
  misc_feature: MA Experiment 20001768 PARAMETER Experiment Name: At_Far-red-enriched-adult_P Parameter: Tissue Value: Aerial
  misc_feature: MA Experiment ID: 20001910 Result: Up-regulated in Transcription
  misc_feature: MA Experiment 20001910 PARAMETER Experiment Name: At_Drought_Reproduction_P Parameter: Age (day) Value: 37
  misc_feature: MA Experiment 20001910 PARAMETER Experiment Name: At_Drought_Reproduction_P Parameter: Organism Value: A. thaliana
  misc_feature: MA Experiment 20001910 PARAMETER Experiment Name: At_Drought_Reproduction_P Parameter: Plant Line Value: WS
  misc_feature: MA Experiment 20001910 PARAMETER Experiment Name: At_Drought_Reproduction_P Parameter: Timepoint (day) Value: 7
  misc_feature: MA Experiment 20001910 PARAMETER Experiment Name: At_Drought_Reproduction_P Parameter: Tissue Value: Flowers
  misc_feature: MA Experiment 20001910 PARAMETER Experiment Name: At_Drought_Reproduction_P Parameter: Treatment Value: Drought vs. No Drought
  misc_feature: MA Experiment ID: 20001911 Result: Up-regulated in Transcription
  misc_feature: MA Experiment 20001911 PARAMETER Experiment Name: At_Drought_Reproduction_P Parameter: Age (day) Value: 40
  misc_feature: MA Experiment 20001911 PARAMETER Experiment Name: At_Drought_Reproduction_P Parameter: Organism Value: A. thaliana
  misc_feature: MA Experiment 20001911 PARAMETER Experiment Name: At_Drought_Reproduction_P Parameter: Plant Line Value: WS
  misc_feature: MA Experiment 20001911 PARAMETER Experiment Name: At_Drought_Reproduction_P Parameter: Timepoint (day) Value: 10
  misc_feature: MA Experiment 20001911 PARAMETER Experiment Name: At_Drought_Reproduction_P Parameter: Tissue Value: Flowers
  misc_feature: MA Experiment 20001911 PARAMETER Experiment Name: At_Drought_Reproduction_P Parameter: Treatment Value: Drought vs. No Drought
aacttaatttattttaggcccatgggaagaaaagtcttctgcgttaataatttctagatctttccacaacattcatacgcaactcccttaaatcttgaaacgaccaatttcttcaaaacaatagtttgtttgcgatggcgacagaacaagaagctgaagttggaacagagacatcctctgtttccggaaggtttttgaggaacagagatttatatctcttcttgccttttctcttaggcttctctgatcaagaatcatcaaacggagatgatgatgatgttgcttcatcgcgtgagagaatcattttagtcaacccttttacacaaggaatgattgtgctcgaaggctcatcaggaatgaatcctctgcttcgtagcttactggagtcacgtgaggaaggtcgtcctcctgcgtccaaggcttccatcgatgcgatgccgatcgttgagattgatggctgtgaaggagagtgtgtgatctgtttggaggagtggaagtccgaggagacggtgaaggagatgccgtgtaagcataggtttcacggtggatgtatagagaaatggttagggtttcatgggtcgtgtcctgtttgtaggtacgagatgcctgttgatggagatgagattgggaagaaaagaaacgatgggaatgagatttgggttaggttcagtttcaacgatggtcggagaattagagatttttctgcgcaggacggtggaaacagtgatggtgttgagtccgagaattaggatttacataagaagcttttgtaaaaaaaacttgtgcctttttttgttcttgttctgggaaaaggttgatgaactttttttgtcttaagatggtacaaagtaagctcaggaatctccataatcctcatcaaaccctgaggcatcacttctgatatcacacataacaaagagaaaaaaatgaaaaaacaatcaagaaatgtgcataagaccaaaccacaaacacttcttgattccttgattaagagttttcagaaggacaaagaagatagagacgaactttctggcccaccaagttgattaacagcatcgatgaatctgttttgaagctcacaactccatttcaatctctccttagattcctttgacttatggttcttatcatttaccatgttctgtagtaacaatcaagaatgatcccaaacgcaaaaacattactctggccacaataaagattaaaaagaaggattttattttcac

SEQ ID NO: 36473 - protein, 204 aa, Arabidopsis thaliana
  peptide (1)..(204): Ceres Seq. ID no. 12330459
  misc_feature (113)..(153): Pfam Name: Zinc finger, C3HC4 type (RING finger) Pfam Description: Zinc finger, C3HC4 type (RING finger)
  misc_feature (74)..(172): Homolog of NCBI NO: 15231238 NR Description: unknown protein; protein id: At3g13430.1
  misc_feature (89)..(158): Homolog of NCBI NO: 18921323 NR Description: putative zinc finger protein [Oryza sativa]
  misc_feature (74)..(173): Homolog of NCBI NO: 11994207 NR Description: gene_id:MPN9.20~unknown protein [Arabidopsis
  misc_feature (84)..(195): Homolog of NCBI NO: 34903272 NR Description: unnamed protein product [Oryza sativa (japonica
  misc_feature (74)..(173): Homolog of NCBI NO: 15231003 NR Description: unknown protein
  misc_feature (1)..(82): Homolog of NCBI NO: 15241188 NR Description: putative protein
  misc_feature (74)..(204): Homolog of NCBI NO: 15241188 NR Description: putative protein
  misc_feature (12)..(185): Homolog of NCBI NO: 15223679 NR Description: unknown protein; protein id: At1g14200.1
  misc_feature (1)..(204): Homolog of NCBI NO: 21554312 NR Description: unknown [Arabidopsis thaliana]
  misc_feature (1)..(204): Homolog of NCBI NO: 18396059 NR Description: expressed protein
MATEQEAEVGTETSSVSGRFLRNRDLYLFLPFLLGFSDQESSNGDDDDVASSRERIILVNPFTQGMIVLEGSSGMNPLLRSLLESREEGRPPASKASIDAMPIVEIDGCEGECVICLEEWKSEETVKEMPCKHRFHGGCIEKWLGFHGSCPVCRYEMPVDGDEIGKKRNDGNEIWVRFSFNDGRRIRDFSAQDGGNSDGVESEN

SEQ ID NO: 36474 - protein, 139 aa, Arabidopsis thaliana
  peptide (1)..(139): Ceres Seq. ID no. 12330460
  misc_feature (48)..(88): Pfam Name: Zinc finger, C3HC4 type (RING finger) Pfam Description: Zinc finger, C3HC4 type (RING finger)
  misc_feature (9)..(107): Homolog of NCBI NO: 15231238 NR Description: unknown protein; protein id: At3g13430.1
  misc_feature (24)..(93): Homolog of NCBI NO: 18921323 NR Description: putative zinc finger protein [Oryza sativa]
  misc_feature (9)..(108): Homolog of NCBI NO: 11994207 NR Description: gene_id:MPN9.20~unknown protein [Arabidopsis
  misc_feature (19)..(130): Homolog of NCBI NO: 34903272 NR Description: unnamed protein product [Oryza sativa (japonica
  misc_feature (9)..(108): Homolog of NCBI NO: 15231003 NR Description: unknown protein
  misc_feature (1)..(17): Homolog of NCBI NO: 15241188 NR Description: putative protein
  misc_feature (9)..(139): Homolog of NCBI NO: 15241188 NR Description: putative protein
  misc_feature (1)..(120): Homolog of NCBI NO: 15223679 NR Description: unknown protein; protein id: At1g14200.1
  misc_feature (1)..(139): Homolog of NCBI NO: 21554312 NR Description: unknown [Arabidopsis thaliana]
  misc_feature (1)..(139): Homolog of NCBI NO: 18396059 NR Description: expressed protein
MIVLEGSSGMNPLLRSLLESREEGRPPASKASIDAMPIVEIDGCEGECVICLEEWKSEETVKEMPCKHRFHGGCIEKWLGFHGSCPVCRYEMPVDGDEIGKKRNDGNEIWVRFSFNDGRRIRDFSAQDGGNSDGVESEN

SEQ ID NO: 36475 - protein, 130 aa, Arabidopsis thaliana
  peptide (1)..(130): Ceres Seq. ID no. 12330461
  misc_feature (39)..(79): Pfam Name: Zinc finger, C3HC4 type (RING finger) Pfam Description: Zinc finger, C3HC4 type (RING finger)
  misc_feature (1)..(86): Homolog of NCBI NO: 34906008 NR Description: putative RING-H2 finger protein RHC2a
  misc_feature (1)..(98): Homolog of NCBI NO: 15231238 NR Description: unknown protein; protein id: At3g13430.1
  misc_feature (15)..(84): Homolog of NCBI NO: 18921323 NR Description: putative zinc finger protein [Oryza sativa]
  misc_feature (1)..(99): Homolog of NCBI NO: 11994207 NR Description: gene_id:MPN9.20~unknown protein [Arabidopsis
  misc_feature (10)..(121): Homolog of NCBI NO: 34903272 NR Description: unnamed protein product [Oryza sativa (japonica
  misc_feature (1)..(99): Homolog of NCBI NO: 15231003 NR Description: unknown protein
  misc_feature (1)..(130): Homolog of NCBI NO: 15241188 NR Description: putative protein
  misc_feature (1)..(111): Homolog of NCBI NO: 15223679 NR Description: unknown protein; protein id: At1g14200.1
  misc_feature (1)..(130): Homolog of NCBI NO: 21554312 NR Description: unknown [Arabidopsis thaliana]
  misc_feature (1)..(130): Homolog of NCBI NO: 18396059 NR Description: expressed protein
MNPLLRSLLESREEGRPPASKASIDAMPIVEIDGCEGECVICLEEWKSEETVKEMPCKHRFHGGCIEKWLGFHGSCPVCRYEMPVDGDEIGKKRNDGNEIWVRFSFNDGRRIRDFSAQDGGNSDGVESEN

SEQ ID NO: 36476 - DNA, 862 bp, Arabidopsis thaliana
  misc_feature (1)..(862): Ceres Seq. ID no. 12337124
  misc_feature: MA Experiment ID: 108434 Result: Down-regulated in Transcription
  misc_feature: MA Experiment 108434 PARAMETER Experiment Name: At_Root_Tips_cDNA_P Parameter: Tissue Value: Root Tips
  misc_feature: MA Experiment ID: 108461 Result: Down-regulated in Transcription
  misc_feature: MA Experiment 108461 PARAMETER Experiment Name: At_Germinating_Seeds_cDNA_P Parameter: Age (day) Value: 1 vs. 0
  misc_feature: MA Experiment 108461 PARAMETER Experiment Name: At_Germinating_Seeds_cDNA_P Parameter: Tissue Value: Germinating Seeds
  misc_feature: MA Experiment ID: 108488 Result: Down-regulated in Transcription
  misc_feature: MA Experiment ID: 108576 Result: Down-regulated in Transcription
  misc_feature: MA Experiment 108576 PARAMETER Experiment Name: At_42deg_Heat_cDNA_P Parameter: Temperature (deg C) Value: 42 vs. 22
  misc_feature: MA Experiment 108576 PARAMETER Experiment Name: At_42deg_Heat_cDNA_P Parameter: Timepoint (hr) Value: 1
  misc_feature: MA Experiment 108576 PARAMETER Experiment Name: At_42deg_Heat_cDNA_P Parameter: Tissue Value: Aerial
  misc_feature: MA Experiment ID: 108577 Result: Down-regulated in Transcription
  misc_feature: MA Experiment 108577 PARAMETER Experiment Name: At_42deg_Heat_cDNA_P Parameter: Temperature (deg C) Value: 42 vs. 22
  misc_feature: MA Experiment 108577 PARAMETER Experiment Name: At_42deg_Heat_cDNA_P Parameter: Timepoint (hr) Value: 6
  misc_feature: MA Experiment 108577 PARAMETER Experiment Name: At_42deg_Heat_cDNA_P Parameter: Tissue Value: Aerial
  misc_feature: MA Experiment ID: 108585 Result: Up-regulated in Transcription
  misc_feature: MA Experiment 108585 PARAMETER Experiment Name: At_5mM_NaNP_cDNA_P Parameter: Timepoint (hr) Value: 6
  misc_feature: MA Experiment 108585 PARAMETER Experiment Name: At_5mM_NaNP_cDNA_P Parameter: Tissue Value: Aerial
  misc_feature: MA Experiment 108585 PARAMETER Experiment Name: At_5mM_NaNP_cDNA_P Parameter: Treatment Value: null
  misc_feature: MA Experiment ID: 20000179 Result: Down-regulated in Transcription
  misc_feature: MA Experiment 20000179 PARAMETER Experiment Name: At_Germinating_Seeds_P Parameter: Age (hr) Value: 6 vs. 0
  misc_feature: MA Experiment 20000179 PARAMETER Experiment Name: At_Germinating_Seeds_P Parameter: Tissue Value: Germinating Seeds
  misc_feature: MA Experiment ID: 20000227 Result: Down-regulated in Transcription
  misc_feature: MA Experiment 20000227 PARAMETER Experiment Name: At_Root-Tips-vs-Tops_P Parameter: Tissue Value: Root Tips vs. Root Tops
  misc_feature: MA Experiment ID: 20000234 Result: Down-regulated in Transcription
  misc_feature: MA Experiment 20000234 PARAMETER Experiment Name: At_Siliques_P Parameter: Age (day) Value: 21
  misc_feature: MA Experiment 20000234 PARAMETER Experiment Name: At_Siliques_P Parameter: Organism Value: A. thaliana
  misc_feature: MA Experiment 20000234 PARAMETER Experiment Name: At_Siliques_P Parameter: Plant Line Value: WS
  misc_feature: MA Experiment 20000234 PARAMETER Experiment Name: At_Siliques_P Parameter: Tissue Value: Less Than 5mm Siliques vs. Whole Plant
  misc_feature: MA Experiment ID: 20000264 Result: Down-regulated in Transcription
  misc_feature: MA Experiment 20000264 PARAMETER Experiment Name: At_Open_Flower_P Parameter: Age (day) Value: 21
  misc_feature: MA Experiment 20000264 PARAMETER Experiment Name: At_Open_Flower_P Parameter: Plant Line Value: WS
  misc_feature: MA Experiment 20000264 PARAMETER Experiment Name: At_Open_Flower_P Parameter: Tissue Value: Open Flower vs. Whole Plant
  misc_feature: MA Experiment ID: 20000265 Result: Down-regulated in Transcription
  misc_feature: MA Experiment 20000265 PARAMETER Experiment Name: At_Open_Flower_P Parameter: Age (day) Value: 21
  misc_feature: MA Experiment 20000265 PARAMETER Experiment Name: At_Open_Flower_P Parameter: Plant Line Value: WS
  misc_feature: MA Experiment 20000265 PARAMETER Experiment Name: At_Open_Flower_P Parameter: Tissue Value: Closed Flower vs. Whole Plant
  misc_feature: MA Experiment ID: 20000286 Result: Down-regulated in Transcription
  misc_feature: MA Experiment 20000286 PARAMETER Experiment Name: At_Open_Flower_P Parameter: Age (day) Value: 21
  misc_feature: MA Experiment 20000286 PARAMETER Experiment Name: At_Open_Flower_P Parameter: Plant Line Value: WS
  misc_feature: MA Experiment 20000286 PARAMETER Experiment Name: At_Open_Flower_P Parameter: Tissue Value: Half Open vs. Whole Plant
  misc_feature: MA Experiment ID: 20000437 Result: Down-regulated in Transcription
  misc_feature: MA Experiment 20000437 PARAMETER Experiment Name: At_Drought_P Parameter: Age (day) Value: 8
  misc_feature: MA Experiment 20000437 PARAMETER Experiment Name: At_Drought_P Parameter: Organism Value: A. thaliana
  misc_feature: MA Experiment 20000437 PARAMETER Experiment Name: At_Drought_P Parameter: Plant Line Value: WS
  misc_feature: MA Experiment 20000437 PARAMETER Experiment Name: At_Drought_P Parameter: Timepoint (hr) Value: 24
  misc_feature: MA Experiment 20000437 PARAMETER Experiment Name: At_Drought_P Parameter: Tissue Value: Whole Plant
  misc_feature: MA Experiment 20000437 PARAMETER Experiment Name: At_Drought_P Parameter: Treatment Value: Drought vs. No Drought
  misc_feature: MA Experiment ID: 20000439 Result: Down-regulated in Transcription
  misc_feature: MA Experiment 20000439 PARAMETER Experiment Name: At_Roots__P Parameter: Age (day) Value: 14 vs. 21
  misc_feature: MA Experiment 20000439 PARAMETER Experiment Name: At_Roots__P Parameter: Organism Value: A. thaliana
  misc_feature: MA Experiment 20000439 PARAMETER Experiment Name: At_Roots__P Parameter: Tissue Value: Roots vs. Whole Plant
  misc_feature: MA Experiment ID: 20001247 Result: Up-regulated in Transcription
  misc_feature: MA Experiment 20001247 PARAMETER Experiment Name: At_Far-red-induction_P Parameter: Age (day) Value: 7
  misc_feature: MA Experiment 20001247 PARAMETER Experiment Name: At_Far-red-induction_P Parameter: Light Value: Far-red vs. White
  misc_feature: MA Experiment 20001247 PARAMETER Experiment Name: At_Far-red-induction_P Parameter: Organism Value: A. thaliana
  misc_feature: MA Experiment 20001247 PARAMETER Experiment Name: At_Far-red-induction_P Parameter: Plant Line Value: Columbia
  misc_feature: MA Experiment 20001247 PARAMETER Experiment Name: At_Far-red-induction_P Parameter: Timepoint (hr) Value: 1
  misc_feature: MA Experiment 20001247 PARAMETER Experiment Name: At_Far-red-induction_P Parameter: Tissue Value: Whole Plant
  misc_feature: MA Experiment ID: 20001248 Result: Up-regulated in Transcription
  misc_feature: MA Experiment 20001248 PARAMETER Experiment Name: At_Far-red-induction_P Parameter: Age (day) Value: 7
  misc_feature: MA Experiment 20001248 PARAMETER Experiment Name: At_Far-red-induction_P Parameter: Light Value: Far-red vs. White
  misc_feature: MA Experiment 20001248 PARAMETER Experiment Name: At_Far-red-induction_P Parameter: Organism Value: A. thaliana
  misc_feature: MA Experiment 20001248 PARAMETER Experiment Name: At_Far-red-induction_P Parameter: Plant Line Value: Columbia
  misc_feature: MA Experiment 20001248 PARAMETER Experiment Name: At_Far-red-induction_P Parameter: Timepoint (hr) Value: 4
  misc_feature: MA Experiment 20001248 PARAMETER Experiment Name: At_Far-red-induction_P Parameter: Tissue Value: Whole Plant
  misc_feature: MA Experiment ID: 20001450 Result: Up-regulated in Transcription
  misc_feature: MA Experiment 20001450 PARAMETER Experiment Name: At_Far-red-induction_P Parameter: Age (day) Value: 7
  misc_feature: MA Experiment 20001450 PARAMETER Experiment Name: At_Far-red-induction_P Parameter: Light Value: Far-red vs. White
  misc_feature: MA Experiment 20001450 PARAMETER Experiment Name: At_Far-red-induction_P Parameter: Organism Value: A. thaliana
  misc_feature: MA Experiment 20001450 PARAMETER Experiment Name: At_Far-red-induction_P Parameter: Plant Line Value: Columbia
  misc_feature: MA Experiment 20001450 PARAMETER Experiment Name: At_Far-red-induction_P Parameter: Timepoint (hr) Value: 8
  misc_feature: MA Experiment 20001450 PARAMETER Experiment Name: At_Far-red-induction_P Parameter: Tissue Value: Whole Plant
  misc_feature: MA Experiment ID: 20001451 Result: Up-regulated in Transcription
  misc_feature: MA Experiment 20001451 PARAMETER Experiment Name: At_Far-red-induction_P Parameter: Age (day) Value: 7
  misc_feature: MA Experiment 20001451 PARAMETER Experiment Name: At_Far-red-induction_P Parameter: Light Value: Far-red vs. White
  misc_feature: MA Experiment 20001451 PARAMETER Experiment Name: At_Far-red-induction_P Parameter: Organism Value: A. thaliana
  misc_feature: MA Experiment 20001451 PARAMETER Experiment Name: At_Far-red-induction_P Parameter: Plant Line Value: Columbia
  misc_feature: MA Experiment 20001451 PARAMETER Experiment Name: At_Far-red-induction_P Parameter: Timepoint (hr) Value: 24
  misc_feature: MA Experiment 20001451 PARAMETER Experiment Name: At_Far-red-induction_P Parameter: Tissue Value: Whole Plant
  misc_feature: MA Experiment ID: 20001555 Result: Down-regulated in Transcription
  misc_feature: MA Experiment 20001555 PARAMETER Experiment Name: At_Drought_Soil_Dry_P Parameter: Age (day) Value: 24
  misc_feature: MA Experiment 20001555 PARAMETER Experiment Name: At_Drought_Soil_Dry_P Parameter: Organism Value: A. thaliana
  misc_feature: MA Experiment 20001555 PARAMETER Experiment Name: At_Drought_Soil_Dry_P Parameter: Plant Line Value: WS
  misc_feature: MA Experiment 20001555 PARAMETER Experiment Name: At_Drought_Soil_Dry_P Parameter: Post Timepoint (hr) Value: None
  misc_feature: MA Experiment 20001555 PARAMETER Experiment Name: At_Drought_Soil_Dry_P Parameter: Post-Treatment Value: None
  misc_feature: MA Experiment 20001555 PARAMETER Experiment Name: At_Drought_Soil_Dry_P Parameter: Timepoint (day) Value: 10
  misc_feature: MA Experiment 20001555 PARAMETER Experiment Name: At_Drought_Soil_Dry_P Parameter: Treatment Value: Drought vs. No Drought
  misc_feature: MA Experiment ID: 20001556 Result: Down-regulated in Transcription
  misc_feature: MA Experiment 20001556 PARAMETER Experiment Name: At_Drought_Soil_Dry_P Parameter: Age (day) Value: 26
  misc_feature: MA Experiment 20001556 PARAMETER Experiment Name: At_Drought_Soil_Dry_P Parameter: Organism Value: A. thaliana
  misc_feature: MA Experiment 20001556 PARAMETER Experiment Name: At_Drought_Soil_Dry_P Parameter: Plant Line Value: WS
  misc_feature: MA Experiment 20001556 PARAMETER Experiment Name: At_Drought_Soil_Dry_P Parameter: Post Timepoint (hr) Value: None
  misc_feature: MA Experiment 20001556 PARAMETER Experiment Name: At_Drought_Soil_Dry_P Parameter: Post-Treatment Value: None
  misc_feature: MA Experiment 20001556 PARAMETER Experiment Name: At_Drought_Soil_Dry_P Parameter: Timepoint (day) Value: 12
  misc_feature: MA Experiment 20001556 PARAMETER Experiment Name: At_Drought_Soil_Dry_P Parameter: Treatment Value: Drought vs. No Drought
  misc_feature: MA Experiment ID: 20001905 Result: Down-regulated in Transcription
  misc_feature: MA Experiment 20001905 PARAMETER Experiment Name: At_Drought_Reproduction_P Parameter: Age (day) Value: 40
  misc_feature: MA Experiment 20001905 PARAMETER Experiment Name: At_Drought_Reproduction_P Parameter: Organism Value: A. thaliana
  misc_feature: MA Experiment 20001905 PARAMETER Experiment Name: At_Drought_Reproduction_P Parameter: Plant Line Value: WS
  misc_feature: MA Experiment 20001905 PARAMETER Experiment Name: At_Drought_Reproduction_P Parameter: Timepoint (day) Value: 10
  misc_feature: MA Experiment 20001905 PARAMETER Experiment Name: At_Drought_Reproduction_P Parameter: Tissue Value: Rosettes
  misc_feature: MA Experiment 20001905 PARAMETER Experiment Name: At_Drought_Reproduction_P Parameter: Treatment Value: Drought vs. No Drought
attgtcaatttccctttattttctcgacggaatcataaataaaaaccctaaacctaaagtcacaaattcattcttcatctgttattcacgatttgtgttgtcttttcttttgcagtaagatttcgactttagaattgggagatctttccattatgggttctgagcaaaacgacagcacaagcttctctccttcagagccaaagctctgcgtcaaaggatgtggcttcttcggatctccatcgaacatgaacctctgctctaaatgctaccagagacatccgagccacggaggaacaaaccgcttccgctaaagccgccgtcgagaaatctctaaaccctaataaacccaaaactcaaccacaacagagccaagaaatcactcaaggcgtcctcggatctggatcgtcttcctcatcaacgagagggggtgattcggctgctgctccgttggatccaccgaaatcgacggctacgagatgcttgagctgtaacaagaaagttggcgtgacgggtttcaagtgtaggtgtggaagcactttctgtggaactcatagatatccagagagtcacgagtgccaattcgatttcaaaggagttgcgagagaagctattgctaaagctaatcctgtggtgaaggctgataaggttgataggatatgaattggtgaagaaactgttgtgttctcttttgtttttttattttcaagtctcgtgatgttggtggtttggctctctgttttctgctcttattatggttttatttgcttttagggtttcttaggaaaggccttagattctgctattatgtggtttcatgttttgcaacattggatttgttgttctgtaataaagtgttggttat

SEQ ID NO: 36477 - protein, 52 aa, Arabidopsis thaliana
  peptide (1)..(52): Ceres Seq. ID no. 12337125
  misc_feature (16)..(40): Pfam Name: A20-like zinc finger Pfam Description: A20-like zinc finger
  misc_feature (12)..(39): Homolog of NCBI NO: 15231686 NR Description: zinc finger - like protein
  misc_feature (12)..(39): Homolog of NCBI NO: 18404102 NR Description: expressed protein
  misc_feature (1)..(42): Homolog of NCBI NO: 34909836 NR Description: P0403C05.26 [Oryza sativa (japonica
  misc_feature (6)..(40): Homolog of NCBI NO: 18403408 NR Description: expressed protein
  misc_feature (5)..(40): Homolog of NCBI NO: 30908921 NR Description: putative zinc finger transcription factor ZFP33
  misc_feature (4)..(40): Homolog of NCBI NO: 28269431 NR Description: putative zinc finger protein
  misc_feature (1)..(40): Homolog of NCBI NO: 15235819 NR Description: similar to zinc finger - like protein
  misc_feature (1)..(40): Homolog of NCBI NO: 15234402 NR Description: putative protein
  misc_feature (1)..(40): Homolog of NCBI NO: 15221329 NR Description: hypothetical protein; protein id: At1g12440.1
  misc_feature (1)..(40): Homolog of NCBI NO: 8778645 NR Description: F5O11.17 [Arabidopsis thaliana]
MGSEQNDSTSFSPSEPKLCVKGCGFFGSPSNMNLCSKCYQRHPSHGGTNRFR

SEQ ID NO: 36478 - protein, 38 aa, Arabidopsis thaliana
  peptide (1)..(38): Ceres Seq. ID no. 12337126
LSISLYFLDGIINKNPKPKVTNSFFICYSRFVLSFLLQ

SEQ ID NO: 36479 - DNA, 913 bp, Arabidopsis thaliana
  misc_feature (1)..(913): Ceres Seq. ID no. 12338821
  misc_feature: MA Experiment ID: 108434 Result: Up-regulated in Transcription
  misc_feature: MA Experiment 108434 PARAMETER Experiment Name: At_Root_Tips_cDNA_P Parameter: Tissue Value: Root Tips
  misc_feature: MA Experiment ID: 108461 Result: Down-regulated in Transcription
  misc_feature: MA Experiment 108461 PARAMETER Experiment Name: At_Germinating_Seeds_cDNA_P Parameter: Age (day) Value: 1 vs. 0
  misc_feature: MA Experiment 108461 PARAMETER Experiment Name: At_Germinating_Seeds_cDNA_P Parameter: Tissue Value: Germinating Seeds
  misc_feature: MA Experiment ID: 108462 Result: Down-regulated in Transcription
  misc_feature: MA Experiment 108462 PARAMETER Experiment Name: At_Germinating_Seeds_cDNA_P Parameter: Age (day) Value: 2 vs. 0
  misc_feature: MA Experiment 108462 PARAMETER Experiment Name: At_Germinating_Seeds_cDNA_P Parameter: Tissue Value: Germinating Seeds
  misc_feature: MA Experiment ID: 108463 Result: Down-regulated in Transcription
  misc_feature: MA Experiment 108463 PARAMETER Experiment Name: At_Germinating_Seeds_cDNA_P Parameter: Age (day) Value: 3 vs. 0
  misc_feature: MA Experiment 108463 PARAMETER Experiment Name: At_Germinating_Seeds_cDNA_P Parameter: Tissue Value: Germinating Seeds
  misc_feature: MA Experiment ID: 108464 Result: Down-regulated in Transcription
  misc_feature: MA Experiment 108464 PARAMETER Experiment Name: At_Germinating_Seeds_cDNA_P Parameter: Age (day) Value: 4 vs. 0
  misc_feature: MA Experiment 108464 PARAMETER Experiment Name: At_Germinating_Seeds_cDNA_P Parameter: Tissue Value: Germinating Seeds
  misc_feature: MA Experiment ID: 108573 Result: Down-regulated in Transcription
  misc_feature: MA Experiment 108573 PARAMETER Experiment Name: At_Drought_cDNA_P Parameter: Timepoint (hr) Value: 6
  misc_feature: MA Experiment 108573 PARAMETER Experiment Name: At_Drought_cDNA_P Parameter: Tissue Value: Aerial
  misc_feature: MA Experiment 108573 PARAMETER Experiment Name: At_Drought_cDNA_P Parameter: Treatment Value: Drought vs. No Drought
  misc_feature: MA Experiment ID: 20000090 Result: Up-regulated in Transcription
  misc_feature: MA Experiment ID: 20000180 Result: Down-regulated in Transcription
  misc_feature: MA Experiment 20000180 PARAMETER Experiment Name: At_Germinating_Seeds_P Parameter: Age (hr) Value: 24 vs. 0
  misc_feature: MA Experiment 20000180 PARAMETER Experiment Name: At_Germinating_Seeds_P Parameter: Tissue Value: Germinating Seeds
  misc_feature: MA Experiment ID: 20000227 Result: Up-regulated in Transcription
  misc_feature: MA Experiment 20000227 PARAMETER Experiment Name: At_Root-Tips-vs-Tops_P Parameter: Tissue Value: Root Tips vs. Root Tops
  misc_feature: MA Experiment ID: 20000794 Result: Down-regulated in Transcription
  misc_feature: MA Experiment 20000794 PARAMETER Experiment Name: At_Petals_P Parameter: Age (day) Value: 23-25 days
  misc_feature: MA Experiment 20000794 PARAMETER Experiment Name: At_Petals_P Parameter: Plant Line Value: WS
  misc_feature: MA Experiment 20000794 PARAMETER Experiment Name: At_Petals_P Parameter: Tissue Value: Petals vs. Whole plant
  misc_feature: MA Experiment ID: 20001247 Result: Down-regulated in Transcription
  misc_feature: MA Experiment 20001247 PARAMETER Experiment Name: At_Far-red-induction_P Parameter: Age (day) Value: 7
  misc_feature: MA Experiment 20001247 PARAMETER Experiment Name: At_Far-red-induction_P Parameter: Light Value: Far-red vs. White
  misc_feature: MA Experiment 20001247 PARAMETER Experiment Name: At_Far-red-induction_P Parameter: Organism Value: A. thaliana
  misc_feature: MA Experiment 20001247 PARAMETER Experiment Name: At_Far-red-induction_P Parameter: Plant Line Value: Columbia
  misc_feature: MA Experiment 20001247 PARAMETER Experiment Name: At_Far-red-induction_P Parameter: Timepoint (hr) Value: 1
  misc_feature: MA Experiment 20001247 PARAMETER Experiment Name: At_Far-red-induction_P Parameter: Tissue Value: Whole Plant
  misc_feature: MA Experiment ID: 20001560 Result: Up-regulated in Transcription
  misc_feature: MA Experiment 20001560 PARAMETER Experiment Name: At_Drought_Soil_Dry_P Parameter: Age (day) Value: 28
  misc_feature: MA Experiment 20001560 PARAMETER Experiment Name: At_Drought_Soil_Dry_P Parameter: Organism Value: A. thaliana
  misc_feature: MA Experiment 20001560 PARAMETER Experiment Name: At_Drought_Soil_Dry_P Parameter: Plant Line Value: WS
  misc_feature: MA Experiment 20001560 PARAMETER Experiment Name: At_Drought_Soil_Dry_P Parameter: Post Timepoint (hr) Value: None
  misc_feature: MA Experiment 20001560 PARAMETER Experiment Name: At_Drought_Soil_Dry_P Parameter: Post-Treatment Value: None
  misc_feature: MA Experiment 20001560 PARAMETER Experiment Name: At_Drought_Soil_Dry_P Parameter: Timepoint (day) Value: 14
  misc_feature: MA Experiment 20001560 PARAMETER Experiment Name: At_Drought_Soil_Dry_P Parameter: Treatment Value: Drought vs. No Drought
gagagaatccattttcttttaatcgccatgggtttcgctttgtgcattcgtagatcagcttctactttagcttccgtgtgtggtcgtgtggctcgagctcaagccgtctccgctatcgttaatcgctcgtctcttgttcccaagccatctctgcttcggcccttcgtctctcgtggctttccttattcgacggccactgagccgttaaagtccgatcagacgcttatacaagtgattgactctgagatcaaggattctttcgaagcagatgatcacgatgcggatgaagagacgatagactctagtgactttcctttcaaaatcgaagataatcctggacacaggactgtgacattgactagagaatacaatggagagcagattaaagtagaagtaagcatgcctggtcttgccatggatgaaaatgaagatgatgtggatgacgatgaagatggtgatggtcgtcatgagaaatcgaatgaatcaagcattccacttgttgtcactgtgaccaagaagagtggacttagcctagagtttagctgcactgctttccctgatgagattgtcattgatggtttgtctgtgaaccgtccagatgattcttctgaagaacagttgacttatgatgggccagattttcaggagttggatgagaatatgcgcaagtcgttccacaagtttctagagacgagaggaatcaaagcaagcgcaacggatttcttgtatgagtacatgatgaagaaagatagcagagagtacttactatggttgaagaagctcaaaacctttgtccaagaatgaaggagacacgcttaagtagagtaagagctagattgttttatgtttgcagatttcatttgtaatgacttttgagttcacaatggggttttgaatgtgaaatgccgatttg

SEQ ID NO: 36480 - protein, 267 aa, Arabidopsis thaliana
  peptide (1)..(267): Ceres Seq. ID no. 12338822
  misc_feature (79)..(265): Pfam Name: Mitochondrial glycoprotein Pfam Description: Mitochondrial glycoprotein
  misc_feature (10)..(267): Homolog of NCBI NO: 21592321 NR Description: unknown [Arabidopsis thaliana]
  misc_feature (10)..(267): Homolog of NCBI NO: 15241669 NR Description: putative protein
  misc_feature (10)..(265): Homolog of NCBI NO: 18405162 NR Description: hypothetical protein; protein id: At2g39790.1
  misc_feature (13)..(266): Homolog of NCBI NO: 15239320 NR Description: putative protein
  misc_feature (12)..(266): Homolog of NCBI NO: 34895730 NR Description: P0019D06.23 [Oryza sativa (japonica
  misc_feature (18)..(267): Homolog of NCBI NO: 7487698 NR Description: hypothetical protein At2g39790 [imported] -
  misc_feature (10)..(267): Homolog of NCBI NO: 21593469 NR Description: unknown [Arabidopsis thaliana]
  misc_feature (10)..(267): Homolog of NCBI NO: 18405164 NR Description: Expressed protein
  misc_feature (15)..(267): Homolog of NCBI NO: 11357566 NR Description: hypothetical protein F1I16.10 - Arabidopsis
  misc_feature (10)..(267): Homolog of NCBI NO: 18410318 NR Description: Expressed protein
ERIHFLLIAMGFALCIRRSASTLASVCGRVARAQAVSAIVNRSSLVPKPSLLRPFVSRGFPYSTATEPLKSDQTLIQVIDSEIKDSFEADDHDADEETIDSSDFPFKIEDNPGHRTVTLTREYNGEQIKVEVSMPGLAMDENEDDVDDDEDGDGRHEKSNESSIPLVVTVTKKSGLSLEFSCTAFPDEIVIDGLSVNRPDDSSEEQLTYDGPDFQELDENMRKSFHKFLETRGIKASATDFLYEYMMKKDSREYLLWLKKLKTFVQE

SEQ ID NO: 36481 - protein, 258 aa, Arabidopsis thaliana
  peptide (1)..(258): Ceres Seq. ID no. 12338823
  misc_feature (70)..(256): Pfam Name: Mitochondrial glycoprotein Pfam Description: Mitochondrial glycoprotein
  misc_feature (1)..(258): Homolog of NCBI NO: 21592321 NR Description: unknown [Arabidopsis thaliana]
  misc_feature (1)..(258): Homolog of NCBI NO: 15241669 NR Description: putative protein
  misc_feature (1)..(256): Homolog of NCBI NO: 18405162 NR Description: hypothetical protein; protein id: At2g39790.1
  misc_feature (4)..(257): Homolog of NCBI NO: 15239320 NR Description: putative protein
  misc_feature (3)..(257): Homolog of NCBI NO: 34895730 NR Description: P0019D06.23 [Oryza sativa (japonica
  misc_feature (9)..(258): Homolog of NCBI NO: 7487698 NR Description: hypothetical protein At2g39790 [imported] -
  misc_feature (1)..(258): Homolog of NCBI NO: 21593469 NR Description: unknown [Arabidopsis thaliana]
  misc_feature (1)..(258): Homolog of NCBI NO: 18405164 NR Description: Expressed protein
  misc_feature (6)..(258): Homolog of NCBI NO: 11357566 NR Description: hypothetical protein F1I16.10 - Arabidopsis
  misc_feature (1)..(258): Homolog of NCBI NO: 18410318 NR Description: Expressed protein
MGFALCIRRSASTLASVCGRVARAQAVSAIVNRSSLVPKPSLLRPFVSRGFPYSTATEPLKSDQTLIQVIDSEIKDSFEADDHDADEETIDSSDFPFKIEDNPGHRTVTLTREYNGEQIKVEVSMPGLAMDENEDDVDDDEDGDGRHEKSNESSIPLVVTVTKKSGLSLEFSCTAFPDEIVIDGLSVNRPDDSSEEQLTYDGPDFQELDENMRKSFHKFLETRGIKASATDFLYEYMMKKDSREYLLWLKKLKTFVQE

SEQ ID NO: 36482 - protein, 134 aa, Arabidopsis thaliana
  peptide (1)..(134): Ceres Seq. ID no. 12338824
  misc_feature (1)..(132): Pfam Name: Mitochondrial glycoprotein Pfam Description: Mitochondrial glycoprotein
  misc_feature (1)..(134): Homolog of NCBI NO: 21592321 NR Description: unknown [Arabidopsis thaliana]
  misc_feature (1)..(134): Homolog of NCBI NO: 15241669 NR Description: putative protein
  misc_feature (1)..(132): Homolog of NCBI NO: 18405162 NR Description: hypothetical protein; protein id: At2g39790.1
  misc_feature (1)..(133): Homolog of NCBI NO: 15239320 NR Description: putative protein
  misc_feature (1)..(133): Homolog of NCBI NO: 34895730 NR Description: P0019D06.23 [Oryza sativa (japonica
  misc_feature (1)..(134): Homolog of NCBI NO: 7487698 NR Description: hypothetical protein At2g39790 [imported] -
  misc_feature (1)..(134): Homolog of NCBI NO: 21593469 NR Description: unknown [Arabidopsis thaliana]
  misc_feature (1)..(134): Homolog of NCBI NO: 18405164 NR Description: Expressed protein
  misc_feature (1)..(134): Homolog of NCBI NO: 11357566 NR Description: hypothetical protein F1I16.10 - Arabidopsis
  misc_feature (1)..(134): Homolog of NCBI NO: 18410318 NR Description: Expressed protein
MPGLAMDENEDDVDDDEDGDGRHEKSNESSIPLVVTVTKKSGLSLEFSCTAFPDEIVIDGLSVNRPDDSSEEQLTYDGPDFQELDENMRKSFHKFLETRGIKASATDFLYEYMMKKDSREYLLWLKKLKTFVQE

SEQ ID NO: 36483 - DNA, 1551 bp, Arabidopsis thaliana
  misc_feature (1)..(1551): Ceres Seq. ID no. 12367021
  misc_feature: MA Experiment ID: 108462 Result: Down-regulated in Transcription
  misc_feature: MA Experiment 108462 PARAMETER Experiment Name: At_Germinating_Seeds_cDNA_P Parameter: Age (day) Value: 2 vs. 0
  misc_feature: MA Experiment 108462 PARAMETER Experiment Name: At_Germinating_Seeds_cDNA_P Parameter: Tissue Value: Germinating Seeds
  misc_feature: MA Experiment ID: 108463 Result: Down-regulated in Transcription
  misc_feature: MA Experiment 108463 PARAMETER Experiment Name: At_Germinating_Seeds_cDNA_P Parameter: Age (day) Value: 3 vs. 0
  misc_feature: MA Experiment 108463 PARAMETER Experiment Name: At_Germinating_Seeds_cDNA_P Parameter: Tissue Value: Germinating Seeds
  misc_feature: MA Experiment ID: 108464 Result: Down-regulated in Transcription
  misc_feature: MA Experiment 108464 PARAMETER Experiment Name: At_Germinating_Seeds_cDNA_P Parameter: Age (day) Value: 4 vs. 0
  misc_feature: MA Experiment 108464 PARAMETER Experiment Name: At_Germinating_Seeds_cDNA_P Parameter: Tissue Value: Germinating Seeds
  misc_feature: MA Experiment ID: 108469 Result: Up-regulated in Transcription
  misc_feature: MA Experiment ID: 108488 Result: Down-regulated in Transcription
  misc_feature: MA Experiment ID: 108489 Result: Up-regulated in Transcription
  misc_feature: MA Experiment ID: 108561 Result: Up-regulated in Transcription
  misc_feature: MA Experiment 108561 PARAMETER Experiment Name: At_100uM_ABA_cDNA_P Parameter: Timepoint (hr) Value: 6
  misc_feature: MA Experiment 108561 PARAMETER Experiment Name: At_100uM_ABA_cDNA_P Parameter: Tissue Value: Aerial
  misc_feature: MA Experiment 108561 PARAMETER Experiment Name: At_100uM_ABA_cDNA_P Parameter: Treatment Value: 100uM ABA vs. No Treatment
  misc_feature: MA Experiment ID: 108573 Result: Up-regulated in Transcription
  misc_feature: MA Experiment 108573 PARAMETER Experiment Name: At_Drought_cDNA_P Parameter: Timepoint (hr) Value: 6
  misc_feature: MA Experiment 108573 PARAMETER Experiment Name: At_Drought_cDNA_P Parameter: Tissue Value: Aerial
  misc_feature: MA Experiment 108573 PARAMETER Experiment Name: At_Drought_cDNA_P Parameter: Treatment Value: Drought vs. No Drought
  misc_feature: MA Experiment ID: 108585 Result: Up-regulated in Transcription
  misc_feature: MA Experiment 108585 PARAMETER Experiment Name: At_5mM_NaNP_cDNA_P Parameter: Timepoint (hr) Value: 6
  misc_feature: MA Experiment 108585 PARAMETER Experiment Name: At_5mM_NaNP_cDNA_P Parameter: Tissue Value: Aerial
  misc_feature: MA Experiment 108585 PARAMETER Experiment Name: At_5mM_NaNP_cDNA_P Parameter: Treatment Value: null
  misc_feature: MA Experiment ID: 108595 Result: Down-regulated in Transcription
  misc_feature: MA Experiment 108595 PARAMETER Experiment Name: At_Ler-pi_Ovule_cDNA_P Parameter: Plant Line Value: null
  misc_feature: MA Experiment ID: 108605 Result: Up-regulated in Transcription
  misc_feature: MA Experiment 108605 PARAMETER Experiment Name: At_100uM_ABA_cDNA_P Parameter: Timepoint (hr) Value: 6
  misc_feature: MA Experiment 108605 PARAMETER Experiment Name: At_100uM_ABA_cDNA_P Parameter: Tissue Value: Aerial
  misc_feature: MA Experiment 108605 PARAMETER Experiment Name: At_100uM_ABA_cDNA_P Parameter: Treatment Value: 100uM ABA vs. No Treatment
  misc_feature: MA Experiment ID: 108607 Result: Up-regulated in Transcription
  misc_feature: MA Experiment 108607 PARAMETER Experiment Name: At_100uM_ABA_cDNA_P Parameter: Timepoint (hr) Value: 4
  misc_feature: MA Experiment 108607 PARAMETER Experiment Name: At_100uM_ABA_cDNA_P Parameter: Tissue Value: Aerial
  misc_feature: MA Experiment 108607 PARAMETER Experiment Name: At_100uM_ABA_cDNA_P Parameter: Treatment Value: 100uM ABA vs. No Treatment
  misc_feature: MA Experiment ID: 108609 Result: Up-regulated in Transcription
  misc_feature: MA Experiment 108609 PARAMETER Experiment Name: At_100uM_ABA_cDNA_P Parameter: Timepoint (hr) Value: 24
  misc_feature: MA Experiment 108609 PARAMETER Experiment Name: At_100uM_ABA_cDNA_P Parameter: Tissue Value: Aerial
  misc_feature: MA Experiment 108609 PARAMETER Experiment Name: At_100uM_ABA_cDNA_P Parameter: Treatment Value: 100uM ABA vs. No Treatment
  misc_feature: MA Experiment ID: 108667 Result: Up-regulated in Transcription
  misc_feature: MA Experiment 108667 PARAMETER Experiment Name: At_2mM_SA_cDNA_P Parameter: Plant Line Value: WS
  misc_feature: MA Experiment 108667 PARAMETER Experiment Name: At_2mM_SA_cDNA_P Parameter: Timepoint (hr) Value: 1
  misc_feature: MA Experiment 108667 PARAMETER Experiment Name: At_2mM_SA_cDNA_P Parameter: Treatment Value: 2mM SA vs. No Treatment
  misc_feature: MA Experiment ID: 20000069 Result: Up-regulated in Transcription
  misc_feature: MA Experiment 20000069 PARAMETER Experiment Name: At_100uM_ABA_Mutants_cDNA_P Parameter: Plant Line Value: CS23
  misc_feature: MA Experiment 20000069 PARAMETER Experiment Name: At_100uM_ABA_Mutants_cDNA_P Parameter: Timepoint (hr) Value: 6
  misc_feature: MA Experiment 20000069 PARAMETER Experiment Name: At_100uM_ABA_Mutants_cDNA_P Parameter: Tissue Value: Aerial
  misc_feature: MA Experiment 20000069 PARAMETER Experiment Name: At_100uM_ABA_Mutants_cDNA_P Parameter: Treatment Value: 100uM ABA vs. No Treatment
  misc_feature: MA Experiment ID: 20000070 Result: Up-regulated in Transcription
  misc_feature: MA Experiment 20000070 PARAMETER Experiment Name: At_100uM_ABA_Mutants_cDNA_P Parameter: Plant Line Value: CS24
  misc_feature: MA Experiment 20000070 PARAMETER Experiment Name: At_100uM_ABA_Mutants_cDNA_P Parameter: Timepoint (hr) Value: 6
  misc_feature: MA Experiment 20000070 PARAMETER Experiment Name: At_100uM_ABA_Mutants_cDNA_P Parameter: Tissue Value: Aerial
  misc_feature: MA Experiment 20000070 PARAMETER Experiment Name: At_100uM_ABA_Mutants_cDNA_P Parameter: Treatment Value: 100uM ABA vs. No Treatment
  misc_feature: MA Experiment ID: 20000071 Result: Up-regulated in Transcription
  misc_feature: MA Experiment 20000071 PARAMETER Experiment Name: At_100uM_ABA_Mutants_cDNA_P Parameter: Plant Line Value: CS8104
  misc_feature: MA Experiment 20000071 PARAMETER Experiment Name: At_100uM_ABA_Mutants_cDNA_P Parameter: Timepoint (hr) Value: 6
  misc_feature: MA Experiment 20000071 PARAMETER Experiment Name: At_100uM_ABA_Mutants_cDNA_P Parameter: Tissue Value: Aerial
  misc_feature: MA Experiment 20000071 PARAMETER Experiment Name: At_100uM_ABA_Mutants_cDNA_P Parameter: Treatment Value: 100uM ABA vs. No Treatment
  misc_feature: MA Experiment ID: 20000072 Result: Up-regulated in Transcription
  misc_feature: MA Experiment 20000072 PARAMETER Experiment Name: At_100uM_ABA_Mutants_cDNA_P Parameter: Plant Line Value: CS8105
  misc_feature: MA Experiment 20000072 PARAMETER Experiment Name: At_100uM_ABA_Mutants_cDNA_P Parameter: Timepoint (hr) Value: 6
  misc_feature: MA Experiment 20000072 PARAMETER Experiment Name: At_100uM_ABA_Mutants_cDNA_P Parameter: Tissue Value: Aerial
  misc_feature: MA Experiment 20000072 PARAMETER Experiment Name: At_100uM_ABA_Mutants_cDNA_P Parameter: Treatment Value: 100uM ABA vs. No Treatment
  misc_feature: MA Experiment ID: 20000086 Result: Up-regulated in Transcription
  misc_feature: MA Experiment 20000086 PARAMETER Experiment Name: At_100uM_ABA_Mutants_cDNA_P Parameter: Plant Line Value: CS22
  misc_feature: MA Experiment 20000086 PARAMETER Experiment Name: At_100uM_ABA_Mutants_cDNA_P Parameter: Timepoint (hr) Value: 6
  misc_feature: MA Experiment 20000086 PARAMETER Experiment Name: At_100uM_ABA_Mutants_cDNA_P Parameter: Tissue Value: Aerial
  misc_feature: MA Experiment 20000086 PARAMETER Experiment Name: At_100uM_ABA_Mutants_cDNA_P Parameter: Treatment Value: 100uM ABA vs. No Treatment
  misc_feature: MA Experiment ID: 20000087 Result: Up-regulated in Transcription
  misc_feature: MA Experiment 20000087 PARAMETER Experiment Name: At_100uM_ABA_Mutants_cDNA_P Parameter: Plant Line Value: WS
  misc_feature: MA Experiment 20000087 PARAMETER Experiment Name: At_100uM_ABA_Mutants_cDNA_P Parameter: Timepoint (hr) Value: 6
  misc_feature: MA Experiment 20000087 PARAMETER Experiment Name: At_100uM_ABA_Mutants_cDNA_P Parameter: Tissue Value: Aerial
  misc_feature: MA Experiment 20000087 PARAMETER Experiment Name: At_100uM_ABA_Mutants_cDNA_P Parameter: Treatment Value: 100uM ABA vs. No Treatment
  misc_feature: MA Experiment ID: 20000088 Result: Up-regulated in Transcription
  misc_feature: MA Experiment 20000088 PARAMETER Experiment Name: At_100uM_ABA_Mutants_cDNA_P Parameter: Plant Line Value: Landsberg
  misc_feature: MA Experiment 20000088 PARAMETER Experiment Name: At_100uM_ABA_Mutants_cDNA_P Parameter: Timepoint (hr) Value: 6
  misc_feature: MA Experiment 20000088 PARAMETER Experiment Name: At_100uM_ABA_Mutants_cDNA_P Parameter: Tissue Value: Aerial
  misc_feature: MA Experiment 20000088 PARAMETER Experiment Name: At_100uM_ABA_Mutants_cDNA_P Parameter: Treatment Value: 100uM ABA vs. No Treatment
  misc_feature: MA Experiment ID: 20000089 Result: Up-regulated in Transcription
  misc_feature: MA Experiment ID: 20000090 Result: Up-regulated in Transcription
  misc_feature: MA Experiment ID: 20000111 Result: Down-regulated in Transcription
  misc_feature: MA Experiment 20000111 PARAMETER Experiment Name: At_42deg_Heat_cDNA_P Parameter: Temperature (deg C) Value: 42 vs. 22
  misc_feature: MA Experiment 20000111 PARAMETER Experiment Name: At_42deg_Heat_cDNA_P Parameter: Timepoint (hr) Value: 6
  misc_feature: MA Experiment 20000111 PARAMETER Experiment Name: At_42deg_Heat_cDNA_P Parameter: Tissue Value: Aerial
  misc_feature: MA Experiment ID: 20000117 Result: Up-regulated in Transcription
  misc_feature: MA Experiment 20000117 PARAMETER Experiment Name: At_100uM_ABA_Mutants_cDNA_P Parameter: Plant Line Value: Columbia
  misc_feature: MA Experiment 20000117 PARAMETER Experiment Name: At_100uM_ABA_Mutants_cDNA_P Parameter: Timepoint (hr) Value: 6
  misc_feature: MA Experiment 20000117 PARAMETER Experiment Name: At_100uM_ABA_Mutants_cDNA_P Parameter: Tissue Value: Aerial
  misc_feature: MA Experiment 20000117 PARAMETER Experiment Name: At_100uM_ABA_Mutants_cDNA_P Parameter: Treatment Value: 100uM ABA vs. No Treatment
  misc_feature: MA Experiment ID: 20000169 Result: Up-regulated in Transcription
  misc_feature: MA Experiment 20000169 PARAMETER Experiment Name: At_100uM_ABA_P Parameter: Age (day) Value: 14
  misc_feature: MA Experiment 20000169 PARAMETER Experiment Name: At_100uM_ABA_P Parameter: Organism Value: A. thaliana
  misc_feature: MA Experiment 20000169 PARAMETER Experiment Name: At_100uM_ABA_P Parameter: Plant Line Value: WS
  misc_feature: MA Experiment 20000169 PARAMETER Experiment Name: At_100uM_ABA_P Parameter: Timepoint (hr) Value: 6
  misc_feature: MA Experiment 20000169 PARAMETER Experiment Name: At_100uM_ABA_P Parameter: Tissue Value: Aerial
  misc_feature: MA Experiment 20000169 PARAMETER Experiment Name: At_100uM_ABA_P Parameter: Treatment Value: 100uM ABA vs. No Treatment
  misc_feature: MA Experiment ID: 20000182 Result: Up-regulated in Transcription
  misc_feature: MA Experiment 20000182 PARAMETER Experiment Name: At_2mM_SA_P Parameter: Age (day) Value: 14
  misc_feature: MA Experiment 20000182 PARAMETER Experiment Name: At_2mM_SA_P Parameter: Organism Value: A. thaliana
  misc_feature: MA Experiment 20000182 PARAMETER Experiment Name: At_2mM_SA_P Parameter: Plant Line Value: WS
  misc_feature: MA Experiment 20000182 PARAMETER Experiment Name: At_2mM_SA_P Parameter: Timepoint (hr) Value: 6
  misc_feature: MA Experiment 20000182 PARAMETER Experiment Name: At_2mM_SA_P Parameter: Tissue Value: Aerial
  misc_feature: MA Experiment 20000182 PARAMETER Experiment Name: At_2mM_SA_P Parameter: Treatment Value: 2mM SA vs. No Treatment
  misc_feature: MA Experiment ID: 20000574 Result: Up-regulated in Transcription
  misc_feature: MA Experiment 20000574 PARAMETER Experiment Name: At_100uM_ABA_Mutants__P Parameter: Organism Value: A. thaliana
  misc_feature: MA Experiment 20000574 PARAMETER Experiment Name: At_100uM_ABA_Mutants__P Parameter: Plant Line Value: CS23 vs. Ler wt
  misc_feature: MA Experiment 20000574 PARAMETER Experiment Name: At_100uM_ABA_Mutants__P Parameter: Timepoint (hr) Value: N/A
  misc_feature: MA Experiment 20000574 PARAMETER Experiment Name: At_100uM_ABA_Mutants__P Parameter: Tissue Value: Whole Plant
  misc_feature: MA Experiment 20000574 PARAMETER Experiment Name: At_100uM_ABA_Mutants__P Parameter: Treatment Value: None
  misc_feature: MA Experiment ID: 20001248 Result: Up-regulated in Transcription
  misc_feature: MA Experiment 20001248 PARAMETER Experiment Name: At_Far-red-induction_P Parameter: Age (day) Value: 7
  misc_feature: MA Experiment 20001248 PARAMETER Experiment Name: At_Far-red-induction_P Parameter: Light Value: Far-red vs. White
  misc_feature: MA Experiment 20001248 PARAMETER Experiment Name: At_Far-red-induction_P Parameter: Organism Value: A. thaliana
  misc_feature: MA Experiment 20001248 PARAMETER Experiment Name: At_Far-red-induction_P Parameter: Plant Line Value: Columbia
  misc_feature: MA Experiment 20001248 PARAMETER Experiment Name: At_Far-red-induction_P Parameter: Timepoint (hr) Value: 4
  misc_feature: MA Experiment 20001248 PARAMETER Experiment Name: At_Far-red-induction_P Parameter: Tissue Value: Whole Plant
  misc_feature: MA Experiment ID: 20001904 Result: Up-regulated in Transcription
  misc_feature: MA Experiment 20001904 PARAMETER Experiment Name: At_Drought_Reproduction_P Parameter: Age (day) Value: 37
  misc_feature: MA Experiment 20001904 PARAMETER Experiment Name: At_Drought_Reproduction_P Parameter: Organism Value: A. thaliana
  misc_feature: MA Experiment 20001904 PARAMETER Experiment Name: At_Drought_Reproduction_P Parameter: Plant Line Value: WS
  misc_feature: MA Experiment 20001904 PARAMETER Experiment Name: At_Drought_Reproduction_P Parameter: Timepoint (day) Value: 7
  misc_feature: MA Experiment 20001904 PARAMETER Experiment Name: At_Drought_Reproduction_P Parameter: Tissue Value: Rosettes
  misc_feature: MA Experiment 20001904 PARAMETER Experiment Name: At_Drought_Reproduction_P Parameter: Treatment Value: Drought vs. No Drought
  misc_feature: MA Experiment ID: 20001905 Result: Up-regulated in Transcription
  misc_feature: MA Experiment 20001905 PARAMETER Experiment Name: At_Drought_Reproduction_P Parameter: Age (day) Value: 40
  misc_feature: MA Experiment 20001905 PARAMETER Experiment Name: At_Drought_Reproduction_P Parameter: Organism Value: A. thaliana
  misc_feature: MA Experiment 20001905 PARAMETER Experiment Name: At_Drought_Reproduction_P Parameter: Plant Line Value: WS
  misc_feature: MA Experiment 20001905 PARAMETER Experiment Name: At_Drought_Reproduction_P Parameter: Timepoint (day) Value: 10
  misc_feature: MA Experiment 20001905 PARAMETER Experiment Name: At_Drought_Reproduction_P Parameter: Tissue Value: Rosettes
  misc_feature: MA Experiment 20001905 PARAMETER Experiment Name: At_Drought_Reproduction_P Parameter: Treatment Value: Drought vs. No Drought
atttcttcattcgtaaacaaacacacacgaagcaaaaacaaaaatgaaaactactcatttctcttcctcttcttcttccgatcgcaggatcggtgctctgctccgtcatctcaattccggctcagattcggacaacctgagctctctttatgcatctccgacatcgggaggcaccggtggttctgttttctctcatcttgttcaagctccagaggatcctattcttggggtgacagttgcatacaacaaagatcctagcccagttaagctgaatttaggagttggtgcttaccgaactgaggagggaaaacctttggttcttaatgttgtgaggaaagctgagcagcagcttatcaatgacagaacaagaatcaaggagtatcttcccattgttggattggttgagttcaacaagttaagcgctaagctcatactaggcgctgacagtcctgctattcgggagaatcggattaccaccgtggagtgtttgtctggtactggttctctgagagttggaggagagtttttggctaaacattatcatcagaaaacaatttacatcactcagccaacatggggaaatcatccaaagattttcacgctcgctggtttgacagtgaaaacttaccgatactacgatccagcgacgcgtgggttgaactttcaaggtttattagaagaccttggtgctgccgcacctggttctatagtgcttctccatgcctgtgcccataaccctactggtgttgatccaaccattcaacaatgggagcaaatcaggaagttgatgcgatcaaagggattgatgcccttcttcgatagtgcttatcagggctttgcaagtggaagtcttgatacagatgcgaaacctattaggatgtttgttgctgatggcggagaatgcctcgttgctcaaagttatgcgaagaacatgggactctatggagaacgagttggagctctcagcattgtatgcaaatcagcagatgttgcggggagagttgaaagccaactgaaactagtgataaggccaatgtactcgagtcctccaatccatggtgcatcaatcgtggctgtaatcctccgtgacaagaatttgttcaacgaatggactctggaactgaaggccatggctgatcgtatcatcagcatgaggaaacagcttttcgaggcattacgtactcgaggcactcctggagactggagtcacatcataaagcagattggtatgtttaccttcacagggttaaacccagctcaagtctccttcatgactaaagagtaccacatctacatgacatctgacgggaggataagcatggctggtctgagttcgaagactgtacctcaccttgcagacgctatccatgctgttgtcaccaaagccgtctgagaaactgaacaccaccatgacaccaaagcttcataataaagattttgttcttttctttctattatagcatttccggcagtgacaagataaatgtcgttactattattattgtttcatcccagtatcaataaagtacgcaagaaagcttttgtgctccc

SEQ ID NO: 36484 - protein, 449 aa, Arabidopsis thaliana
  peptide (1)..(449): Ceres Seq. ID no. 12367022
  misc_feature (128)..(445): Pfam Name: Aminotransferase class I and II Pfam Description: Aminotransferase class I and II
  misc_feature (1)..(449): Homolog of NCBI NO: 15239078 NR Description: aspartate aminotransferase (Asp3)
MKTTHFSSSSSSDRRIGALLRHLNSGSDSDNLSSLYASPTSGGTGGSVFSHLVQAPEDPILGVTVAYNKDPSPVKLNLGVGAYRTEEGKPLVLNVVRKAEQQLINDRTRIKEYLPIVGLVEFNKLSAKLILGADSPAIRENRITTVECLSGTGSLRVGGEFLAKHYHQKTIYITQPTWGNHPKIFTLAGLTVKTYRYYDPATRGLNFQGLLEDLGAAAPGSIVLLHACAHNPTGVDPTIQQWEQIRKLMRSKGLMPFFDSAYQGFASGSLDTDAKPIRMFVADGGECLVAQSYAKNMGLYGERVGALSIVCKSADVAGRVESQLKLVIRPMYSSPPIHGASIVAVILRDKNLFNEWTLELKAMADRIISMRKQLFEALRTRGTPGDWSHIIKQIGMFTFTGLNPAQVSFMTKEYHIYMTSDGRISMAGLSSKTVPHLADAIHAVVTKAV

SEQ ID NO: 36485 - DNA, 1041 bp, Arabidopsis thaliana
  misc_feature (1)..(1041): Ceres Seq. ID no. 12377452
  misc_feature: MA Experiment ID: 20000306 Result: Up-regulated in Transcription
  misc_feature: MA Experiment 20000306 PARAMETER Experiment Name: At_Germinating_Seeds_Sub_P Parameter: Age (hr) Value: 6 vs. 0
  misc_feature: MA Experiment 20000306 PARAMETER Experiment Name: At_Germinating_Seeds_Sub_P Parameter: Organism Value: A. thaliana
  misc_feature: MA Experiment 20000306 PARAMETER Experiment Name: At_Germinating_Seeds_Sub_P Parameter: Plant Line Value: WS
  misc_feature: MA Experiment 20000306 PARAMETER Experiment Name: At_Germinating_Seeds_Sub_P Parameter: Tissue Value: Germinating Seeds
  misc_feature: MA Experiment ID: 20000307 Result: Up-regulated in Transcription
  misc_feature: MA Experiment 20000307 PARAMETER Experiment Name: At_Germinating_Seeds_Sub_P Parameter: Age (hr) Value: 24 vs. 0
  misc_feature: MA Experiment 20000307 PARAMETER Experiment Name: At_Germinating_Seeds_Sub_P Parameter: Organism Value: A. thaliana
  misc_feature: MA Experiment 20000307 PARAMETER Experiment Name: At_Germinating_Seeds_Sub_P Parameter: Plant Line Value: WS
  misc_feature: MA Experiment 20000307 PARAMETER Experiment Name: At_Germinating_Seeds_Sub_P Parameter: Tissue Value: Germinating Seeds
atggcgctcaaatcaaaactcgtctctcttctcttcctcatagcaacactatcatccacattcgcagcttcgttttccgattcggattccgattcagatcttctcaacgaacttgtatctctcagatcaacaagcgaatcaggcgtaatccatctcgatgaccatggaatctcaaaattcctaacctccgcttccacgcctcgtccttactcgttactcgtcttcttcgacgctactcaactccacagcaaaaacgagcttcgtcttcaagagctccgtcgcgaattcggcatcgtctccgcttcattcctcgctaacaacaatggatctgaaggaactaagcttttcttctgtgagatcgagttttcgaagtctcaatcttcgttccagctctttggcgttaacgctttacctcacattcgtcttgtaagtccttcgatatcgaatctacgtgatgaatctggtcaaatggatcaatcggattactctagattagctgaatcaatggctgagtttgttgagcaacgaactaaactcaaggtcggtcctattcaacgtccaccgctactttcgaaaccacagatcggtattatcgttgcgttgatcgttatcgctactccgtttatcatcaaaagagttttgaaaggagaaactattcttcatgatactagactttggttatctggtgctatcttcatttacttctttagtgttgctggtacaatgcacaacattatcaggaaaatgccgatgtttcttcaagatcgtaacgatccgaataagcttgtgtttttctaccaaggatctggaatgcagcttggagctgaaggatttgctgttggattcttgtatactgttgttggattgcttttggcgtttgttaccaatgtgcttgttcgagtgaagaatattactgcacaaaggttgattatgcttttggctttgttcatatcgttctgggctgtgaagaaagttgtttacttggataactggaagactggatatggaattcatccgtattggccatcgagttggcgttga

SEQ ID NO: 36486 - protein, 346 aa, Arabidopsis thaliana
  peptide (1)..(346): Ceres Seq. ID no. 12377453
  misc_feature (17)..(339): Pfam Name: OST3 / OST6 family Pfam Description: OST3 / OST6 family
  misc_feature (1)..(321): Homolog of NCBI NO: 25402667 NR Description: protein T23J18.22 [imported] - Arabidopsis
  misc_feature (13)..(346): Homolog of NCBI NO: 14091860 NR Description: Putative protein with similarity to putative
  misc_feature (1)..(346): Homolog of NCBI NO: 15220421 NR Description: hypothetical protein; protein id: At1g11560.1
  misc_feature (1)..(346): Homolog of NCBI NO: 15220609 NR Description: hypothetical protein; protein id: At1g61790.1
MALKSKLVSLLFLIATLSSTFAASFSDSDSDSDLLNELVSLRSTSESGVIHLDDHGISKFLTSASTPRPYSLLVFFDATQLHSKNELRLQELRREFGIVSASFLANNNGSEGTKLFFCEIEFSKSQSSFQLFGVNALPHIRLVSPSISNLRDESGQMDQSDYSRLAESMAEFVEQRTKLKVGPIQRPPLLSKPQIGIIVALIVIATPFIIKRVLKGETILHDTRLWLSGAIFIYFFSVAGTMHNIIRKMPMFLQDRNDPNKLVFFYQGSGMQLGAEGFAVGFLYTVVGLLLAFVTNVLVRVKNITAQRLIMLLALFISFWAVKKVVYLDNWKTGYGIHPYWPSSWR

SEQ ID NO: 36487 - protein, 190 aa, Arabidopsis thaliana
  peptide (1)..(190): Ceres Seq. ID no. 12377454
  misc_feature (1)..(183): Pfam Name: OST3 / OST6 family Pfam Description: OST3 / OST6 family
  misc_feature (1)..(165): Homolog of NCBI NO: 25402667 NR Description: protein T23J18.22 [imported] - Arabidopsis
  misc_feature (1)..(190): Homolog of NCBI NO: 14091860 NR Description: Putative protein with similarity to putative
  misc_feature (1)..(190): Homolog of NCBI NO: 15220421 NR Description: hypothetical protein; protein id: At1g11560.1
  misc_feature (1)..(190): Homolog of NCBI NO: 15220609 NR Description: hypothetical protein; protein id: At1g61790.1
MDQSDYSRLAESMAEFVEQRTKLKVGPIQRPPLLSKPQIGIIVALIVIATPFIIKRVLKGETILHDTRLWLSGAIFIYFFSVAGTMHNIIRKMPMFLQDRNDPNKLVFFYQGSGMQLGAEGFAVGFLYTVVGLLLAFVTNVLVRVKNITAQRLIMLLALFISFWAVKKVVYLDNWKTGYGIHPYWPSSWR

SEQ ID NO: 36488 - protein, 178 aa, Arabidopsis thaliana
  peptide (1)..(178): Ceres Seq. ID no. 12377455
  misc_feature (1)..(171): Pfam Name: OST3 / OST6 family Pfam Description: OST3 / OST6 family
  misc_feature (1)..(153): Homolog of NCBI NO: 25402667 NR Description: protein T23J18.22 [imported] - Arabidopsis
  misc_feature (1)..(178): Homolog of NCBI NO: 14091860 NR Description: Putative protein with similarity to putative
  misc_feature (1)..(178): Homolog of NCBI NO: 15220421 NR Description: hypothetical protein; protein id: At1g11560.1
  misc_feature (1)..(178): Homolog of NCBI NO: 15220609 NR Description: hypothetical protein; protein id: At1g61790.1
MAEFVEQRTKLKVGPIQRPPLLSKPQIGIIVALIVIATPFIIKRVLKGETILHDTRLWLSGAIFIYFFSVAGTMHNIIRKMPMFLQDRNDPNKLVFFYQGSGMQLGAEGFAVGFLYTVVGLLLAFVTNVLVRVKNITAQRLIMLLALFISFWAVKKVVYLDNWKTGYGIHPYWPSSWR

SEQ ID NO: 36489 - DNA, 676 bp, Arabidopsis thaliana
  misc_feature (1)..(676): Ceres Seq. ID no. 13496974
  misc_feature: MA Experiment ID: 108433 Result: Up-regulated in Transcription
  misc_feature: MA Experiment 108433 PARAMETER Experiment Name: At_rhl_Mutant2_cDNA_P Parameter: Age (day) Value: 7
  misc_feature: MA Experiment 108433 PARAMETER Experiment Name: At_rhl_Mutant2_cDNA_P Parameter: Organism Value: A. thaliana
  misc_feature: MA Experiment 108433 PARAMETER Experiment Name: At_rhl_Mutant2_cDNA_P Parameter: Plant Line Value: rhl Mutant vs. wt landsburg
  misc_feature: MA Experiment 108433 PARAMETER Experiment Name: At_rhl_Mutant2_cDNA_P Parameter: Tissue Value: Roots
  misc_feature: MA Experiment ID: 108434 Result: Down-regulated in Transcription
  misc_feature: MA Experiment 108434 PARAMETER Experiment Name: At_Root_Tips_cDNA_P Parameter: Tissue Value: Root Tips
  misc_feature: MA Experiment ID: 108488 Result: Down-regulated in Transcription
  misc_feature: MA Experiment ID: 108561 Result: Up-regulated in Transcription
  misc_feature: MA Experiment 108561 PARAMETER Experiment Name: At_100uM_ABA_cDNA_P Parameter: Timepoint (hr) Value: 6
  misc_feature: MA Experiment 108561 PARAMETER Experiment Name: At_100uM_ABA_cDNA_P Parameter: Tissue Value: Aerial
  misc_feature: MA Experiment 108561 PARAMETER Experiment Name: At_100uM_ABA_cDNA_P Parameter: Treatment Value: 100uM ABA vs. No Treatment
  misc_feature: MA Experiment ID: 108585 Result: Up-regulated in Transcription
  misc_feature: MA Experiment 108585 PARAMETER Experiment Name: At_5mM_NaNP_cDNA_P Parameter: Timepoint (hr) Value: 6
  misc_feature: MA Experiment 108585 PARAMETER Experiment Name: At_5mM_NaNP_cDNA_P Parameter: Tissue Value: Aerial
  misc_feature: MA Experiment 108585 PARAMETER Experiment Name: At_5mM_NaNP_cDNA_P Parameter: Treatment Value: null
  misc_feature: MA Experiment ID: 108595 Result: Down-regulated in Transcription
  misc_feature: MA Experiment 108595 PARAMETER Experiment Name: At_Ler-pi_Ovule_cDNA_P Parameter: Plant Line Value: null
  misc_feature: MA Experiment ID: 108605 Result: Up-regulated in Transcription
  misc_feature: MA Experiment 108605 PARAMETER Experiment Name: At_100uM_ABA_cDNA_P Parameter: Timepoint (hr) Value: 6
  misc_feature: MA Experiment 108605 PARAMETER Experiment Name: At_100uM_ABA_cDNA_P Parameter: Tissue Value: Aerial
  misc_feature: MA Experiment 108605 PARAMETER Experiment Name: At_100uM_ABA_cDNA_P Parameter: Treatment Value: 100uM ABA vs. No Treatment
  misc_feature: MA Experiment ID: 108607 Result: Up-regulated in Transcription
  misc_feature: MA Experiment 108607 PARAMETER Experiment Name: At_100uM_ABA_cDNA_P Parameter: Timepoint (hr) Value: 4
  misc_feature: MA Experiment 108607 PARAMETER Experiment Name: At_100uM_ABA_cDNA_P Parameter: Tissue Value: Aerial
  misc_feature: MA Experiment 108607 PARAMETER Experiment Name: At_100uM_ABA_cDNA_P Parameter: Treatment Value: 100uM ABA vs. No Treatment
  misc_feature: MA Experiment ID: 20000069 Result: Up-regulated in Transcription
  misc_feature: MA Experiment 20000069 PARAMETER Experiment Name: At_100uM_ABA_Mutants_cDNA_P Parameter: Plant Line Value: CS23
  misc_feature: MA Experiment 20000069 PARAMETER Experiment Name: At_100uM_ABA_Mutants_cDNA_P Parameter: Timepoint (hr) Value: 6
  misc_feature: MA Experiment 20000069 PARAMETER Experiment Name: At_100uM_ABA_Mutants_cDNA_P Parameter: Tissue Value: Aerial
  misc_feature: MA Experiment 20000069 PARAMETER Experiment Name: At_100uM_ABA_Mutants_cDNA_P Parameter: Treatment Value: 100uM ABA vs. No Treatment
  misc_feature: MA Experiment ID: 20000070 Result: Up-regulated in Transcription
  misc_feature: MA Experiment 20000070 PARAMETER Experiment Name: At_100uM_ABA_Mutants_cDNA_P Parameter: Plant Line Value: CS24
  misc_feature: MA Experiment 20000070 PARAMETER Experiment Name: At_100uM_ABA_Mutants_cDNA_P Parameter: Timepoint (hr) Value: 6
  misc_feature: MA Experiment 20000070 PARAMETER Experiment Name: At_100uM_ABA_Mutants_cDNA_P Parameter: Tissue Value: Aerial
  misc_feature: MA Experiment 20000070 PARAMETER Experiment Name: At_100uM_ABA_Mutants_cDNA_P Parameter: Treatment Value: 100uM ABA vs. No Treatment
  misc_feature: MA Experiment ID: 20000071 Result: Up-regulated in Transcription
  misc_feature: MA Experiment 20000071 PARAMETER Experiment Name: At_100uM_ABA_Mutants_cDNA_P Parameter: Plant Line Value: CS8104
  misc_feature: MA Experiment 20000071 PARAMETER Experiment Name: At_100uM_ABA_Mutants_cDNA_P Parameter: Timepoint (hr) Value: 6
  misc_feature: MA Experiment 20000071 PARAMETER Experiment Name: At_100uM_ABA_Mutants_cDNA_P Parameter: Tissue Value: Aerial
  misc_feature: MA Experiment 20000071 PARAMETER Experiment Name: At_100uM_ABA_Mutants_cDNA_P Parameter: Treatment Value: 100uM ABA vs. No Treatment
  misc_feature: MA Experiment ID: 20000072 Result: Up-regulated in Transcription
  misc_feature: MA Experiment 20000072 PARAMETER Experiment Name: At_100uM_ABA_Mutants_cDNA_P Parameter: Plant Line Value: CS8105
  misc_feature: MA Experiment 20000072 PARAMETER Experiment Name: At_100uM_ABA_Mutants_cDNA_P Parameter: Timepoint (hr) Value: 6
  misc_feature: MA Experiment 20000072 PARAMETER Experiment Name: At_100uM_ABA_Mutants_cDNA_P Parameter: Tissue Value: Aerial
  misc_feature: MA Experiment 20000072 PARAMETER Experiment Name: At_100uM_ABA_Mutants_cDNA_P Parameter: Treatment Value: 100uM ABA vs. No Treatment
  misc_feature: MA Experiment ID: 20000086 Result: Up-regulated in Transcription
  misc_feature: MA Experiment 20000086 PARAMETER Experiment Name: At_100uM_ABA_Mutants_cDNA_P Parameter: Plant Line Value: CS22
  misc_feature: MA Experiment 20000086 PARAMETER Experiment Name: At_100uM_ABA_Mutants_cDNA_P Parameter: Timepoint (hr) Value: 6
  misc_feature: MA Experiment 20000086 PARAMETER Experiment Name: At_100uM_ABA_Mutants_cDNA_P Parameter: Tissue Value: Aerial
  misc_feature: MA Experiment 20000086 PARAMETER Experiment Name: At_100uM_ABA_Mutants_cDNA_P Parameter: Treatment Value: 100uM ABA vs. No Treatment
  misc_feature: MA Experiment ID: 20000087 Result: Up-regulated in Transcription
  misc_feature: MA Experiment 20000087 PARAMETER Experiment Name: At_100uM_ABA_Mutants_cDNA_P Parameter: Plant Line Value: WS
  misc_feature: MA Experiment 20000087 PARAMETER Experiment Name: At_100uM_ABA_Mutants_cDNA_P Parameter: Timepoint (hr) Value: 6
  misc_feature: MA Experiment 20000087 PARAMETER Experiment Name: At_100uM_ABA_Mutants_cDNA_P Parameter: Tissue Value: Aerial
  misc_feature: MA Experiment 20000087 PARAMETER Experiment Name: At_100uM_ABA_Mutants_cDNA_P Parameter: Treatment Value: 100uM ABA vs. No Treatment
  misc_feature: MA Experiment ID: 20000088 Result: Up-regulated in Transcription
  misc_feature: MA Experiment 20000088 PARAMETER Experiment Name: At_100uM_ABA_Mutants_cDNA_P Parameter: Plant Line Value: Landsberg
  misc_feature: MA Experiment 20000088 PARAMETER Experiment Name: At_100uM_ABA_Mutants_cDNA_P Parameter: Timepoint (hr) Value: 6
  misc_feature: MA Experiment 20000088 PARAMETER Experiment Name: At_100uM_ABA_Mutants_cDNA_P Parameter: Tissue Value: Aerial
  misc_feature: MA Experiment 20000088 PARAMETER Experiment Name: At_100uM_ABA_Mutants_cDNA_P Parameter: Treatment Value: 100uM ABA vs. No Treatment
  misc_feature: MA Experiment ID: 20000117 Result: Up-regulated in Transcription
  misc_feature: MA Experiment 20000117 PARAMETER Experiment Name: At_100uM_ABA_Mutants_cDNA_P Parameter: Plant Line Value: Columbia
  misc_feature: MA Experiment 20000117 PARAMETER Experiment Name: At_100uM_ABA_Mutants_cDNA_P Parameter: Timepoint (hr) Value: 6
  misc_feature: MA Experiment 20000117 PARAMETER Experiment Name: At_100uM_ABA_Mutants_cDNA_P Parameter: Tissue Value: Aerial
  misc_feature: MA Experiment 20000117 PARAMETER Experiment Name: At_100uM_ABA_Mutants_cDNA_P Parameter: Treatment Value: 100uM ABA vs. No Treatment
  misc_feature: MA Experiment ID: 20000169 Result: Up-regulated in Transcription
  misc_feature: MA Experiment 20000169 PARAMETER Experiment Name: At_100uM_ABA_P Parameter: Age (day) Value: 14
  misc_feature: MA Experiment 20000169 PARAMETER Experiment Name: At_100uM_ABA_P Parameter: Organism Value: A. thaliana
  misc_feature: MA Experiment 20000169 PARAMETER Experiment Name: At_100uM_ABA_P Parameter: Plant Line Value: WS
  misc_feature: MA Experiment 20000169 PARAMETER Experiment Name: At_100uM_ABA_P Parameter: Timepoint (hr) Value: 6
  misc_feature: MA Experiment 20000169 PARAMETER Experiment Name: At_100uM_ABA_P Parameter: Tissue Value: Aerial
  misc_feature: MA Experiment 20000169 PARAMETER Experiment Name: At_100uM_ABA_P Parameter: Treatment Value: 100uM ABA vs. No Treatment
  misc_feature: MA Experiment ID: 20000179 Result: Down-regulated in Transcription
  misc_feature: MA Experiment 20000179 PARAMETER Experiment Name: At_Germinating_Seeds_P Parameter: Age (hr) Value: 6 vs. 0
  misc_feature: MA Experiment 20000179 PARAMETER Experiment Name: At_Germinating_Seeds_P Parameter: Tissue Value: Germinating Seeds
  misc_feature: MA Experiment ID: 20000224 Result: Down-regulated in Transcription
  misc_feature: MA Experiment ID: 20000265 Result: Down-regulated in Transcription
  misc_feature: MA Experiment 20000265 PARAMETER Experiment Name: At_Open_Flower_P Parameter: Age (day) Value: 21
  misc_feature: MA Experiment 20000265 PARAMETER Experiment Name: At_Open_Flower_P Parameter: Plant Line Value: WS
  misc_feature: MA Experiment 20000265 PARAMETER Experiment Name: At_Open_Flower_P Parameter: Tissue Value: Closed Flower vs. Whole Plant
  misc_feature: MA Experiment ID: 20000439 Result: Up-regulated in Transcription
  misc_feature: MA Experiment 20000439 PARAMETER Experiment Name: At_Roots__P Parameter: Age (day) Value: 14 vs. 21
  misc_feature: MA Experiment 20000439 PARAMETER Experiment Name: At_Roots__P Parameter: Organism Value: A. thaliana
  misc_feature: MA Experiment 20000439 PARAMETER Experiment Name: At_Roots__P Parameter: Tissue Value: Roots vs. Whole Plant
  misc_feature: MA Experiment ID: 20000441 Result: Up-regulated in Transcription
  misc_feature: MA Experiment 20000441 PARAMETER Experiment Name: At_1uM_BR-BRZ__P Parameter: Tissue Value: Shoot Apices
  misc_feature: MA Experiment 20000441 PARAMETER Experiment Name: At_1uM_BR-BRZ__P Parameter: Treatment Value: 1uM BR vs. No Treatment
  misc_feature: MA Experiment ID: 20001247 Result: Up-regulated in Transcription
  misc_feature: MA Experiment 20001247 PARAMETER Experiment Name: At_Far-red-induction_P Parameter: Age (day) Value: 7
  misc_feature: MA Experiment 20001247 PARAMETER Experiment Name: At_Far-red-induction_P Parameter: Light Value: Far-red vs. White
  misc_feature: MA Experiment 20001247 PARAMETER Experiment Name: At_Far-red-induction_P Parameter: Organism Value: A. thaliana
  misc_feature: MA Experiment 20001247 PARAMETER Experiment Name: At_Far-red-induction_P Parameter: Plant Line Value: Columbia
  misc_feature: MA Experiment 20001247 PARAMETER Experiment Name: At_Far-red-induction_P Parameter: Timepoint (hr) Value: 1
  misc_feature: MA Experiment 20001247 PARAMETER Experiment Name: At_Far-red-induction_P Parameter: Tissue Value: Whole Plant
  misc_feature: MA Experiment ID: 20001451 Result: Up-regulated in Transcription
  misc_feature: MA Experiment 20001451 PARAMETER Experiment Name: At_Far-red-induction_P Parameter: Age (day) Value: 7
  misc_feature: MA Experiment 20001451 PARAMETER Experiment Name: At_Far-red-induction_P Parameter: Light Value: Far-red vs. White
  misc_feature: MA Experiment 20001451 PARAMETER Experiment Name: At_Far-red-induction_P Parameter: Organism Value: A. thaliana
  misc_feature: MA Experiment 20001451 PARAMETER Experiment Name: At_Far-red-induction_P Parameter: Plant Line Value: Columbia
  misc_feature: MA Experiment 20001451 PARAMETER Experiment Name: At_Far-red-induction_P Parameter: Timepoint (hr) Value: 24
  misc_feature: MA Experiment 20001451 PARAMETER Experiment Name: At_Far-red-induction_P Parameter: Tissue Value: Whole Plant
  misc_feature: MA Experiment ID: 20001556 Result: Down-regulated in Transcription
  misc_feature: MA Experiment 20001556 PARAMETER Experiment Name: At_Drought_Soil_Dry_P Parameter: Age (day) Value: 26
  misc_feature: MA Experiment 20001556 PARAMETER Experiment Name: At_Drought_Soil_Dry_P Parameter: Organism Value: A. thaliana
  misc_feature: MA Experiment 20001556 PARAMETER Experiment Name: At_Drought_Soil_Dry_P Parameter: Plant Line Value: WS
  misc_feature: MA Experiment 20001556 PARAMETER Experiment Name: At_Drought_Soil_Dry_P Parameter: Post Timepoint (hr) Value: None
  misc_feature: MA Experiment 20001556 PARAMETER Experiment Name: At_Drought_Soil_Dry_P Parameter: Post-Treatment Value: None
  misc_feature: MA Experiment 20001556 PARAMETER Experiment Name: At_Drought_Soil_Dry_P Parameter: Timepoint (day) Value: 12
  misc_feature: MA Experiment 20001556 PARAMETER Experiment Name: At_Drought_Soil_Dry_P Parameter: Treatment Value: Drought vs. No Drought
  misc_feature: MA Experiment ID: 20001905 Result: Up-regulated in Transcription
  misc_feature: MA Experiment 20001905 PARAMETER Experiment Name: At_Drought_Reproduction_P Parameter: Age (day) Value: 40
  misc_feature: MA Experiment 20001905 PARAMETER Experiment Name: At_Drought_Reproduction_P Parameter: Organism Value: A. thaliana
  misc_feature: MA Experiment 20001905 PARAMETER Experiment Name: At_Drought_Reproduction_P Parameter: Plant Line Value: WS
  misc_feature: MA Experiment 20001905 PARAMETER Experiment Name: At_Drought_Reproduction_P Parameter: Timepoint (day) Value: 10
  misc_feature: MA Experiment 20001905 PARAMETER Experiment Name: At_Drought_Reproduction_P Parameter: Tissue Value: Rosettes
  misc_feature: MA Experiment 20001905 PARAMETER Experiment Name: At_Drought_Reproduction_P Parameter: Treatment Value: Drought vs. No Drought
cctctcctcctcgtcctcaatcatcatcatctgagaattcgcagcttttgcttcttcgatagaaaatctaattatcatcaatcatgtctaagttcacgggattctcatctctcgctatctcttattttctcttggtttcaacgattgttgcagccaccgatgttcactactgcgataataacgaagagtatgaagtaaaagtacaaggagttgatataactccttatcctatagctagaggcgagccagctactttcagaatttctgctaacacagacactgagatctcgagcggcaagttggtgatcgaagtttcctactttggatggcatattcattctgagacacatgatctttgtgatgagacaagttgtcctgtggccattggagatttcttggtagcgcactcgcaagttcttcccggatatacccctcctggttcatactcactaaaaatgaagatgcttgatggacgcaagaaggagttaacttgcatcaagttctcatttgatattggatttggatcctccgtggccgacatgtagagctgatttgctcgacgggatacaccatcttgttctataccatggaaccactctcatttattttgtataaaatacactctcctgctatacataattgttgatcaaaaaccctttgaaaattctcattctgg

SEQ ID NO: 36490 - protein, 153 aa, Arabidopsis thaliana
  peptide (1)..(153): Ceres Seq. ID no. 13496975
  misc_feature (23)..(144): Pfam Name: ML domain Pfam Description: ML domain
  misc_feature (27)..(146): Homolog of NCBI NO: 4322563 NR Description: phosphatidylglycerol/phosphatidylinositol
  misc_feature (10)..(140): Homolog of NCBI NO: 18397991 NR Description: expressed protein [Arabidopsis thaliana]
  misc_feature (10)..(140): Homolog of NCBI NO: 21618166 NR Description: unknown [Arabidopsis thaliana]
  misc_feature (10)..(150): Homolog of NCBI NO: 15229872 NR Description: expressed protein [Arabidopsis thaliana]
  misc_feature (23)..(151): Homolog of NCBI NO: 34899866 NR Description: OJ1714_H10.15 [Oryza sativa (japonica
  misc_feature (1)..(153): Homolog of NCBI NO: 21593850 NR Description: unknown [Arabidopsis thaliana]
  misc_feature (1)..(153): Homolog of NCBI NO: 15240063 NR Description: expressed protein [Arabidopsis thaliana]
  misc_feature (1)..(153): Homolog of NCBI NO: 21554315 NR Description: unknown [Arabidopsis thaliana]
  misc_feature (1)..(153): Homolog of NCBI NO: 18399355 NR Description: expressed protein [Arabidopsis thaliana]
MSKFTGFSSLAISYFLLVSTIVAATDVHYCDNNEEYEVKVQGVDITPYPIARGEPATFRISANTDTEISSGKLVIEVSYFGWHIHSETHDLCDETSCPVAIGDFLVAHSQVLPGYTPPGSYSLKMKMLDGRKKELTCIKFSFDIGFGSSVADM

SEQ ID NO: 36491 - DNA, 1135 bp, Arabidopsis thaliana
  misc_feature (1)..(1135): Ceres Seq. ID no. 13491495
  misc_feature: MA Experiment ID: 108434 Result: Down-regulated in Transcription
  misc_feature: MA Experiment 108434 PARAMETER Experiment Name: At_Root_Tips_cDNA_P Parameter: Tissue Value: Root Tips
  misc_feature: MA Experiment ID: 108461 Result: Down-regulated in Transcription
  misc_feature: MA Experiment 108461 PARAMETER Experiment Name: At_Germinating_Seeds_cDNA_P Parameter: Age (day) Value: 1 vs. 0
  misc_feature: MA Experiment 108461 PARAMETER Experiment Name: At_Germinating_Seeds_cDNA_P Parameter: Tissue Value: Germinating Seeds
  misc_feature: MA Experiment ID: 108462 Result: Down-regulated in Transcription
  misc_feature: MA Experiment 108462 PARAMETER Experiment Name: At_Germinating_Seeds_cDNA_P Parameter: Age (day) Value: 2 vs. 0
  misc_feature: MA Experiment 108462 PARAMETER Experiment Name: At_Germinating_Seeds_cDNA_P Parameter: Tissue Value: Germinating Seeds
  misc_feature: MA Experiment ID: 108463 Result: Down-regulated in Transcription
  misc_feature: MA Experiment 108463 PARAMETER Experiment Name: At_Germinating_Seeds_cDNA_P Parameter: Age (day) Value: 3 vs. 0
  misc_feature: MA Experiment 108463 PARAMETER Experiment Name: At_Germinating_Seeds_cDNA_P Parameter: Tissue Value: Germinating Seeds
  misc_feature: MA Experiment ID: 108464 Result: Down-regulated in Transcription
  misc_feature: MA Experiment 108464 PARAMETER Experiment Name: At_Germinating_Seeds_cDNA_P Parameter: Age (day) Value: 4 vs. 0
  misc_feature: MA Experiment 108464 PARAMETER Experiment Name: At_Germinating_Seeds_cDNA_P Parameter: Tissue Value: Germinating Seeds
  misc_feature: MA Experiment ID: 108579 Result: Up-regulated in Transcription
  misc_feature: MA Experiment 108579 PARAMETER Experiment Name: At_4deg_Cold_cDNA_P Parameter: Temperature (deg C) Value: 4 vs. 22
  misc_feature: MA Experiment 108579 PARAMETER Experiment Name: At_4deg_Cold_cDNA_P Parameter: Timepoint (hr) Value: 6
  misc_feature: MA Experiment 108579 PARAMETER Experiment Name: At_4deg_Cold_cDNA_P Parameter: Tissue Value: Aerial
  misc_feature: MA Experiment ID: 108585 Result: Up-regulated in Transcription
  misc_feature: MA Experiment 108585 PARAMETER Experiment Name: At_5mM_NaNP_cDNA_P Parameter: Timepoint (hr) Value: 6
  misc_feature: MA Experiment 108585 PARAMETER Experiment Name: At_5mM_NaNP_cDNA_P Parameter: Tissue Value: Aerial
  misc_feature: MA Experiment 108585 PARAMETER Experiment Name: At_5mM_NaNP_cDNA_P Parameter: Treatment Value: null
  misc_feature: MA Experiment ID: 108667 Result: Up-regulated in Transcription
  misc_feature: MA Experiment 108667 PARAMETER Experiment Name: At_2mM_SA_cDNA_P Parameter: Plant Line Value: WS
  misc_feature: MA Experiment 108667 PARAMETER Experiment Name: At_2mM_SA_cDNA_P Parameter: Timepoint (hr) Value: 1
  misc_feature: MA Experiment 108667 PARAMETER Experiment Name: At_2mM_SA_cDNA_P Parameter: Treatment Value: 2mM SA vs. No Treatment
  misc_feature: MA Experiment ID: 108668 Result: Up-regulated in Transcription
  misc_feature: MA Experiment 108668 PARAMETER Experiment Name: At_2mM_SA_cDNA_P Parameter: Plant Line Value: WS
  misc_feature: MA Experiment 108668 PARAMETER Experiment Name: At_2mM_SA_cDNA_P Parameter: Timepoint (hr) Value: 6
  misc_feature: MA Experiment 108668 PARAMETER Experiment Name: At_2mM_SA_cDNA_P Parameter: Treatment Value: 2mM SA vs. No Treatment
  misc_feature: MA Experiment ID: 20000111 Result: Up-regulated in Transcription
  misc_feature: MA Experiment 20000111 PARAMETER Experiment Name: At_42deg_Heat_cDNA_P Parameter: Temperature (deg C) Value: 42 vs. 22
  misc_feature: MA Experiment 20000111 PARAMETER Experiment Name: At_42deg_Heat_cDNA_P Parameter: Timepoint (hr) Value: 6
  misc_feature: MA Experiment 20000111 PARAMETER Experiment Name: At_42deg_Heat_cDNA_P Parameter: Tissue Value: Aerial
  misc_feature: MA Experiment ID: 20000112 Result: Up-regulated in Transcription
  misc_feature: MA Experiment 20000112 PARAMETER Experiment Name: At_42deg_Heat_cDNA_P Parameter: Temperature (deg C) Value: 42 vs. 22
  misc_feature: MA Experiment 20000112 PARAMETER Experiment Name: At_42deg_Heat_cDNA_P Parameter: Timepoint (hr) Value: 2
  misc_feature: MA Experiment 20000112 PARAMETER Experiment Name: At_42deg_Heat_cDNA_P Parameter: Tissue Value: Aerial
  misc_feature: MA Experiment ID: 20000113 Result: Up-regulated in Transcription
  misc_feature: MA Experiment 20000113 PARAMETER Experiment Name: At_42deg_Heat_cDNA_P Parameter: Temperature (deg C) Value: 42 vs. 22
  misc_feature: MA Experiment 20000113 PARAMETER Experiment Name: At_42deg_Heat_cDNA_P Parameter: Timepoint (hr) Value: 8
  misc_feature: MA Experiment 20000113 PARAMETER Experiment Name: At_42deg_Heat_cDNA_P Parameter: Tissue Value: Aerial
  misc_feature: MA Experiment ID: 20000144 Result: Up-regulated in Transcription
  misc_feature: MA Experiment 20000144 PARAMETER Experiment Name: At_42deg_Heat_cDNA_P Parameter: Temperature (deg C) Value: 42 vs. 22
  misc_feature: MA Experiment 20000144 PARAMETER Experiment Name: At_42deg_Heat_cDNA_P Parameter: Timepoint (hr) Value: 1
  misc_feature: MA Experiment 20000144 PARAMETER Experiment Name: At_42deg_Heat_cDNA_P Parameter: Tissue Value: Aerial
  misc_feature: MA Experiment ID: 20000173 Result: Up-regulated in Transcription
  misc_feature: MA Experiment 20000173 PARAMETER Experiment Name: At_42deg_Heat_P Parameter: Age (day) Value: 14
  misc_feature: MA Experiment 20000173 PARAMETER Experiment Name: At_42deg_Heat_P Parameter: Organism Value: A. thaliana
  misc_feature: MA Experiment 20000173 PARAMETER Experiment Name: At_42deg_Heat_P Parameter: Plant Line Value: WS
  misc_feature: MA Experiment 20000173 PARAMETER Experiment Name: At_42deg_Heat_P Parameter: Temperature (deg C) Value: 42 vs. 22
  misc_feature: MA Experiment 20000173 PARAMETER Experiment Name: At_42deg_Heat_P Parameter: Timepoint (hr) Value: 6
  misc_feature: MA Experiment 20000173 PARAMETER Experiment Name: At_42deg_Heat_P Parameter: Tissue Value: Aerial
  misc_feature: MA Experiment ID: 20000179 Result: Down-regulated in Transcription
  misc_feature: MA Experiment 20000179 PARAMETER Experiment Name: At_Germinating_Seeds_P Parameter: Age (hr) Value: 6 vs. 0
  misc_feature: MA Experiment 20000179 PARAMETER Experiment Name: At_Germinating_Seeds_P Parameter: Tissue Value: Germinating Seeds
  misc_feature: MA Experiment ID: 20000182 Result: Up-regulated in Transcription
  misc_feature: MA Experiment 20000182 PARAMETER Experiment Name: At_2mM_SA_P Parameter: Age (day) Value: 14
  misc_feature: MA Experiment 20000182 PARAMETER Experiment Name: At_2mM_SA_P Parameter: Organism Value: A. thaliana
  misc_feature: MA Experiment 20000182 PARAMETER Experiment Name: At_2mM_SA_P Parameter: Plant Line Value: WS
  misc_feature: MA Experiment 20000182 PARAMETER Experiment Name: At_2mM_SA_P Parameter: Timepoint (hr) Value: 6
  misc_feature: MA Experiment 20000182 PARAMETER Experiment Name: At_2mM_SA_P Parameter: Tissue Value: Aerial
  misc_feature: MA Experiment 20000182 PARAMETER Experiment Name: At_2mM_SA_P Parameter: Treatment Value: 2mM SA vs. No Treatment
  misc_feature: MA Experiment ID: 20000213 Result: Up-regulated in Transcription
  misc_feature: MA Experiment 20000213 PARAMETER Experiment Name: At_4deg_Cold_P Parameter: Timepoint (hr) Value: 2
  misc_feature: MA Experiment ID: 20000224 Result: Down-regulated in Transcription
  misc_feature: MA Experiment ID: 20000437 Result: Up-regulated in Transcription
  misc_feature: MA Experiment 20000437 PARAMETER Experiment Name: At_Drought_P Parameter: Age (day) Value: 8
  misc_feature: MA Experiment 20000437 PARAMETER Experiment Name: At_Drought_P Parameter: Organism Value: A. thaliana
  misc_feature: MA Experiment 20000437 PARAMETER Experiment Name: At_Drought_P Parameter: Plant Line Value: WS
  misc_feature: MA Experiment 20000437 PARAMETER Experiment Name: At_Drought_P Parameter: Timepoint (hr) Value: 24
  misc_feature: MA Experiment 20000437 PARAMETER Experiment Name: At_Drought_P Parameter: Tissue Value: Whole Plant
  misc_feature: MA Experiment 20000437 PARAMETER Experiment Name: At_Drought_P Parameter: Treatment Value: Drought vs. No Drought
  misc_feature: MA Experiment ID: 20000438 Result: Down-regulated in Transcription
  misc_feature: MA Experiment 20000438 PARAMETER Experiment Name: At_Shoots__P Parameter: Age (day) Value: 14
  misc_feature: MA Experiment 20000438 PARAMETER Experiment Name: At_Shoots__P Parameter: Tissue Value: Shoots vs. Whole Plant
  misc_feature: MA Experiment ID: 20000439 Result: Down-regulated in Transcription
  misc_feature: MA Experiment 20000439 PARAMETER Experiment Name: At_Roots__P Parameter: Age (day) Value: 14 vs. 21
  misc_feature: MA Experiment 20000439 PARAMETER Experiment Name: At_Roots__P Parameter: Organism Value: A. thaliana
  misc_feature: MA Experiment 20000439 PARAMETER Experiment Name: At_Roots__P Parameter: Tissue Value: Roots vs. Whole Plant
  misc_feature: MA Experiment ID: 20001557 Result: Up-regulated in Transcription
  misc_feature: MA Experiment 20001557 PARAMETER Experiment Name: At_Drought_Soil_Dry_P Parameter: Age (day) Value: 27
  misc_feature: MA Experiment 20001557 PARAMETER Experiment Name: At_Drought_Soil_Dry_P Parameter: Organism Value: A. thaliana
  misc_feature: MA Experiment 20001557 PARAMETER Experiment Name: At_Drought_Soil_Dry_P Parameter: Plant Line Value: WS
  misc_feature: MA Experiment 20001557 PARAMETER Experiment Name: At_Drought_Soil_Dry_P Parameter: Post Timepoint (hr) Value: 3
  misc_feature: MA Experiment 20001557 PARAMETER Experiment Name: At_Drought_Soil_Dry_P Parameter: Post-Treatment Value: Re-Water vs. No Drought
  misc_feature: MA Experiment 20001557 PARAMETER Experiment Name: At_Drought_Soil_Dry_P Parameter: Timepoint (day) Value: 13
  misc_feature: MA Experiment 20001557 PARAMETER Experiment Name: At_Drought_Soil_Dry_P Parameter: Treatment Value: Drought vs. No Drought
  misc_feature: MA Experiment ID: 20001905 Result: Up-regulated in Transcription
  misc_feature: MA Experiment 20001905 PARAMETER Experiment Name: At_Drought_Reproduction_P Parameter: Age (day) Value: 40
  misc_feature: MA Experiment 20001905 PARAMETER Experiment Name: At_Drought_Reproduction_P Parameter: Organism Value: A. thaliana
  misc_feature: MA Experiment 20001905 PARAMETER Experiment Name: At_Drought_Reproduction_P Parameter: Plant Line Value: WS
  misc_feature: MA Experiment 20001905 PARAMETER Experiment Name: At_Drought_Reproduction_P Parameter: Timepoint (day) Value: 10
  misc_feature: MA Experiment 20001905 PARAMETER Experiment Name: At_Drought_Reproduction_P Parameter: Tissue Value: Rosettes
  misc_feature: MA Experiment 20001905 PARAMETER Experiment Name: At_Drought_Reproduction_P Parameter: Treatment Value: Drought vs. No Drought
agaaccaaggaaaaggaaagagtcggcgaaaaagatataaaaaagccagcgagagagacaaagggtttttgagtatctcgcgaggttttacatagatttctccattatggattcgatgatgaatcagaagactgttttggctgtgacggatgatgtggtgttacctgttagctctgttttagctataatgaaagagcttggaaaggaagtgattgagagttttgatcctctgattattactcaagcatccacaataaatcagtttcctttggatgcttcctctgtggaggcggtattagccatttccaaaacatctgatttcccaagtgataaaatatgtggtgagttctcaagaatcttgaagcctggcggcacggtttctgtgtgcaaagttttggagggtgaaacgggagaaattcaacagaccattcaaaggagagtgacattggctggttttcttgagccacagtgtcttgatttgaaatcaattaaattgtctacgttcagtttatcctttgggattaaggcaaagaaaccttcttggaagattggttcatcatttgctctcaaaaagcctgtaacaaatctctttaagattgatctagatgacgacgtggatcttattgatgaagattctcttttaacagaggaggacttgatgaagccacagcttcctgttgccagcggttgtgagaccactaaaaaagcttgcaagaactgcgtctgtggtagagctgaaattgaggagaaagctgtgaagctgggcctcacagaggatcaaatcgagaatccacaatcatcatgcggcagctgtgggctcggtgatgccttccgctgcggtacatgcccttacaagggtctgccacccttcaaattaggcgagaaggtaaccctatctcaaaacttccttgaagctgacatataagcatgtgaaaggcatcttcatacatgggtgtttctcgccgaggccaaaaccttttgctaatcgcagagtagtttcatcatttactttgtgccttttcgtataatttgtttgttggtacttcttttattttgtggctctaaaagcttgtagaatattgtttgggttgcccacaaagcacacaccttagtatcaatgaagaacggttttgcc

SEQ ID NO: 36492 - protein, 272 aa, Arabidopsis thaliana; identical to SEQ ID NO: 27277
  peptide (1)..(272): Ceres Seq. ID no. 13491496
  misc_feature (114)..(265): Pfam Name: Protein of unknown function (DUF689) Pfam Description: Protein of unknown function (DUF689)
  misc_feature (167)..(268): Homolog of NCBI NO: 7959722 NR Description: PRO0915 [Homo sapiens]
  misc_feature (169)..(264): Homolog of NCBI NO: 17555168 NR Description: Lethal 35Bg like (25.6 kD) [Caenorhabditis
  misc_feature (131)..(268): Homolog of NCBI NO: 3252825 NR Description: Unknown gene product [Homo sapiens]
  misc_feature (13)..(272): Homolog of NCBI NO: 29841358 NR Description: hypothetical protein in Schizosaccharomyces pombe
  misc_feature (111)..(272): Homolog of NCBI NO: 17933742 NR Description: lethal (2) 35Bg CG4180-PA [Drosophila
  misc_feature (5)..(272): Homolog of NCBI NO: 2293332 NR Description: unknown [Dictyostelium discoideum]
  misc_feature (11)..(272): Homolog of NCBI NO: 38344920 NR Description: OSJNBa0018M05.11 [Oryza sativa (japonica
  misc_feature (4)..(272): Homolog of NCBI NO: 19424097 NR Description: unknown protein [Arabidopsis thaliana]
  misc_feature (4)..(272): Homolog of NCBI NO: 30686798 NR Description: expressed protein [Arabidopsis thaliana]
  misc_feature (1)..(272): Homolog of NCBI NO: 18418605 NR Description: expressed protein [Arabidopsis thaliana]

SEQ ID NO: 36493 - protein, 269 aa, Arabidopsis thaliana; identical to SEQ ID NO: 27278
  peptide (1)..(269): Ceres Seq. ID no. 13491497
  misc_feature (111)..(262): Pfam Name: Protein of unknown function (DUF689) Pfam Description: Protein of unknown function (DUF689)
  misc_feature (164)..(265): Homolog of NCBI NO: 7959722 NR Description: PRO0915 [Homo sapiens]
  misc_feature (166)..(261): Homolog of NCBI NO: 17555168 NR Description: Lethal 35Bg like (25.6 kD) [Caenorhabditis
  misc_feature (128)..(265): Homolog of NCBI NO: 3252825 NR Description: Unknown gene product [Homo sapiens]
  misc_feature (10)..(269): Homolog of NCBI NO: 29841358 NR Description: hypothetical protein in Schizosaccharomyces pombe
  misc_feature (108)..(269): Homolog of NCBI NO: 17933742 NR Description: lethal (2) 35Bg CG4180-PA [Drosophila
  misc_feature (2)..(269): Homolog of NCBI NO: 2293332 NR Description: unknown [Dictyostelium discoideum]
  misc_feature (8)..(269): Homolog of NCBI NO: 38344920 NR Description: OSJNBa0018M05.11 [Oryza sativa (japonica
  misc_feature (1)..(269): Homolog of NCBI NO: 19424097 NR Description: unknown protein [Arabidopsis thaliana]
  misc_feature (1)..(269): Homolog of NCBI NO: 30686798 NR Description: expressed protein [Arabidopsis thaliana]
  misc_feature (1)..(269): Homolog of NCBI NO: 18418605 NR Description: expressed protein [Arabidopsis thaliana]

SEQ ID NO: 36494 - protein, 268 aa, Arabidopsis thaliana
  peptide (1)..(268): Ceres Seq. ID no. 13491498
  misc_feature (110)..(261): Pfam Name: Protein of unknown function (DUF689) Pfam Description: Protein of unknown function (DUF689)
  misc_feature (163)..(264): Homolog of NCBI NO: 7959722 NR Description: PRO0915 [Homo sapiens]
  misc_feature (165)..(260): Homolog of NCBI NO: 17555168 NR Description: Lethal 35Bg like (25.6 kD) [Caenorhabditis
  misc_feature (127)..(264): Homolog of NCBI NO: 3252825 NR Description: Unknown gene product [Homo sapiens]
  misc_feature (9)..(268): Homolog of NCBI NO: 29841358 NR Description: hypothetical protein in Schizosaccharomyces pombe
  misc_feature (107)..(268): Homolog of NCBI NO: 17933742 NR Description: lethal (2) 35Bg CG4180-PA [Drosophila
  misc_feature (1)..(268): Homolog of NCBI NO: 2293332 NR Description: unknown [Dictyostelium discoideum]
  misc_feature (7)..(268): Homolog of NCBI NO: 38344920 NR Description: OSJNBa0018M05.11 [Oryza sativa (japonica
  misc_feature (1)..(268): Homolog of NCBI NO: 19424097 NR Description: unknown protein [Arabidopsis thaliana]
  misc_feature (1)..(268): Homolog of NCBI NO: 30686798 NR Description: expressed protein [Arabidopsis thaliana]
  misc_feature (1)..(268): Homolog of NCBI NO: 18418605 NR Description: expressed protein [Arabidopsis thaliana]
MNQKTVLAVTDDVVLPVSSVLAIMKELGKEVIESFDPLIITQASTINQFPLDASSVEAVLAISKTSDFPSDKICGEFSRILKPGGTVSVCKVLEGETGEIQQTIQRRVTLAGFLEPQCLDLKSIKLSTFSLSFGIKAKKPSWKIGSSFALKKPVTNLFKIDLDDDVDLIDEDSLLTEEDLMKPQLPVASGCETTKKACKNCVCGRAEIEEKAVKLGLTEDQIENPQSSCGSCGLGDAFRCGTCPYKGLPPFKLGEKVTLSQNFLEADI

SEQ ID NO: 36495 - DNA, 1071 bp, Arabidopsis thaliana
  misc_feature (1)..(1071): Ceres Seq. ID no. 12337110
  misc_feature: MA Experiment ID: 108462 Result: Up-regulated in Transcription
  misc_feature: MA Experiment 108462 PARAMETER Experiment Name: At_Germinating_Seeds_cDNA_P Parameter: Age (day) Value: 2 vs. 0
  misc_feature: MA Experiment 108462 PARAMETER Experiment Name: At_Germinating_Seeds_cDNA_P Parameter: Tissue Value: Germinating Seeds
  misc_feature: MA Experiment ID: 108463 Result: Up-regulated in Transcription
  misc_feature: MA Experiment 108463 PARAMETER Experiment Name: At_Germinating_Seeds_cDNA_P Parameter: Age (day) Value: 3 vs. 0
  misc_feature: MA Experiment 108463 PARAMETER Experiment Name: At_Germinating_Seeds_cDNA_P Parameter: Tissue Value: Germinating Seeds
  misc_feature: MA Experiment ID: 108464 Result: Up-regulated in Transcription
  misc_feature: MA Experiment 108464 PARAMETER Experiment Name: At_Germinating_Seeds_cDNA_P Parameter: Age (day) Value: 4 vs. 0
  misc_feature: MA Experiment 108464 PARAMETER Experiment Name: At_Germinating_Seeds_cDNA_P Parameter: Tissue Value: Germinating Seeds
  misc_feature: MA Experiment ID: 108469 Result: Up-regulated in Transcription
  misc_feature: MA Experiment ID: 108594 Result: Down-regulated in Transcription
  misc_feature: MA Experiment 108594 PARAMETER Experiment Name: At_Ler-rhl_Root_cDNA_P Parameter: Plant Line Value: null
  misc_feature: MA Experiment ID: 108595 Result: Up-regulated in Transcription
  misc_feature: MA Experiment 108595 PARAMETER Experiment Name: At_Ler-pi_Ovule_cDNA_P Parameter: Plant Line Value: null
  misc_feature: MA Experiment ID: 108667 Result: Up-regulated in Transcription
  misc_feature: MA Experiment 108667 PARAMETER Experiment Name: At_2mM_SA_cDNA_P Parameter: Plant Line Value: WS
  misc_feature: MA Experiment 108667 PARAMETER Experiment Name: At_2mM_SA_cDNA_P Parameter: Timepoint (hr) Value: 1
  misc_feature: MA Experiment 108667 PARAMETER Experiment Name: At_2mM_SA_cDNA_P Parameter: Treatment Value: 2mM SA vs. No Treatment
  misc_feature: MA Experiment ID: 108668 Result: Up-regulated in Transcription
  misc_feature: MA Experiment 108668 PARAMETER Experiment Name: At_2mM_SA_cDNA_P Parameter: Plant Line Value: WS
  misc_feature: MA Experiment 108668 PARAMETER Experiment Name: At_2mM_SA_cDNA_P Parameter: Timepoint (hr) Value: 6
  misc_feature: MA Experiment 108668 PARAMETER Experiment Name: At_2mM_SA_cDNA_P Parameter: Treatment Value: 2mM SA vs. No Treatment
  misc_feature: MA Experiment ID: 20000182 Result: Up-regulated in Transcription
  misc_feature: MA Experiment 20000182 PARAMETER Experiment Name: At_2mM_SA_P Parameter: Age (day) Value: 14
  misc_feature: MA Experiment 20000182 PARAMETER Experiment Name: At_2mM_SA_P Parameter: Organism Value: A. thaliana
  misc_feature: MA Experiment 20000182 PARAMETER Experiment Name: At_2mM_SA_P Parameter: Plant Line Value: WS
  misc_feature: MA Experiment 20000182 PARAMETER Experiment Name: At_2mM_SA_P Parameter: Timepoint (hr) Value: 6
  misc_feature: MA Experiment 20000182 PARAMETER Experiment Name: At_2mM_SA_P Parameter: Tissue Value: Aerial
  misc_feature: MA Experiment 20000182 PARAMETER Experiment Name: At_2mM_SA_P Parameter: Treatment Value: 2mM SA vs. No Treatment
  misc_feature: MA Experiment ID: 20000185 Result: Up-regulated in Transcription
  misc_feature: MA Experiment 20000185 PARAMETER Experiment Name: At_Roots__P Parameter: Age (day) Value: 7 vs. 21
  misc_feature: MA Experiment 20000185 PARAMETER Experiment Name: At_Roots__P Parameter: Organism Value: A. thaliana
  misc_feature: MA Experiment 20000185 PARAMETER Experiment Name: At_Roots__P Parameter: Tissue Value: Roots vs. Whole Plant
  misc_feature: MA Experiment ID: 20000439 Result: Up-regulated in Transcription
  misc_feature: MA Experiment 20000439 PARAMETER Experiment Name: At_Roots__P Parameter: Age (day) Value: 14 vs. 21
  misc_feature: MA Experiment 20000439 PARAMETER Experiment Name: At_Roots__P Parameter: Organism Value: A. thaliana
  misc_feature: MA Experiment 20000439 PARAMETER Experiment Name: At_Roots__P Parameter: Tissue Value: Roots vs. Whole Plant
gttcttttccacagcattgcaacatgaagagacattcttgttgttacaaacaaaagctgagaaaaggtctttggtctcctgaagaagatgagaaacttctcaattacattaccaaacatggccatggttgctggagttctgtccctaaactcgggtctcgagagatgtggaaagagctgtagactcagatggatcaattacttaagacctgatttaaagagaggagctttctcttcagaggaacagaatctcattgtcgagcttcatgctgttcttggaaacagatggtcgcaaattgctgcgaggcttcccgggagaaccgacaacgagataaagaacttgtggaattcgtgcattaagaagaagctgatgaagaaaggcattgaccctattacacataaacccctctccgaggttggtaaagaaacaaacagaagcgacaataacaattccacaagtttttcctcagaaactaatcaagacttgtttgtcaagaaaacgtctgattttgccgagtattctgcgtttcagaaagaagaatccaactctgtttcactcagaaattcgctctcttccatgatcccaacgcaattcaacatcgacgatggttctgtctcaaatgcgggttttgatacacaagtatgcgtgaaaccctcgattattcttcttcctcctccaaacaacacttcaagcactgtctctggacaggatcatgtaaacgtgtcagagcctaattgtgaatcaaacagtggaaccacaagccacctcaacaatcccggtatggaagaaatgaaatggtccgaggagtacctaaacgaatcgttattctctacccaagtttacgtgaaatcagagacggatttcaactccaacattgcctttccttggagccaaagccaagcttgtgacgtattccccaaggatcttcagagaatggccttctcttttggtggtcagaccctttagtttctttttcttatcagatttagacatattgatacgtgtaatgaatggatcaaatgttctatttggccatacgttaaaaaaataaaaaagcacaatcctttcctg

SEQ ID NO: 36496 - protein, 292 aa, Arabidopsis thaliana
  peptide (1)..(292): Ceres Seq. ID no. 12337111
  misc_feature (23)..(88): Homolog of NCBI NO: 9954739 NR Description: Putative myb transcription factor - partial
  misc_feature (22)..(109): Homolog of NCBI NO: 28628949 NR Description: MYB2 [Dendrobium sp. XMW-2002-2]
  misc_feature (23)..(107): Homolog of NCBI NO: 7446174 NR Description: transcription factor MYB4 - Arabidopsis thaliana
  misc_feature (23)..(129): Homolog of NCBI NO: 7438352 NR Description: transcription factor MYB4 homolog T15B16.7 -
  misc_feature (22)..(129): Homolog of NCBI NO: 15234262 NR Description: myb family transcription factor
  misc_feature (22)..(130): Homolog of NCBI NO: 34902542 NR Description: putative transcription factor (myb)
  misc_feature (22)..(269): Homolog of NCBI NO: 25294104 NR Description: hypothetical protein [imported] - Arabidopsis
  misc_feature (22)..(269): Homolog of NCBI NO: 22329445 NR Description: myb family transcription factor
  misc_feature (53)..(292): Homolog of NCBI NO: 3941464 NR Description: putative transcription factor [Arabidopsis
  misc_feature (1)..(292): Homolog of NCBI NO: 15223612 NR Description: myb family transcription factor
MRNFSITLPNMAMVAGVLSLNSGLERCGKSCRLRWINYLRPDLKRGAFSSEEQNLIVELHAVLGNRWSQIAARLPGRTDNEIKNLWNSCIKKKLMKKGIDPITHKPLSEVGKETNRSDNNNSTSFSSETNQDLFVKKTSDFAEYSAFQKEESNSVSLRNSLSSMIPTQFNIDDGSVSNAGFDTQVCVKPSIILLPPPNNTSSTVSGQDHVNVSEPNCESNSGTTSHLNNPGMEEMKWSEEYLNESLFSTQVYVKSETDFNSNIAFPWSQSQACDVFPKDLQRMAFSFGGQTL

SEQ ID NO: 36497 - protein, 282 aa, Arabidopsis thaliana
  peptide (1)..(282): Ceres Seq. ID no. 12337112
  misc_feature (13)..(78): Homolog of NCBI NO: 9954739 NR Description: Putative myb transcription factor - partial
  misc_feature (12)..(99): Homolog of NCBI NO: 28628949 NR Description: MYB2 [Dendrobium sp. XMW-2002-2]
  misc_feature (13)..(97): Homolog of NCBI NO: 7446174 NR Description: transcription factor MYB4 - Arabidopsis thaliana
  misc_feature (13)..(119): Homolog of NCBI NO: 7438352 NR Description: transcription factor MYB4 homolog T15B16.7 -
  misc_feature (12)..(119): Homolog of NCBI NO: 15234262 NR Description: myb family transcription factor
  misc_feature (12)..(120): Homolog of NCBI NO: 34902542 NR Description: putative transcription factor (myb)
  misc_feature (12)..(259): Homolog of NCBI NO: 25294104 NR Description: hypothetical protein [imported] - Arabidopsis
  misc_feature (12)..(259): Homolog of NCBI NO: 22329445 NR Description: myb family transcription factor
  misc_feature (43)..(282): Homolog of NCBI NO: 3941464 NR Description: putative transcription factor [Arabidopsis
  misc_feature (1)..(282): Homolog of NCBI NO: 15223612 NR Description: myb family transcription factor
MAMVAGVLSLNSGLERCGKSCRLRWINYLRPDLKRGAFSSEEQNLIVELHAVLGNRWSQIAARLPGRTDNEIKNLWNSCIKKKLMKKGIDPITHKPLSEVGKETNRSDNNNSTSFSSETNQDLFVKKTSDFAEYSAFQKEESNSVSLRNSLSSMIPTQFNIDDGSVSNAGFDTQVCVKPSIILLPPPNNTSSTVSGQDHVNVSEPNCESNSGTTSHLNNPGMEEMKWSEEYLNESLFSTQVYVKSETDFNSNIAFPWSQSQACDVFPKDLQRMAFSFGGQTL

SEQ ID NO: 36498 - protein, 280 aa, Arabidopsis thaliana
  peptide (1)..(280): Ceres Seq. ID no. 12337113
  misc_feature (11)..(76): Homolog of NCBI NO: 9954739 NR Description: Putative myb transcription factor - partial
  misc_feature (10)..(97): Homolog of NCBI NO: 28628949 NR Description: MYB2 [Dendrobium sp. XMW-2002-2]
  misc_feature (11)..(95): Homolog of NCBI NO: 7446174 NR Description: transcription factor MYB4 - Arabidopsis thaliana
  misc_feature (11)..(117): Homolog of NCBI NO: 7438352 NR Description: transcription factor MYB4 homolog T15B16.7 -
  misc_feature (10)..(117): Homolog of NCBI NO: 15234262 NR Description: myb family transcription factor
  misc_feature (10)..(118): Homolog of NCBI NO: 34902542 NR Description: putative transcription factor (myb)
  misc_feature (10)..(257): Homolog of NCBI NO: 25294104 NR Description: hypothetical protein [imported] - Arabidopsis
  misc_feature (10)..(257): Homolog of NCBI NO: 22329445 NR Description: myb family transcription factor
  misc_feature (41)..(280): Homolog of NCBI NO: 3941464 NR Description: putative transcription factor [Arabidopsis
  misc_feature (1)..(280): Homolog of NCBI NO: 15223612 NR Description: myb family transcription factor
MVAGVLSLNSGLERCGKSCRLRWINYLRPDLKRGAFSSEEQNLIVELHAVLGNRWSQIAARLPGRTDNEIKNLWNSCIKKKLMKKGIDPITHKPLSEVGKETNRSDNNNSTSFSSETNQDLFVKKTSDFAEYSAFQKEESNSVSLRNSLSSMIPTQFNIDDGSVSNAGFDTQVCVKPSIILLPPPNNTSSTVSGQDHVNVSEPNCESNSGTTSHLNNPGMEEMKWSEEYLNESLFSTQVYVKSETDFNSNIAFPWSQSQACDVFPKDLQRMAFSFGGQTL

SEQ ID NO: 36499 - DNA, 1432 bp, Arabidopsis thaliana
  misc_feature (1)..(1432): Ceres Seq. ID no. 12560406
  misc_feature: MA Experiment ID: 20000180 Result: Down-regulated in Transcription
  misc_feature: MA Experiment 20000180 PARAMETER Experiment Name: At_Germinating_Seeds_P Parameter: Age (hr) Value: 24 vs. 0
  misc_feature: MA Experiment 20000180 PARAMETER Experiment Name: At_Germinating_Seeds_P Parameter: Tissue Value: Germinating Seeds
  misc_feature: MA Experiment ID: 20000794 Result: Down-regulated in Transcription
  misc_feature: MA Experiment 20000794 PARAMETER Experiment Name: At_Petals_P Parameter: Age (day) Value: 23-25 days
  misc_feature: MA Experiment 20000794 PARAMETER Experiment Name: At_Petals_P Parameter: Plant Line Value: WS
  misc_feature: MA Experiment 20000794 PARAMETER Experiment Name: At_Petals_P Parameter: Tissue Value: Petals vs. Whole plant
  misc_feature: MA Experiment ID: 20001451 Result: Down-regulated in Transcription
  misc_feature: MA Experiment 20001451 PARAMETER Experiment Name: At_Far-red-induction_P Parameter: Age (day) Value: 7
  misc_feature: MA Experiment 20001451 PARAMETER Experiment Name: At_Far-red-induction_P Parameter: Light Value: Far-red vs. White
  misc_feature: MA Experiment 20001451 PARAMETER Experiment Name: At_Far-red-induction_P Parameter: Organism Value: A. thaliana
  misc_feature: MA Experiment 20001451 PARAMETER Experiment Name: At_Far-red-induction_P Parameter: Plant Line Value: Columbia
  misc_feature: MA Experiment 20001451 PARAMETER Experiment Name: At_Far-red-induction_P Parameter: Timepoint (hr) Value: 24
  misc_feature: MA Experiment 20001451 PARAMETER Experiment Name: At_Far-red-induction_P Parameter: Tissue Value: Whole Plant
  misc_feature: MA Experiment ID: 20001557 Result: Up-regulated in Transcription
  misc_feature: MA Experiment 20001557 PARAMETER Experiment Name: At_Drought_Soil_Dry_P Parameter: Age (day) Value: 27
  misc_feature: MA Experiment 20001557 PARAMETER Experiment Name: At_Drought_Soil_Dry_P Parameter: Organism Value: A. thaliana
  misc_feature: MA Experiment 20001557 PARAMETER Experiment Name: At_Drought_Soil_Dry_P Parameter: Plant Line Value: WS
  misc_feature: MA Experiment 20001557 PARAMETER Experiment Name: At_Drought_Soil_Dry_P Parameter: Post Timepoint (hr) Value: 3
  misc_feature: MA Experiment 20001557 PARAMETER Experiment Name: At_Drought_Soil_Dry_P Parameter: Post-Treatment Value: Re-Water vs. No Drought
  misc_feature: MA Experiment 20001557 PARAMETER Experiment Name: At_Drought_Soil_Dry_P Parameter: Timepoint (day) Value: 13
  misc_feature: MA Experiment 20001557 PARAMETER Experiment Name: At_Drought_Soil_Dry_P Parameter: Treatment Value: Drought vs. No Drought
atatgtatgtgtgtgttatacaaaccctactctggaaaagtcctaattcctaaagctactttcaacaaagacgcctgaagcatctgcctatagtgaaagatcagaagactcttcaaccaaaatcttattctcatccaccatggaagctctcttcacttcaacacacacacccaatttacagactaagcctctcctcaaatctccgctgcccacttcttcccagtcttcgtgttggttttgtaattcgctacccaaaacgcaattcccgaagctgagactcagtaatggatcaagtcacgggcttcgtatacaagctctcttacgtaacgagacgccaagtgaaggtgaagataataatgggtttggtttttttcctggggatatcttctctttatcacaggaaaagctcgggagtaatagcaatggtgaaacttctcatagtgtaatcgatgtggaggcatctcttgcacatcctcaaggtggtggaggaaatcgagctgggctttttagaactccaatatctggtggtgttcaaaatgctacatcagctcatgctttacctcggcctgctttagctgtacggaacttgttggaacaggctaggtttgctcatctgtgcacagtgatgtccaaaatgcaccaccgcagggaagggtacccatttggctcattggtagattttgcacctgatcggatggggcatccaatatttttgttttcaccgctggccatccacacacgaaatctcttgaatgaacctagatgcagcctcgttgttcagatacccggatggagtggcttatcgaatgcaagagtgacattatttggtgatgtgtacccattgtcagaggatgaacaggagtgggcccataagcaatatattgcaaagcacccgcacgggccttcagagcaatggggaaactttcattattttagaatgcagaacataagtgatatatatttcattggaggctttggcacggtcgcttgggttgatgtcaaagagtatgaaggtttacaaccagataagatagctgttgatggtggtgagcggaacctcaaggaactaaatgccatcttctcgaaaccgctgagagagctactgtctactgaatcagaggtagacgatgctgctctcatttcaatagatagcaaaggaatagatgtacgggttcgtcaaggtgctcagtttaacatacaaaggctagcatttgaggaaggtcatggtgttgagacactagaagaagctaagtctgcattatggaaagtgttggagaaggtcaagctgaatttgcagaaatgacaagccccttttgctactttatacgggtccttttaaaatagtaggaccaataaaatgttgtttggttcctcttttcttcttcttgactagctgaaattttgtagtttctttcttttatcttttgacctc

SEQ ID NO: 36500 - protein, 387 aa, Arabidopsis thaliana
  peptide (1)..(387): Ceres Seq. ID no. 12560407
  misc_feature (107)..(382): Homolog of NCBI NO: 34393557 NR Description: putative root border cell-specific protein
  misc_feature (107)..(299): Homolog of NCBI NO: 6006853 NR Description: unknown protein [Arabidopsis thaliana]
  misc_feature (107)..(358): Homolog of NCBI NO: 30678976 NR Description: auxin-regulated protein [Arabidopsis thaliana]
  misc_feature (107)..(384): Homolog of NCBI NO: 18396698 NR Description: auxin-regulated protein
  misc_feature (3)..(153): Homolog of NCBI NO: 12321683 NR Description: unknown protein, 3' partial [Arabidopsis thaliana]
  misc_feature (271)..(387): Homolog of NCBI NO: 11994274 NR Description: gb|AAF00629.1~gene_id:MSA6.18~similar to unknown
  misc_feature (114)..(379): Homolog of NCBI NO: 34905136 NR Description: P0700D12.12 [Oryza sativa (japonica
  misc_feature (3)..(387): Homolog of NCBI NO: 18377805 NR Description: unknown protein [Arabidopsis thaliana]
  misc_feature (3)..(387): Homolog of NCBI NO: 15217955 NR Description: unknown protein
  misc_feature (1)..(387): Homolog of NCBI NO: 15232479 NR Description: unknown protein
MEALFTSTHTPNLQTKPLLKSPLPTSSQSSCWFCNSLPKTQFPKLRLSNGSSHGLRIQALLRNETPSEGEDNNGFGFFPGDIFSLSQEKLGSNSNGETSHSVIDVEASLAHPQGGGGNRAGLFRTPISGGVQNATSAHALPRPALAVRNLLEQARFAHLCTVMSKMHHRREGYPFGSLVDFAPDRMGHPIFLFSPLAIHTRNLLNEPRCSLVVQIPGWSGLSNARVTLFGDVYPLSEDEQEWAHKQYIAKHPHGPSEQWGNFHYFRMQNISDIYFIGGFGTVAWVDVKEYEGLQPDKIAVDGGERNLKELNAIFSKPLRELLSTESEVDDAALISIDSKGIDVRVRQGAQFNIQRLAFEEGHGVETLEEAKSALWKVLEKVKLNLQK

SEQ ID NO: 36501 - protein, 225 aa, Arabidopsis thaliana
  peptide (1)..(225): Ceres Seq. ID no. 12560408
  misc_feature (1)..(186): Homolog of NCBI NO: 15599584 NR Description: hypothetical protein [Pseudomonas aeruginosa
  misc_feature (1)..(220): Homolog of NCBI NO: 34393557 NR Description: putative root border cell-specific protein
  misc_feature (1)..(137): Homolog of NCBI NO: 6006853 NR Description: unknown protein [Arabidopsis thaliana]
  misc_feature (1)..(196): Homolog of NCBI NO: 30678976 NR Description: auxin-regulated protein [Arabidopsis thaliana]
  misc_feature (1)..(222): Homolog of NCBI NO: 18396698 NR Description: auxin-regulated protein
  misc_feature (109)..(225): Homolog of NCBI NO: 11994274 NR Description: gb|AAF00629.1~gene_id:MSA6.18~similar to unknown
  misc_feature (1)..(217): Homolog of NCBI NO: 34905136 NR Description: P0700D12.12 [Oryza sativa (japonica
  misc_feature (1)..(225): Homolog of NCBI NO: 18377805 NR Description: unknown protein [Arabidopsis thaliana]
  misc_feature (1)..(225): Homolog of NCBI NO: 15217955 NR Description: unknown protein
  misc_feature (1)..(225): Homolog of NCBI NO: 15232479 NR Description: unknown protein
MSKMHHRREGYPFGSLVDFAPDRMGHPIFLFSPLAIHTRNLLNEPRCSLVVQIPGWSGLSNARVTLFGDVYPLSEDEQEWAHKQYIAKHPHGPSEQWGNFHYFRMQNISDIYFIGGFGTVAWVDVKEYEGLQPDKIAVDGGERNLKELNAIFSKPLRELLSTESEVDDAALISIDSKGIDVRVRQGAQFNIQRLAFEEGHGVETLEEAKSALWKVLEKVKLNLQK

SEQ ID NO: 36502 - protein, 222 aa, Arabidopsis thaliana
  peptide (1)..(222): Ceres Seq. ID no. 12560409
  misc_feature (1)..(183): Homolog of NCBI NO: 15599584 NR Description: hypothetical protein [Pseudomonas aeruginosa
  misc_feature (1)..(217): Homolog of NCBI NO: 34393557 NR Description: putative root border cell-specific protein
  misc_feature (1)..(134): Homolog of NCBI NO: 6006853 NR Description: unknown protein [Arabidopsis thaliana]
  misc_feature (1)..(193): Homolog of NCBI NO: 30678976 NR Description: auxin-regulated protein [Arabidopsis thaliana]
  misc_feature (1)..(219): Homolog of NCBI NO: 18396698 NR Description: auxin-regulated protein
  misc_feature (106)..(222): Homolog of NCBI NO: 11994274 NR Description: gb|AAF00629.1~gene_id:MSA6.18~similar to unknown
  misc_feature (1)..(214): Homolog of NCBI NO: 34905136 NR Description: P0700D12.12 [Oryza sativa (japonica
  misc_feature (1)..(222): Homolog of NCBI NO: 18377805 NR Description: unknown protein [Arabidopsis thaliana]
  misc_feature (1)..(222): Homolog of NCBI NO: 15217955 NR Description: unknown protein
  misc_feature (1)..(222): Homolog of NCBI NO: 15232479 NR Description: unknown protein
MHHRREGYPFGSLVDFAPDRMGHPIFLFSPLAIHTRNLLNEPRCSLVVQIPGWSGLSNARVTLFGDVYPLSEDEQEWAHKQYIAKHPHGPSEQWGNFHYFRMQNISDIYFIGGFGTVAWVDVKEYEGLQPDKIAVDGGERNLKELNAIFSKPLRELLSTESEVDDAALISIDSKGIDVRVRQGAQFNIQRLAFEEGHGVETLEEAKSALWKVLEKVKLNLQK

SEQ ID NO: 36503 - DNA, 1063 bp, Arabidopsis thaliana
  misc_feature (1)..(1063): Ceres Seq. ID no. 13592884
cctaatcgaaaagttttgttctttcatagtcttctagatctgtagtttttttccgcgaccgcccaaaaaattctctgatcagacggtcgattggatcggagatttaaggtaaagaaaaaatggcgcaacaatcgttgatctacagtttcgtagctcgccacggtgatcctcgttgagttcactgatttcaaaggtaatttcacctcaatcgctgctcagtgcctccagaagcttccgtcttcgaacaacaagttcacctacaactgcgacggtcataccttcaattaccttgtcgaagatggattcacctattgtgttgttgcggttgattctgctgggaggcaaattcccatgtcctttttggaaagagtaaaagaagattttaacaagcgatatggtggtggaaaagctgcaactgctcaagcaaacagcttgaataaggagtttggctctaaactgaaagagcatatgcagtattgcatggatcatcctgatgagattagcaagcttgctaaggtgaaggcgcaagtgtcagaagttaagggtgtaatgatgaaaacattgagaaggttcttgaccgtggtgagaaaattgagcttttggtggacaaaaccgaaaatcttcgctcacaggcacaagatttcagaacaacaggaacgcagatgagaagaaagatgtggcttcagaacatgaagataaaactcatagtgctcgccatcattatcgcactgattctcatcatcgtgctctcagtttgccatgggtttaagtgttaagcccagaaaattcaaaacttctgagatctttctcactcggtacatcgtagtgccttctcttttattgttcgatcttcaatctaatgtttctgcttgaattggttttgtatagatagacatatatgtatgctactcatttgctatattgcttgcatctgatgacattgatcccttgcgaaccagtcagtacttgacaagagatccgaaactattaaatgattttgttgactgaagattgcattgtggtggtgatgataaaaatttgagattgtattgacgattaaaat

SEQ ID NO: 36504 - protein, 104 aa, Arabidopsis thaliana
  peptide (1)..(104): Ceres Seq. ID no. 13592885
  misc_feature (1)..(75): Homolog of NCBI NO: 30685571 NR Description: synaptobrevin -related [Arabidopsis thaliana]
  misc_feature (1)..(75): Homolog of NCBI NO: 33347409 NR Description: synptobrevin-related protein [Pyrus pyrifolia]
  misc_feature (1)..(75): Homolog of NCBI NO: 27805765 NR Description: Putative vesicle-associated membrane protein 726
  misc_feature (1)..(75): Homolog of NCBI NO: 29150380 NR Description: synaptobrevin-like protein
  misc_feature (1)..(75): Homolog of NCBI NO: 15220315 NR Description: synaptobrevin 7B -related [Arabidopsis thaliana]
  misc_feature (1)..(75): Homolog of NCBI NO: 30685375 NR Description: synaptobrevin -related [Arabidopsis thaliana]
  misc_feature (1)..(75): Homolog of NCBI NO: 27805753 NR Description: Vesicle-associated membrane protein 725
  misc_feature (1)..(75): Homolog of NCBI NO: 600710 NR Description: formerly called HAT24; synaptobrevin-related
  misc_feature (1)..(75): Homolog of NCBI NO: 15225796 NR Description: synaptobrevin -related [Arabidopsis thaliana]
  misc_feature (1)..(75): Homolog of NCBI NO: 15220943 NR Description: synaptobrevin 7B -related, 3' partial
MSFLERVKEDFNKRYGGGKAATAQANSLNKEFGSKLKEHMQYCMDHPDEISKLAKVKAQVSEVKGVMMKTLRRFLTVVRKLSFWWTKPKIFAHRHKISEQQERR

SEQ ID NO: 36505 - protein, 65 aa, Arabidopsis thaliana
  peptide (1)..(65): Ceres Seq. ID no. 13592886
  misc_feature (1)..(36): Homolog of NCBI NO: 30685571 NR Description: synaptobrevin -related [Arabidopsis thaliana]
  misc_feature (1)..(36): Homolog of NCBI NO: 33347409 NR Description: synptobrevin-related protein [Pyrus pyrifolia]
  misc_feature (1)..(36): Homolog of NCBI NO: 27805765 NR Description: Putative vesicle-associated membrane protein 726
  misc_feature (1)..(36): Homolog of NCBI NO: 29150380 NR Description: synaptobrevin-like protein
  misc_feature (1)..(36): Homolog of NCBI NO: 15220315 NR Description: synaptobrevin 7B -related [Arabidopsis thaliana]
  misc_feature (1)..(36): Homolog of NCBI NO: 30685375 NR Description: synaptobrevin -related [Arabidopsis thaliana]
  misc_feature (1)..(36): Homolog of NCBI NO: 27805753 NR Description: Vesicle-associated membrane protein 725
  misc_feature (1)..(36): Homolog of NCBI NO: 600710 NR Description: formerly called HAT24; synaptobrevin-related
  misc_feature (1)..(36): Homolog of NCBI NO: 15225796 NR Description: synaptobrevin -related [Arabidopsis thaliana]
  misc_feature (1)..(36): Homolog of NCBI NO: 15220943 NR Description: synaptobrevin 7B -related, 3' partial
MQYCMDHPDEISKLAKVKAQVSEVKGVMMKTLRRFLTVVRKLSFWWTKPKIFAHRHKISEQQERR

SEQ ID NO: 36506 - protein, 61 aa, Arabidopsis thaliana
  peptide (1)..(61): Ceres Seq. ID no. 13592887
  misc_feature (1)..(32): Homolog of NCBI NO: 30685571 NR Description: synaptobrevin -related [Arabidopsis thaliana]
  misc_feature (1)..(32): Homolog of NCBI NO: 33347409 NR Description: synptobrevin-related protein [Pyrus pyrifolia]
  misc_feature (1)..(32): Homolog of NCBI NO: 27805765 NR Description: Putative vesicle-associated membrane protein 726
  misc_feature (1)..(32): Homolog of NCBI NO: 29150380 NR Description: synaptobrevin-like protein
  misc_feature (1)..(32): Homolog of NCBI NO: 15220315 NR Description: synaptobrevin 7B -related [Arabidopsis thaliana]
  misc_feature (1)..(32): Homolog of NCBI NO: 30685375 NR Description: synaptobrevin -related [Arabidopsis thaliana]
  misc_feature (1)..(32): Homolog of NCBI NO: 27805753 NR Description: Vesicle-associated membrane protein 725
  misc_feature (1)..(32): Homolog of NCBI NO: 600710 NR Description: formerly called HAT24; synaptobrevin-related
  misc_feature (1)..(32): Homolog of NCBI NO: 15225796 NR Description: synaptobrevin -related [Arabidopsis thaliana]
  misc_feature (1)..(32): Homolog of NCBI NO: 15220943 NR Description: synaptobrevin 7B -related, 3' partial
MDHPDEISKLAKVKAQVSEVKGVMMKTLRRFLTVVRKLSFWWTKPKIFAHRHKISEQQERR

SEQ ID NO: 36507 - DNA, 783 bp, Arabidopsis thaliana
  misc_feature (1)..(783): Ceres Seq. ID no. 12330563
  misc_feature: MA Experiment ID: 108595 Result: Up-regulated in Transcription
  misc_feature: MA Experiment 108595 PARAMETER Experiment Name: At_Ler-pi_Ovule_cDNA_P Parameter: Plant Line Value: null
  misc_feature: MA Experiment ID: 20000173 Result: Down-regulated in Transcription
  misc_feature: MA Experiment 20000173 PARAMETER Experiment Name: At_42deg_Heat_P Parameter: Age (day) Value: 14
  misc_feature: MA Experiment 20000173 PARAMETER Experiment Name: At_42deg_Heat_P Parameter: Organism Value: A. thaliana
  misc_feature: MA Experiment 20000173 PARAMETER Experiment Name: At_42deg_Heat_P Parameter: Plant Line Value: WS
  misc_feature: MA Experiment 20000173 PARAMETER Experiment Name: At_42deg_Heat_P Parameter: Temperature (deg C) Value: 42 vs. 22
  misc_feature: MA Experiment 20000173 PARAMETER Experiment Name: At_42deg_Heat_P Parameter: Timepoint (hr) Value: 6
  misc_feature: MA Experiment 20000173 PARAMETER Experiment Name: At_42deg_Heat_P Parameter: Tissue Value: Aerial
  misc_feature: MA Experiment ID: 20000495 Result: Down-regulated in Transcription
  misc_feature: MA Experiment 20000495 PARAMETER Experiment Name: At_Guard_Cells_P Parameter: Harvest Date Value: 8/2/2002
  misc_feature: MA Experiment 20000495 PARAMETER Experiment Name: At_Guard_Cells_P Parameter: Organism Value: A. thaliana
  misc_feature: MA Experiment 20000495 PARAMETER Experiment Name: At_Guard_Cells_P Parameter: Tissue Value: Guard Cells vs. Leaves
  misc_feature: MA Experiment ID: 20001451 Result: Down-regulated in Transcription
  misc_feature: MA Experiment 20001451 PARAMETER Experiment Name: At_Far-red-induction_P Parameter: Age (day) Value: 7
  misc_feature: MA Experiment 20001451 PARAMETER Experiment Name: At_Far-red-induction_P Parameter: Light Value: Far-red vs. White
  misc_feature: MA Experiment 20001451 PARAMETER Experiment Name: At_Far-red-induction_P Parameter: Organism Value: A. thaliana
  misc_feature: MA Experiment 20001451 PARAMETER Experiment Name: At_Far-red-induction_P Parameter: Plant Line Value: Columbia
  misc_feature: MA Experiment 20001451 PARAMETER Experiment Name: At_Far-red-induction_P Parameter: Timepoint (hr) Value: 24
  misc_feature: MA Experiment 20001451 PARAMETER Experiment Name: At_Far-red-induction_P Parameter: Tissue Value: Whole Plant
  misc_feature: MA Experiment ID: 20001911 Result: Down-regulated in Transcription
  misc_feature: MA Experiment 20001911 PARAMETER Experiment Name: At_Drought_Reproduction_P Parameter: Age (day) Value: 40
  misc_feature: MA Experiment 20001911 PARAMETER Experiment Name: At_Drought_Reproduction_P Parameter: Organism Value: A. thaliana
  misc_feature: MA Experiment 20001911 PARAMETER Experiment Name: At_Drought_Reproduction_P Parameter: Plant Line Value: WS
  misc_feature: MA Experiment 20001911 PARAMETER Experiment Name: At_Drought_Reproduction_P Parameter: Timepoint (day) Value: 10
  misc_feature: MA Experiment 20001911 PARAMETER Experiment Name: At_Drought_Reproduction_P Parameter: Tissue Value: Flowers
  misc_feature: MA Experiment 20001911 PARAMETER Experiment Name: At_Drought_Reproduction_P Parameter: Treatment Value: Drought vs. No Drought
aaaagacaaaagcagaggaaccgaagtttaagctaacaccgagaaaggatccgtctctccgacgacaaatcagaccacctgcgacctagaacgacacaaggagacatagagaaaatgggtttcttctcttttcttggaagagttctcttcgcttctttattcatcctctccgcttggcaaatgttcaatgactttggaactgacggtggtccagcagctaaagagttagctccaaagcttgatctgaccaaagcacatctctcttccatattgggagtatcattgcccaacttagaggtgaaacaagtcgtgtgggctattgttgctctgaaaggcctaggaggcttactctttgttatcggcaacatctttggtgcctatcttctggctgtctacttggtggttgtcagtcccattttatatgatttctacaactatggacccgaggaccgccaattctctcttctattgactgaattcttgcagagtgttgcgcttctcggggcattgctatttttcatcggaatgaagaattcaacaacgagctccaagaggattctgaagaagaggactcccaagcctaaagctgcttagagttcttctcttctcctccacacacaaaggcaggtaggcttcagaagagcttctgatgtctccaagcattacctttgtcattcttccttacaacttttggttccttatctattgtaggattctagaattagccacattttgtattttatcaattagtttttatatgattttgggatttaagccgttttc

SEQ ID NO: 36508 - protein, 159 aa, Arabidopsis thaliana
  peptide (1)..(159): Ceres Seq. ID no. 12330564
  misc_feature (1)..(138): Pfam Name: HR-like lesion-inducing Pfam Description: HR-like lesion-inducing
  misc_feature (1)..(24): Homolog of NCBI NO: 37534824 NR Description: putative RNA-binding protein
  misc_feature (24)..(158): Homolog of NCBI NO: 37534824 NR Description: putative RNA-binding protein
  misc_feature (1)..(157): Homolog of NCBI NO: 7489144 NR Description: hypothetical protein (clone NF22) - common
  misc_feature (1)..(158): Homolog of NCBI NO: 15236497 NR Description: elicitor like protein
  misc_feature (1)..(157): Homolog of NCBI NO: 38346190 NR Description: OSJNBa0027O01.6 [Oryza sativa (japonica
  misc_feature (1)..(157): Homolog of NCBI NO: 27261473 NR Description: Unknown protein [Oryza sativa (japonica
  misc_feature (1)..(159): Homolog of NCBI NO: 40287494 NR Description: putative lesion-inducing protein [Capsicum annuum]
  misc_feature (1)..(159): Homolog of NCBI NO: 15239873 NR Description: Nicotiana lesion-inducing like
  misc_feature (1)..(159): Homolog of NCBI NO: 21592798 NR Description: Nicotiana lesion-inducing like [Arabidopsis
  misc_feature (1)..(159): Homolog of NCBI NO: 15219714 NR Description: unknown protein
MGFFSFLGRVLFASLFILSAWQMFNDFGTDGGPAAKELAPKLDLTKAHLSSILGVSLPNLEVKQVVWAIVALKGLGGLLFVIGNIFGAYLLAVYLVVVSPILYDFYNYGPEDRQFSLLLTEFLQSVALLGALLFFIGMKNSTTSSKRILKKRTPKPKAA

SEQ ID NO: 36509 - protein, 137 aa, Arabidopsis thaliana
  peptide (1)..(137): Ceres Seq. ID no. 12330565
  misc_feature (1)..(116): Pfam Name: HR-like lesion-inducing Pfam Description: HR-like lesion-inducing
  misc_feature (9)..(136): Homolog of NCBI NO: 3885517 NR Description: similar to Nicotiana HR lesion-inducing ORF
  misc_feature (2)..(136): Homolog of NCBI NO: 37534824 NR Description: putative RNA-binding protein
  misc_feature (1)..(135): Homolog of NCBI NO: 7489144 NR Description: hypothetical protein (clone NF22) - common
  misc_feature (1)..(136): Homolog of NCBI NO: 15236497 NR Description: elicitor like protein
  misc_feature (1)..(135): Homolog of NCBI NO: 38346190 NR Description: OSJNBa0027O01.6 [Oryza sativa (japonica
  misc_feature (1)..(135): Homolog of NCBI NO: 27261473 NR Description: Unknown protein [Oryza sativa (japonica
  misc_feature (1)..(137): Homolog of NCBI NO: 40287494 NR Description: putative lesion-inducing protein [Capsicum annuum]
  misc_feature (1)..(137): Homolog of NCBI NO: 15239873 NR Description: Nicotiana lesion-inducing like
  misc_feature (1)..(137): Homolog of NCBI NO: 21592798 NR Description: Nicotiana lesion-inducing like [Arabidopsis
  misc_feature (1)..(137): Homolog of NCBI NO: 15219714 NR Description: unknown protein
MFNDFGTDGGPAAKELAPKLDLTKAHLSSILGVSLPNLEVKQVVWAIVALKGLGGLLFVIGNIFGAYLLAVYLVVVSPILYDFYNYGPEDRQFSLLLTEFLQSVALLGALLFFIGMKNSTTSSKRILKKRTPKPKAA

SEQ ID NO: 36510 - DNA, 728 bp, Arabidopsis thaliana
  misc_feature (1)..(728): Ceres Seq. ID no. 13504775
  misc_feature: MA Experiment ID: 108434 Result: Up-regulated in Transcription
  misc_feature: MA Experiment 108434 PARAMETER Experiment Name: At_Root_Tips_cDNA_P Parameter: Tissue Value: Root Tips
  misc_feature: MA Experiment ID: 108595 Result: Up-regulated in Transcription
  misc_feature: MA Experiment 108595 PARAMETER Experiment Name: At_Ler-pi_Ovule_cDNA_P Parameter: Plant Line Value: null
  misc_feature: MA Experiment ID: 20000111 Result: Down-regulated in Transcription
  misc_feature: MA Experiment 20000111 PARAMETER Experiment Name: At_42deg_Heat_cDNA_P Parameter: Temperature (deg C) Value: 42 vs. 22
  misc_feature: MA Experiment 20000111 PARAMETER Experiment Name: At_42deg_Heat_cDNA_P Parameter: Timepoint (hr) Value: 6
  misc_feature: MA Experiment 20000111 PARAMETER Experiment Name: At_42deg_Heat_cDNA_P Parameter: Tissue Value: Aerial
  misc_feature: MA Experiment ID: 20000113 Result: Down-regulated in Transcription
  misc_feature: MA Experiment 20000113 PARAMETER Experiment Name: At_42deg_Heat_cDNA_P Parameter: Temperature (deg C) Value: 42 vs. 22
  misc_feature: MA Experiment 20000113 PARAMETER Experiment Name: At_42deg_Heat_cDNA_P Parameter: Timepoint (hr) Value: 8
  misc_feature: MA Experiment 20000113 PARAMETER Experiment Name: At_42deg_Heat_cDNA_P Parameter: Tissue Value: Aerial
ggctgcaatttattctcaaaccttatgagtgagatctctcttaatcattctctctttcttctctcctctgtgatgtgaggtttcgaagatccttctctgattcctcatcaaactcagatcagtagcggacccaagtcattcctttagagagatatatggcagaggtgaaggatcaattagagattaagttccggcttaacgatggttctgatatcggtcctaaattgtttcctgatgctactaccgttgctacattgaaagaaaccgttgttgctcagtggccaagagataaggagaacgggccaaagacagtgaaagatgttaaactgataagcgcgggtagaatattggagaacaacaaaacggttggagattgcaggagtcccgtcggcaatttctcaggtgctgtcaccacaatgcatgttataattcaacatcaagttactgaaaaagaaaagaagaagaagaagcctaaaggtgatctgaaacagaacaaatgtgtctgtttatgttttggagctcgttgttaacaattgtgcaagacaagtagagagagttaaaaaagcttgggagattcacattctgttcttgagccttcttcaataccttttgctcttgttccttgtaattcttttttctgacatgacatgacatgattggctttttgatcgcttgaggtttggtttctattgtatttcggattcgcaacaccgtggaaattattaggt

SEQ ID NO: 36511 - protein, 124 aa, Arabidopsis thaliana; identical to SEQ ID NO: 36281
  peptide (1)..(124): Ceres Seq. ID no. 13504776
  misc_feature (8)..(93): Pfam Name: Ubiquitin family Pfam Description: Ubiquitin family
  misc_feature (1)..(100): Homolog of NCBI NO: 25402954 NR Description: protein F2E2.12 [imported] - Arabidopsis thaliana
  misc_feature (5)..(117): Homolog of NCBI NO: 15234839 NR Description: ubiquitin family [Arabidopsis thaliana]
  misc_feature (2)..(117): Homolog of NCBI NO: 38347220 NR Description: OSJNBa0055C08.14 [Oryza sativa (japonica
  misc_feature (5)..(117): Homolog of NCBI NO: 15218145 NR Description: expressed protein [Arabidopsis thaliana]
  misc_feature (1)..(117): Homolog of NCBI NO: 15219188 NR Description: ubiquitin family [Arabidopsis thaliana]
  misc_feature (4)..(117): Homolog of NCBI NO: 4097587 NR Description: NTGP5 [Nicotiana tabacum]
  misc_feature (5)..(117): Homolog of NCBI NO: 21592966 NR Description: ubiquitin-fusion protein, putative [Arabidopsis
  misc_feature (1)..(117): Homolog of NCBI NO: 15232032 NR Description: ubiquitin family [Arabidopsis thaliana]
  misc_feature (1)..(99): Homolog of NCBI NO: 11358132 NR Description: hypothetical protein T20K14_70 - Arabidopsis
  misc_feature (1)..(124): Homolog of NCBI NO: 18417680 NR Description: expressed protein [Arabidopsis thaliana]

SEQ ID NO: 36512 - DNA, 799 bp, Arabidopsis thaliana
  misc_feature (1)..(799): Ceres Seq. ID no. 12462083
  misc_feature: MA Experiment ID: 108434 Result: Up-regulated in Transcription
  misc_feature: MA Experiment 108434 PARAMETER Experiment Name: At_Root_Tips_cDNA_P Parameter: Tissue Value: Root Tips
  misc_feature: MA Experiment ID: 108462 Result: Down-regulated in Transcription
  misc_feature: MA Experiment 108462 PARAMETER Experiment Name: At_Germinating_Seeds_cDNA_P Parameter: Age (day) Value: 2 vs. 0
  misc_feature: MA Experiment 108462 PARAMETER Experiment Name: At_Germinating_Seeds_cDNA_P Parameter: Tissue Value: Germinating Seeds
  misc_feature: MA Experiment ID: 108463 Result: Down-regulated in Transcription
  misc_feature: MA Experiment 108463 PARAMETER Experiment Name: At_Germinating_Seeds_cDNA_P Parameter: Age (day) Value: 3 vs. 0
  misc_feature: MA Experiment 108463 PARAMETER Experiment Name: At_Germinating_Seeds_cDNA_P Parameter: Tissue Value: Germinating Seeds
  misc_feature: MA Experiment ID: 108464 Result: Down-regulated in Transcription
  misc_feature: MA Experiment 108464 PARAMETER Experiment Name: At_Germinating_Seeds_cDNA_P Parameter: Age (day) Value: 4 vs. 0
  misc_feature: MA Experiment 108464 PARAMETER Experiment Name: At_Germinating_Seeds_cDNA_P Parameter: Tissue Value: Germinating Seeds
  misc_feature: MA Experiment ID: 108573 Result: Down-regulated in Transcription
  misc_feature: MA Experiment 108573 PARAMETER Experiment Name: At_Drought_cDNA_P Parameter: Timepoint (hr) Value: 6
  misc_feature: MA Experiment 108573 PARAMETER Experiment Name: At_Drought_cDNA_P Parameter: Tissue Value: Aerial
  misc_feature: MA Experiment 108573 PARAMETER Experiment Name: At_Drought_cDNA_P Parameter: Treatment Value: Drought vs. No Drought
  misc_feature: MA Experiment ID: 20000234 Result: Up-regulated in Transcription
  misc_feature: MA Experiment 20000234 PARAMETER Experiment Name: At_Siliques_P Parameter: Age (day) Value: 21
  misc_feature: MA Experiment 20000234 PARAMETER Experiment Name: At_Siliques_P Parameter: Organism Value: A. thaliana
  misc_feature: MA Experiment 20000234 PARAMETER Experiment Name: At_Siliques_P Parameter: Plant Line Value: WS
  misc_feature: MA Experiment 20000234 PARAMETER Experiment Name: At_Siliques_P Parameter: Tissue Value: Less Than 5mm Siliques vs. Whole Plant
  misc_feature: MA Experiment ID: 20000437 Result: Down-regulated in Transcription
  misc_feature: MA Experiment 20000437 PARAMETER Experiment Name: At_Drought_P Parameter: Age (day) Value: 8
  misc_feature: MA Experiment 20000437 PARAMETER Experiment Name: At_Drought_P Parameter: Organism Value: A. thaliana
  misc_feature: MA Experiment 20000437 PARAMETER Experiment Name: At_Drought_P Parameter: Plant Line Value: WS
  misc_feature: MA Experiment 20000437 PARAMETER Experiment Name: At_Drought_P Parameter: Timepoint (hr) Value: 24
  misc_feature: MA Experiment 20000437 PARAMETER Experiment Name: At_Drought_P Parameter: Tissue Value: Whole Plant
  misc_feature: MA Experiment 20000437 PARAMETER Experiment Name: At_Drought_P Parameter: Treatment Value: Drought vs. No Drought
  misc_feature: MA Experiment ID: 20001557 Result: Up-regulated in Transcription
  misc_feature: MA Experiment 20001557 PARAMETER Experiment Name: At_Drought_Soil_Dry_P Parameter: Age (day) Value: 27
  misc_feature: MA Experiment 20001557 PARAMETER Experiment Name: At_Drought_Soil_Dry_P Parameter: Organism Value: A. thaliana
  misc_feature: MA Experiment 20001557 PARAMETER Experiment Name: At_Drought_Soil_Dry_P Parameter: Plant Line Value: WS
  misc_feature: MA Experiment 20001557 PARAMETER Experiment Name: At_Drought_Soil_Dry_P Parameter: Post Timepoint (hr) Value: 3
  misc_feature: MA Experiment 20001557 PARAMETER Experiment Name: At_Drought_Soil_Dry_P Parameter: Post-Treatment Value: Re-Water vs. No Drought
  misc_feature: MA Experiment 20001557 PARAMETER Experiment Name: At_Drought_Soil_Dry_P Parameter: Timepoint (day) Value: 13
  misc_feature: MA Experiment 20001557 PARAMETER Experiment Name: At_Drought_Soil_Dry_P Parameter: Treatment Value: Drought vs. No Drought
  misc_feature: MA Experiment ID: 20001558 Result: Up-regulated in Transcription
  misc_feature: MA Experiment 20001558 PARAMETER Experiment Name: At_Drought_Soil_Dry_P Parameter: Age (day) Value: 27
  misc_feature: MA Experiment 20001558 PARAMETER Experiment Name: At_Drought_Soil_Dry_P Parameter: Organism Value: A. thaliana
  misc_feature: MA Experiment 20001558 PARAMETER Experiment Name: At_Drought_Soil_Dry_P Parameter: Plant Line Value: WS
  misc_feature: MA Experiment 20001558 PARAMETER Experiment Name: At_Drought_Soil_Dry_P Parameter: Post Timepoint (hr) Value: 6
  misc_feature: MA Experiment 20001558 PARAMETER Experiment Name: At_Drought_Soil_Dry_P Parameter: Post-Treatment Value: Re-Water vs. No Drought
  misc_feature: MA Experiment 20001558 PARAMETER Experiment Name: At_Drought_Soil_Dry_P Parameter: Timepoint (day) Value: 13
  misc_feature: MA Experiment 20001558 PARAMETER Experiment Name: At_Drought_Soil_Dry_P Parameter: Treatment Value: Drought vs. No Drought
  misc_feature: MA Experiment ID: 20001560 Result: Up-regulated in Transcription
  misc_feature: MA Experiment 20001560 PARAMETER Experiment Name: At_Drought_Soil_Dry_P Parameter: Age (day) Value: 28
  misc_feature: MA Experiment 20001560 PARAMETER Experiment Name: At_Drought_Soil_Dry_P Parameter: Organism Value: A. thaliana
  misc_feature: MA Experiment 20001560 PARAMETER Experiment Name: At_Drought_Soil_Dry_P Parameter: Plant Line Value: WS
  misc_feature: MA Experiment 20001560 PARAMETER Experiment Name: At_Drought_Soil_Dry_P Parameter: Post Timepoint (hr) Value: None
  misc_feature: MA Experiment 20001560 PARAMETER Experiment Name: At_Drought_Soil_Dry_P Parameter: Post-Treatment Value: None
  misc_feature: MA Experiment 20001560 PARAMETER Experiment Name: At_Drought_Soil_Dry_P Parameter: Timepoint (day) Value: 14
  misc_feature: MA Experiment 20001560 PARAMETER Experiment Name: At_Drought_Soil_Dry_P Parameter: Treatment Value: Drought vs. No Drought
  misc_feature: MA Experiment ID: 20001757 Result: Up-regulated in Transcription
  misc_feature: MA Experiment 20001757 PARAMETER Experiment Name: At_50mM_NH4NO3_L-to-H_P Parameter: Timepoint (hr) Value: 6
  misc_feature: MA Experiment 20001757 PARAMETER Experiment Name: At_50mM_NH4NO3_L-to-H_P Parameter: Tissue Value: Leaf
  misc_feature: MA Experiment 20001757 PARAMETER Experiment Name: At_50mM_NH4NO3_L-to-H_P Parameter: Treatment Value: 50mM NH4NO3 vs 100mM Mannitol
aggtcggcggttccatcaccacaacgccggacgacaatgggtattgatctgatcgccggaggtaagagtaagaagaccaaaaggacagctccaaagtctgatgatgtctacctcaagcttactgtcaagctttaccggtttctggtaaggagaactaatagcaagttcaatggtgtgatattgaagaggcttttcatgagcaaagtcaacaaagctcctctttctctatctaggcttgtggagttcatgactggcaaggaagataagattgccgtcttggttggaactataactgatgatttgagggtacacgagattccagccatgaaagtgactgccttgaggttcacagagagagcaagggctcgcattgagaaagctggaggtgaatgcttaacctttgaccagctcgctctcagagctccattgggccagaacacggttcttcttagaggacctaagaattcacgtgaagcagtgaagcatttcggacctgctcctggtgtgccacacagtcactccaagccatatgttcgggccaagggaaggaagttcgagaaggccagaggaaagaggaagagtcgtggattcaaggtttaagaaagttgttgccgccattggacttgattctggagtactgttgcttcttggttgcttttgtaatcggatttttgttagggaactctgttttttctttcctctttcagacatgctactaagtttgcttctactggattcatcgtgtggttattacacttgcagctttactatgttaaacttaattcattatctttctacc

SEQ ID NO: 36513 - protein, 199 aa, Arabidopsis thaliana
  peptide (1)..(199): Ceres Seq. ID no. 12462084
  misc_feature (13)..(198): Homolog of NCBI NO: 13592057 NR Description: ribosomal protein L18 [Rattus norvegicus]
  misc_feature (13)..(198): Homolog of NCBI NO: 28630356 NR Description: ribosomal protein L18 [Petromyzon marinus]
  misc_feature (13)..(175): Homolog of NCBI NO: 28798549 NR Description: 60S ribosomal protein [Medicago sativa]
  misc_feature (14)..(199): Homolog of NCBI NO: 7440855 NR Description: ribosomal protein L18, cytosolic - Arabidopsis
  misc_feature (16)..(199): Homolog of NCBI NO: 6094021 NR Description: 60S RIBOSOMAL PROTEIN L18
  misc_feature (13)..(199): Homolog of NCBI NO: 34393858 NR Description: putative cytoplasmic ribosomal protein L18
  misc_feature (13)..(199): Homolog of NCBI NO: 34897628 NR Description: cytoplasmic ribosomal protein L18 [Oryza sativa]
  misc_feature (13)..(199): Homolog of NCBI NO: 15241061 NR Description: 60S ribosomal protein - like
  misc_feature (13)..(199): Homolog of NCBI NO: 606970 NR Description: cytoplasmic ribosomal protein L18
  misc_feature (13)..(199): Homolog of NCBI NO: 15230011 NR Description: putative 60S ribosomal protein L18
  misc_feature (13)..(198): Homolog of NCBI NO: 13592057 NR Description: ribosomal protein L18 [Rattus norvegicus]
  misc_feature (13)..(198): Homolog of NCBI NO: 28630356 NR Description: ribosomal protein L18 [Petromyzon marinus]
  misc_feature (13)..(175): Homolog of NCBI NO: 28798549 NR Description: 60S ribosomal protein [Medicago sativa]
  misc_feature (14)..(199): Homolog of NCBI NO: 7440855 NR Description: ribosomal protein L18, cytosolic - Arabidopsis
  misc_feature (16)..(199): Homolog of NCBI NO: 6094021 NR Description: 60S RIBOSOMAL PROTEIN L18
  misc_feature (13)..(199): Homolog of NCBI NO: 34393858 NR Description: putative cytoplasmic ribosomal protein L18
  misc_feature (13)..(199): Homolog of NCBI NO: 34897628 NR Description: cytoplasmic ribosomal protein L18 [Oryza sativa]
  misc_feature (13)..(199): Homolog of NCBI NO: 15241061 NR Description: 60S ribosomal protein - like
  misc_feature (13)..(199): Homolog of NCBI NO: 606970 NR Description: cytoplasmic ribosomal protein L18
  misc_feature (13)..(199): Homolog of NCBI NO: 15230011 NR Description: putative 60S ribosomal protein L18
RSAVPSPQRRTTMGIDLIAGGKSKKTKRTAPKSDDVYLKLTVKLYRFLVRRTNSKFNGVILKRLFMSKVNKAPLSLSRLVEFMTGKEDKIAVLVGTITDDLRVHEIPAMKVTALRFTERARARIEKAGGECLTFDQLALRAPLGQNTVLLRGPKNSREAVKHFGPAPGVPHSHSKPYVRAKGRKFEKARGKRKSRGFKV

SEQ ID NO: 36514 - protein, 187 aa, Arabidopsis thaliana
  peptide (1)..(187): Ceres Seq. ID no. 12462085
  misc_feature (1)..(186): Homolog of NCBI NO: 13592057 NR Description: ribosomal protein L18 [Rattus norvegicus]
  misc_feature (1)..(186): Homolog of NCBI NO: 28630356 NR Description: ribosomal protein L18 [Petromyzon marinus]
  misc_feature (1)..(163): Homolog of NCBI NO: 28798549 NR Description: 60S ribosomal protein [Medicago sativa]
  misc_feature (2)..(187): Homolog of NCBI NO: 7440855 NR Description: ribosomal protein L18, cytosolic - Arabidopsis
  misc_feature (4)..(187): Homolog of NCBI NO: 6094021 NR Description: 60S RIBOSOMAL PROTEIN L18
  misc_feature (1)..(187): Homolog of NCBI NO: 34393858 NR Description: putative cytoplasmic ribosomal protein L18
  misc_feature (1)..(187): Homolog of NCBI NO: 34897628 NR Description: cytoplasmic ribosomal protein L18 [Oryza sativa]
  misc_feature (1)..(187): Homolog of NCBI NO: 15241061 NR Description: 60S ribosomal protein - like
  misc_feature (1)..(187): Homolog of NCBI NO: 606970 NR Description: cytoplasmic ribosomal protein L18
  misc_feature (1)..(187): Homolog of NCBI NO: 15230011 NR Description: putative 60S ribosomal protein L18
  misc_feature (1)..(186): Homolog of NCBI NO: 13592057 NR Description: ribosomal protein L18 [Rattus norvegicus]
  misc_feature (1)..(186): Homolog of NCBI NO: 28630356 NR Description: ribosomal protein L18 [Petromyzon marinus]
  misc_feature (1)..(163): Homolog of NCBI NO: 28798549 NR Description: 60S ribosomal protein [Medicago sativa]
  misc_feature (2)..(187): Homolog of NCBI NO: 7440855 NR Description: ribosomal protein L18, cytosolic - Arabidopsis
  misc_feature (4)..(187): Homolog of NCBI NO: 6094021 NR Description: 60S RIBOSOMAL PROTEIN L18
  misc_feature (1)..(187): Homolog of NCBI NO: 34393858 NR Description: putative cytoplasmic ribosomal protein L18
  misc_feature (1)..(187): Homolog of NCBI NO: 34897628 NR Description: cytoplasmic ribosomal protein L18 [Oryza sativa]
  misc_feature (1)..(187): Homolog of NCBI NO: 15241061 NR Description: 60S ribosomal protein - like
  misc_feature (1)..(187): Homolog of NCBI NO: 606970 NR Description: cytoplasmic ribosomal protein L18
  misc_feature (1)..(187): Homolog of NCBI NO: 15230011 NR Description: putative 60S ribosomal protein L18
MGIDLIAGGKSKKTKRTAPKSDDVYLKLTVKLYRFLVRRTNSKFNGVILKRLFMSKVNKAPLSLSRLVEFMTGKEDKIAVLVGTITDDLRVHEIPAMKVTALRFTERARARIEKAGGECLTFDQLALRAPLGQNTVLLRGPKNSREAVKHFGPAPGVPHSHSKPYVRAKGRKFEKARGKRKSRGFKV

SEQ ID NO: 36515 - protein, 134 aa, Arabidopsis thaliana
  peptide (1)..(134): Ceres Seq. ID no. 12462086
  misc_feature (1)..(133): Homolog of NCBI NO: 13592057 NR Description: ribosomal protein L18 [Rattus norvegicus]
  misc_feature (1)..(133): Homolog of NCBI NO: 28630356 NR Description: ribosomal protein L18 [Petromyzon marinus]
  misc_feature (1)..(110): Homolog of NCBI NO: 28798549 NR Description: 60S ribosomal protein [Medicago sativa]
  misc_feature (1)..(134): Homolog of NCBI NO: 7440855 NR Description: ribosomal protein L18, cytosolic - Arabidopsis
  misc_feature (1)..(134): Homolog of NCBI NO: 6094021 NR Description: 60S RIBOSOMAL PROTEIN L18
  misc_feature (1)..(134): Homolog of NCBI NO: 34393858 NR Description: putative cytoplasmic ribosomal protein L18
  misc_feature (1)..(134): Homolog of NCBI NO: 34897628 NR Description: cytoplasmic ribosomal protein L18 [Oryza sativa]
  misc_feature (1)..(134): Homolog of NCBI NO: 15241061 NR Description: 60S ribosomal protein - like
  misc_feature (1)..(134): Homolog of NCBI NO: 606970 NR Description: cytoplasmic ribosomal protein L18
  misc_feature (1)..(134): Homolog of NCBI NO: 15230011 NR Description: putative 60S ribosomal protein L18
  misc_feature (1)..(133): Homolog of NCBI NO: 13592057 NR Description: ribosomal protein L18 [Rattus norvegicus]
  misc_feature (1)..(133): Homolog of NCBI NO: 28630356 NR Description: ribosomal protein L18 [Petromyzon marinus]
  misc_feature (1)..(110): Homolog of NCBI NO: 28798549 NR Description: 60S ribosomal protein [Medicago sativa]
  misc_feature (1)..(134): Homolog of NCBI NO: 7440855 NR Description: ribosomal protein L18, cytosolic - Arabidopsis
  misc_feature (1)..(134): Homolog of NCBI NO: 6094021 NR Description: 60S RIBOSOMAL PROTEIN L18
  misc_feature (1)..(134): Homolog of NCBI NO: 34393858 NR Description: putative cytoplasmic ribosomal protein L18
  misc_feature (1)..(134): Homolog of NCBI NO: 34897628 NR Description: cytoplasmic ribosomal protein L18 [Oryza sativa]
  misc_feature (1)..(134): Homolog of NCBI NO: 15241061 NR Description: 60S ribosomal protein - like
  misc_feature (1)..(134): Homolog of NCBI NO: 606970 NR Description: cytoplasmic ribosomal protein L18
  misc_feature (1)..(134): Homolog of NCBI NO: 15230011 NR Description: putative 60S ribosomal protein L18
MSKVNKAPLSLSRLVEFMTGKEDKIAVLVGTITDDLRVHEIPAMKVTALRFTERARARIEKAGGECLTFDQLALRAPLGQNTVLLRGPKNSREAVKHFGPAPGVPHSHSKPYVRAKGRKFEKARGKRKSRGFKV

SEQ ID NO: 36516 - DNA, 2010 bp, Arabidopsis thaliana
  misc_feature (1)..(2010): Ceres Seq. ID no. 12600087
  misc_feature: MA Experiment ID: 20000166 Result: Up-regulated in Transcription
  misc_feature: MA Experiment 20000166 PARAMETER Experiment Name: At_100uM_ABA_P Parameter: Age (day) Value: 14
  misc_feature: MA Experiment 20000166 PARAMETER Experiment Name: At_100uM_ABA_P Parameter: Organism Value: A. thaliana
  misc_feature: MA Experiment 20000166 PARAMETER Experiment Name: At_100uM_ABA_P Parameter: Plant Line Value: WS
  misc_feature: MA Experiment 20000166 PARAMETER Experiment Name: At_100uM_ABA_P Parameter: Timepoint (hr) Value: 1
  misc_feature: MA Experiment 20000166 PARAMETER Experiment Name: At_100uM_ABA_P Parameter: Tissue Value: Aerial
  misc_feature: MA Experiment 20000166 PARAMETER Experiment Name: At_100uM_ABA_P Parameter: Treatment Value: 100uM ABA vs. No Treatment
  misc_feature: MA Experiment ID: 20000169 Result: Up-regulated in Transcription
  misc_feature: MA Experiment 20000169 PARAMETER Experiment Name: At_100uM_ABA_P Parameter: Age (day) Value: 14
  misc_feature: MA Experiment 20000169 PARAMETER Experiment Name: At_100uM_ABA_P Parameter: Organism Value: A. thaliana
  misc_feature: MA Experiment 20000169 PARAMETER Experiment Name: At_100uM_ABA_P Parameter: Plant Line Value: WS
  misc_feature: MA Experiment 20000169 PARAMETER Experiment Name: At_100uM_ABA_P Parameter: Timepoint (hr) Value: 6
  misc_feature: MA Experiment 20000169 PARAMETER Experiment Name: At_100uM_ABA_P Parameter: Tissue Value: Aerial
  misc_feature: MA Experiment 20000169 PARAMETER Experiment Name: At_100uM_ABA_P Parameter: Treatment Value: 100uM ABA vs. No Treatment
  misc_feature: MA Experiment ID: 20000180 Result: Up-regulated in Transcription
  misc_feature: MA Experiment 20000180 PARAMETER Experiment Name: At_Germinating_Seeds_P Parameter: Age (hr) Value: 24 vs. 0
  misc_feature: MA Experiment 20000180 PARAMETER Experiment Name: At_Germinating_Seeds_P Parameter: Tissue Value: Germinating Seeds
  misc_feature: MA Experiment ID: 20000182 Result: Up-regulated in Transcription
  misc_feature: MA Experiment 20000182 PARAMETER Experiment Name: At_2mM_SA_P Parameter: Age (day) Value: 14
  misc_feature: MA Experiment 20000182 PARAMETER Experiment Name: At_2mM_SA_P Parameter: Organism Value: A. thaliana
  misc_feature: MA Experiment 20000182 PARAMETER Experiment Name: At_2mM_SA_P Parameter: Plant Line Value: WS
  misc_feature: MA Experiment 20000182 PARAMETER Experiment Name: At_2mM_SA_P Parameter: Timepoint (hr) Value: 6
  misc_feature: MA Experiment 20000182 PARAMETER Experiment Name: At_2mM_SA_P Parameter: Tissue Value: Aerial
  misc_feature: MA Experiment 20000182 PARAMETER Experiment Name: At_2mM_SA_P Parameter: Treatment Value: 2mM SA vs. No Treatment
  misc_feature: MA Experiment ID: 20000267 Result: Up-regulated in Transcription
  misc_feature: MA Experiment 20000267 PARAMETER Experiment Name: At_Drought_P Parameter: Age (day) Value: 7
  misc_feature: MA Experiment 20000267 PARAMETER Experiment Name: At_Drought_P Parameter: Organism Value: A. thaliana
  misc_feature: MA Experiment 20000267 PARAMETER Experiment Name: At_Drought_P Parameter: Plant Line Value: WS
  misc_feature: MA Experiment 20000267 PARAMETER Experiment Name: At_Drought_P Parameter: Timepoint (hr) Value: 6
  misc_feature: MA Experiment 20000267 PARAMETER Experiment Name: At_Drought_P Parameter: Tissue Value: Whole Plant
  misc_feature: MA Experiment 20000267 PARAMETER Experiment Name: At_Drought_P Parameter: Treatment Value: Drought vs. No Drought
  misc_feature: MA Experiment ID: 20000268 Result: Up-regulated in Transcription
  misc_feature: MA Experiment 20000268 PARAMETER Experiment Name: At_100mM_NaCl__P Parameter: Age (day) Value: 14
  misc_feature: MA Experiment 20000268 PARAMETER Experiment Name: At_100mM_NaCl__P Parameter: Organism Value: A. thaliana
  misc_feature: MA Experiment 20000268 PARAMETER Experiment Name: At_100mM_NaCl__P Parameter: Plant Line Value: WS
  misc_feature: MA Experiment 20000268 PARAMETER Experiment Name: At_100mM_NaCl__P Parameter: Timepoint (hr) Value: 6
  misc_feature: MA Experiment 20000268 PARAMETER Experiment Name: At_100mM_NaCl__P Parameter: Tissue Value: Whole Plant
  misc_feature: MA Experiment 20000268 PARAMETER Experiment Name: At_100mM_NaCl__P Parameter: Treatment Value: 100mM NaCl vs. No Treatment
  misc_feature: MA Experiment ID: 20000436 Result: Up-regulated in Transcription
  misc_feature: MA Experiment 20000436 PARAMETER Experiment Name: At_Drought_P Parameter: Age (day) Value: 7
  misc_feature: MA Experiment 20000436 PARAMETER Experiment Name: At_Drought_P Parameter: Organism Value: A. thaliana
  misc_feature: MA Experiment 20000436 PARAMETER Experiment Name: At_Drought_P Parameter: Plant Line Value: WS
  misc_feature: MA Experiment 20000436 PARAMETER Experiment Name: At_Drought_P Parameter: Timepoint (hr) Value: 12
  misc_feature: MA Experiment 20000436 PARAMETER Experiment Name: At_Drought_P Parameter: Tissue Value: Whole Plant
  misc_feature: MA Experiment 20000436 PARAMETER Experiment Name: At_Drought_P Parameter: Treatment Value: Drought vs. No Drought
  misc_feature: MA Experiment ID: 20000437 Result: Up-regulated in Transcription
  misc_feature: MA Experiment 20000437 PARAMETER Experiment Name: At_Drought_P Parameter: Age (day) Value: 8
  misc_feature: MA Experiment 20000437 PARAMETER Experiment Name: At_Drought_P Parameter: Organism Value: A. thaliana
  misc_feature: MA Experiment 20000437 PARAMETER Experiment Name: At_Drought_P Parameter: Plant Line Value: WS
  misc_feature: MA Experiment 20000437 PARAMETER Experiment Name: At_Drought_P Parameter: Timepoint (hr) Value: 24
  misc_feature: MA Experiment 20000437 PARAMETER Experiment Name: At_Drought_P Parameter: Tissue Value: Whole Plant
  misc_feature: MA Experiment 20000437 PARAMETER Experiment Name: At_Drought_P Parameter: Treatment Value: Drought vs. No Drought
  misc_feature: MA Experiment ID: 20000438 Result: Up-regulated in Transcription
  misc_feature: MA Experiment 20000438 PARAMETER Experiment Name: At_Shoots__P Parameter: Age (day) Value: 14
  misc_feature: MA Experiment 20000438 PARAMETER Experiment Name: At_Shoots__P Parameter: Tissue Value: Shoots vs. Whole Plant
  misc_feature: MA Experiment ID: 20000451 Result: Down-regulated in Transcription
  misc_feature: MA Experiment 20000451 PARAMETER Experiment Name: At_CS6879_Shoots-Roots_P Parameter: Age (day) Value: 14
  misc_feature: MA Experiment 20000451 PARAMETER Experiment Name: At_CS6879_Shoots-Roots_P Parameter: Organism Value: A. thaliana
  misc_feature: MA Experiment 20000451 PARAMETER Experiment Name: At_CS6879_Shoots-Roots_P Parameter: Plant Line Value: CS6879 vs. WS
  misc_feature: MA Experiment 20000451 PARAMETER Experiment Name: At_CS6879_Shoots-Roots_P Parameter: Tissue Value: Roots
  misc_feature: MA Experiment ID: 20000453 Result: Up-regulated in Transcription
  misc_feature: MA Experiment 20000453 PARAMETER Experiment Name: At_100uM_ABA_P Parameter: Age (day) Value: 15
  misc_feature: MA Experiment 20000453 PARAMETER Experiment Name: At_100uM_ABA_P Parameter: Organism Value: A. thaliana
  misc_feature: MA Experiment 20000453 PARAMETER Experiment Name: At_100uM_ABA_P Parameter: Plant Line Value: WS
  misc_feature: MA Experiment 20000453 PARAMETER Experiment Name: At_100uM_ABA_P Parameter: Timepoint (hr) Value: 24
  misc_feature: MA Experiment 20000453 PARAMETER Experiment Name: At_100uM_ABA_P Parameter: Tissue Value: Aerial
  misc_feature: MA Experiment 20000453 PARAMETER Experiment Name: At_100uM_ABA_P Parameter: Treatment Value: 100uM ABA vs. No Treatment
  misc_feature: MA Experiment ID: 20000455 Result: Up-regulated in Transcription
  misc_feature: MA Experiment 20000455 PARAMETER Experiment Name: At_100uM_ABA_P Parameter: Age (day) Value: 16
  misc_feature: MA Experiment 20000455 PARAMETER Experiment Name: At_100uM_ABA_P Parameter: Organism Value: A. thaliana
  misc_feature: MA Experiment 20000455 PARAMETER Experiment Name: At_100uM_ABA_P Parameter: Plant Line Value: WS
  misc_feature: MA Experiment 20000455 PARAMETER Experiment Name: At_100uM_ABA_P Parameter: Timepoint (hr) Value: 48
  misc_feature: MA Experiment 20000455 PARAMETER Experiment Name: At_100uM_ABA_P Parameter: Tissue Value: Aerial
  misc_feature: MA Experiment 20000455 PARAMETER Experiment Name: At_100uM_ABA_P Parameter: Treatment Value: 100uM ABA vs. No Treatment
  misc_feature: MA Experiment ID: 20000575 Result: Up-regulated in Transcription
  misc_feature: MA Experiment 20000575 PARAMETER Experiment Name: At_100uM_ABA_Mutants__P Parameter: Organism Value: A. thaliana
  misc_feature: MA Experiment 20000575 PARAMETER Experiment Name: At_100uM_ABA_Mutants__P Parameter: Plant Line Value: CS22
  misc_feature: MA Experiment 20000575 PARAMETER Experiment Name: At_100uM_ABA_Mutants__P Parameter: Timepoint (hr) Value: 6
  misc_feature: MA Experiment 20000575 PARAMETER Experiment Name: At_100uM_ABA_Mutants__P Parameter: Tissue Value: Whole Plant
  misc_feature: MA Experiment 20000575 PARAMETER Experiment Name: At_100uM_ABA_Mutants__P Parameter: Treatment Value: 1uM ABA vs. No Treatment
  misc_feature: MA Experiment ID: 20000576 Result: Up-regulated in Transcription
  misc_feature: MA Experiment 20000576 PARAMETER Experiment Name: At_100uM_ABA_Mutants__P Parameter: Organism Value: A. thaliana
  misc_feature: MA Experiment 20000576 PARAMETER Experiment Name: At_100uM_ABA_Mutants__P Parameter: Plant Line Value: CS23
  misc_feature: MA Experiment 20000576 PARAMETER Experiment Name: At_100uM_ABA_Mutants__P Parameter: Timepoint (hr) Value: 6
  misc_feature: MA Experiment 20000576 PARAMETER Experiment Name: At_100uM_ABA_Mutants__P Parameter: Tissue Value: Whole Plant
  misc_feature: MA Experiment 20000576 PARAMETER Experiment Name: At_100uM_ABA_Mutants__P Parameter: Treatment Value: 1uM ABA vs. No Treatment
  misc_feature: MA Experiment ID: 20001450 Result: Up-regulated in Transcription
  misc_feature: MA Experiment 20001450 PARAMETER Experiment Name: At_Far-red-induction_P Parameter: Age (day) Value: 7
  misc_feature: MA Experiment 20001450 PARAMETER Experiment Name: At_Far-red-induction_P Parameter: Light Value: Far-red vs. White
  misc_feature: MA Experiment 20001450 PARAMETER Experiment Name: At_Far-red-induction_P Parameter: Organism Value: A. thaliana
  misc_feature: MA Experiment 20001450 PARAMETER Experiment Name: At_Far-red-induction_P Parameter: Plant Line Value: Columbia
  misc_feature: MA Experiment 20001450 PARAMETER Experiment Name: At_Far-red-induction_P Parameter: Timepoint (hr) Value: 8
  misc_feature: MA Experiment 20001450 PARAMETER Experiment Name: At_Far-red-induction_P Parameter: Tissue Value: Whole Plant
  misc_feature: MA Experiment ID: 20001451 Result: Up-regulated in Transcription
  misc_feature: MA Experiment 20001451 PARAMETER Experiment Name: At_Far-red-induction_P Parameter: Age (day) Value: 7
  misc_feature: MA Experiment 20001451 PARAMETER Experiment Name: At_Far-red-induction_P Parameter: Light Value: Far-red vs. White
  misc_feature: MA Experiment 20001451 PARAMETER Experiment Name: At_Far-red-induction_P Parameter: Organism Value: A. thaliana
  misc_feature: MA Experiment 20001451 PARAMETER Experiment Name: At_Far-red-induction_P Parameter: Plant Line Value: Columbia
  misc_feature: MA Experiment 20001451 PARAMETER Experiment Name: At_Far-red-induction_P Parameter: Timepoint (hr) Value: 24
  misc_feature: MA Experiment 20001451 PARAMETER Experiment Name: At_Far-red-induction_P Parameter: Tissue Value: Whole Plant
  misc_feature: MA Experiment ID: 20001457 Result: Up-regulated in Transcription
  misc_feature: MA Experiment 20001457 PARAMETER Experiment Name: At_50mM_NH4NO3_L-to-H_P Parameter: Age (day) Value: Undefined
  misc_feature: MA Experiment 20001457 PARAMETER Experiment Name: At_50mM_NH4NO3_L-to-H_P Parameter: Organism Value: Undefined
  misc_feature: MA Experiment 20001457 PARAMETER Experiment Name: At_50mM_NH4NO3_L-to-H_P Parameter: Plant Line Value: Undefined
  misc_feature: MA Experiment 20001457 PARAMETER Experiment Name: At_50mM_NH4NO3_L-to-H_P Parameter: Timepoint (hr) Value: 0.5
  misc_feature: MA Experiment 20001457 PARAMETER Experiment Name: At_50mM_NH4NO3_L-to-H_P Parameter: Tissue Value: Siliques
  misc_feature: MA Experiment 20001457 PARAMETER Experiment Name: At_50mM_NH4NO3_L-to-H_P Parameter: Treatment Value: 50mM NH4NO3 vs. 100mM Manitol
  misc_feature: MA Experiment ID: 20001554 Result: Up-regulated in Transcription
  misc_feature: MA Experiment 20001554 PARAMETER Experiment Name: At_Drought_Soil_Dry_P Parameter: Age (day) Value: 21
  misc_feature: MA Experiment 20001554 PARAMETER Experiment Name: At_Drought_Soil_Dry_P Parameter: Organism Value: A. thaliana
  misc_feature: MA Experiment 20001554 PARAMETER Experiment Name: At_Drought_Soil_Dry_P Parameter: Plant Line Value: WS
  misc_feature: MA Experiment 20001554 PARAMETER Experiment Name: At_Drought_Soil_Dry_P Parameter: Post Timepoint (hr) Value: None
  misc_feature: MA Experiment 20001554 PARAMETER Experiment Name: At_Drought_Soil_Dry_P Parameter: Post-Treatment Value: None
  misc_feature: MA Experiment 20001554 PARAMETER Experiment Name: At_Drought_Soil_Dry_P Parameter: Timepoint (day) Value: 7
  misc_feature: MA Experiment 20001554 PARAMETER Experiment Name: At_Drought_Soil_Dry_P Parameter: Treatment Value: Drought vs. No Drought
  misc_feature: MA Experiment ID: 20001556 Result: Up-regulated in Transcription
  misc_feature: MA Experiment 20001556 PARAMETER Experiment Name: At_Drought_Soil_Dry_P Parameter: Age (day) Value: 26
  misc_feature: MA Experiment 20001556 PARAMETER Experiment Name: At_Drought_Soil_Dry_P Parameter: Organism Value: A. thaliana
  misc_feature: MA Experiment 20001556 PARAMETER Experiment Name: At_Drought_Soil_Dry_P Parameter: Plant Line Value: WS
  misc_feature: MA Experiment 20001556 PARAMETER Experiment Name: At_Drought_Soil_Dry_P Parameter: Post Timepoint (hr) Value: None
  misc_feature: MA Experiment 20001556 PARAMETER Experiment Name: At_Drought_Soil_Dry_P Parameter: Post-Treatment Value: None
  misc_feature: MA Experiment 20001556 PARAMETER Experiment Name: At_Drought_Soil_Dry_P Parameter: Timepoint (day) Value: 12
  misc_feature: MA Experiment 20001556 PARAMETER Experiment Name: At_Drought_Soil_Dry_P Parameter: Treatment Value: Drought vs. No Drought
  misc_feature: MA Experiment ID: 20001559 Result: Up-regulated in Transcription
  misc_feature: MA Experiment 20001559 PARAMETER Experiment Name: At_Drought_Soil_Dry_P Parameter: Age (day) Value: 28
  misc_feature: MA Experiment 20001559 PARAMETER Experiment Name: At_Drought_Soil_Dry_P Parameter: Organism Value: A. thaliana
  misc_feature: MA Experiment 20001559 PARAMETER Experiment Name: At_Drought_Soil_Dry_P Parameter: Plant Line Value: WS
  misc_feature: MA Experiment 20001559 PARAMETER Experiment Name: At_Drought_Soil_Dry_P Parameter: Post Timepoint (hr) Value: 29
  misc_feature: MA Experiment 20001559 PARAMETER Experiment Name: At_Drought_Soil_Dry_P Parameter: Post-Treatment Value: Re-Water vs. No Drought
  misc_feature: MA Experiment 20001559 PARAMETER Experiment Name: At_Drought_Soil_Dry_P Parameter: Timepoint (day) Value: 14
  misc_feature: MA Experiment 20001559 PARAMETER Experiment Name: At_Drought_Soil_Dry_P Parameter: Treatment Value: Drought vs. No Drought
  misc_feature: MA Experiment ID: 20001757 Result: Down-regulated in Transcription
  misc_feature: MA Experiment 20001757 PARAMETER Experiment Name: At_50mM_NH4NO3_L-to-H_P Parameter: Timepoint (hr) Value: 6
  misc_feature: MA Experiment 20001757 PARAMETER Experiment Name: At_50mM_NH4NO3_L-to-H_P Parameter: Tissue Value: Leaf
  misc_feature: MA Experiment 20001757 PARAMETER Experiment Name: At_50mM_NH4NO3_L-to-H_P Parameter: Treatment Value: 50mM NH4NO3 vs 100mM Mannitol
  misc_feature: MA Experiment ID: 20001904 Result: Up-regulated in Transcription
  misc_feature: MA Experiment 20001904 PARAMETER Experiment Name: At_Drought_Reproduction_P Parameter: Age (day) Value: 37
  misc_feature: MA Experiment 20001904 PARAMETER Experiment Name: At_Drought_Reproduction_P Parameter: Organism Value: A. thaliana
  misc_feature: MA Experiment 20001904 PARAMETER Experiment Name: At_Drought_Reproduction_P Parameter: Plant Line Value: WS
  misc_feature: MA Experiment 20001904 PARAMETER Experiment Name: At_Drought_Reproduction_P Parameter: Timepoint (day) Value: 7
  misc_feature: MA Experiment 20001904 PARAMETER Experiment Name: At_Drought_Reproduction_P Parameter: Tissue Value: Rosettes
  misc_feature: MA Experiment 20001904 PARAMETER Experiment Name: At_Drought_Reproduction_P Parameter: Treatment Value: Drought vs. No Drought
  misc_feature: MA Experiment ID: 20001905 Result: Up-regulated in Transcription
  misc_feature: MA Experiment 20001905 PARAMETER Experiment Name: At_Drought_Reproduction_P Parameter: Age (day) Value: 40
  misc_feature: MA Experiment 20001905 PARAMETER Experiment Name: At_Drought_Reproduction_P Parameter: Organism Value: A. thaliana
  misc_feature: MA Experiment 20001905 PARAMETER Experiment Name: At_Drought_Reproduction_P Parameter: Plant Line Value: WS
  misc_feature: MA Experiment 20001905 PARAMETER Experiment Name: At_Drought_Reproduction_P Parameter: Timepoint (day) Value: 10
  misc_feature: MA Experiment 20001905 PARAMETER Experiment Name: At_Drought_Reproduction_P Parameter: Tissue Value: Rosettes
  misc_feature: MA Experiment 20001905 PARAMETER Experiment Name: At_Drought_Reproduction_P Parameter: Treatment Value: Drought vs. No Drought
  misc_feature: MA Experiment ID: 20001906 Result: Up-regulated in Transcription
  misc_feature: MA Experiment 20001906 PARAMETER Experiment Name: At_Drought_Reproduction_P Parameter: Age (day) Value: 35
  misc_feature: MA Experiment 20001906 PARAMETER Experiment Name: At_Drought_Reproduction_P Parameter: Organism Value: A. thaliana
  misc_feature: MA Experiment 20001906 PARAMETER Experiment Name: At_Drought_Reproduction_P Parameter: Plant Line Value: WS
  misc_feature: MA Experiment 20001906 PARAMETER Experiment Name: At_Drought_Reproduction_P Parameter: Timepoint (day) Value: 5
  misc_feature: MA Experiment 20001906 PARAMETER Experiment Name: At_Drought_Reproduction_P Parameter: Tissue Value: Siliques
  misc_feature: MA Experiment 20001906 PARAMETER Experiment Name: At_Drought_Reproduction_P Parameter: Treatment Value: Drought vs. No Drought
  misc_feature: MA Experiment ID: 20001907 Result: Up-regulated in Transcription
  misc_feature: MA Experiment 20001907 PARAMETER Experiment Name: At_Drought_Reproduction_P Parameter: Age (day) Value: 37
  misc_feature: MA Experiment 20001907 PARAMETER Experiment Name: At_Drought_Reproduction_P Parameter: Organism Value: A. thaliana
  misc_feature: MA Experiment 20001907 PARAMETER Experiment Name: At_Drought_Reproduction_P Parameter: Plant Line Value: WS
  misc_feature: MA Experiment 20001907 PARAMETER Experiment Name: At_Drought_Reproduction_P Parameter: Timepoint (day) Value: 7
  misc_feature: MA Experiment 20001907 PARAMETER Experiment Name: At_Drought_Reproduction_P Parameter: Tissue Value: Siliques
  misc_feature: MA Experiment 20001907 PARAMETER Experiment Name: At_Drought_Reproduction_P Parameter: Treatment Value: Drought vs. No Drought
  misc_feature: MA Experiment ID: 20001908 Result: Up-regulated in Transcription
  misc_feature: MA Experiment 20001908 PARAMETER Experiment Name: At_Drought_Reproduction_P Parameter: Age (day) Value: 40
  misc_feature: MA Experiment 20001908 PARAMETER Experiment Name: At_Drought_Reproduction_P Parameter: Organism Value: A. thaliana
  misc_feature: MA Experiment 20001908 PARAMETER Experiment Name: At_Drought_Reproduction_P Parameter: Plant Line Value: WS
  misc_feature: MA Experiment 20001908 PARAMETER Experiment Name: At_Drought_Reproduction_P Parameter: Timepoint (day) Value: 10
  misc_feature: MA Experiment 20001908 PARAMETER Experiment Name: At_Drought_Reproduction_P Parameter: Tissue Value: Siliques
  misc_feature: MA Experiment 20001908 PARAMETER Experiment Name: At_Drought_Reproduction_P Parameter: Treatment Value: Drought vs. No Drought
  misc_feature: MA Experiment ID: 20001910 Result: Up-regulated in Transcription
  misc_feature: MA Experiment 20001910 PARAMETER Experiment Name: At_Drought_Reproduction_P Parameter: Age (day) Value: 37
  misc_feature: MA Experiment 20001910 PARAMETER Experiment Name: At_Drought_Reproduction_P Parameter: Organism Value: A. thaliana
  misc_feature: MA Experiment 20001910 PARAMETER Experiment Name: At_Drought_Reproduction_P Parameter: Plant Line Value: WS
  misc_feature: MA Experiment 20001910 PARAMETER Experiment Name: At_Drought_Reproduction_P Parameter: Timepoint (day) Value: 7
  misc_feature: MA Experiment 20001910 PARAMETER Experiment Name: At_Drought_Reproduction_P Parameter: Tissue Value: Flowers
  misc_feature: MA Experiment 20001910 PARAMETER Experiment Name: At_Drought_Reproduction_P Parameter: Treatment Value: Drought vs. No Drought
  misc_feature: MA Experiment ID: 20001911 Result: Up-regulated in Transcription
  misc_feature: MA Experiment 20001911 PARAMETER Experiment Name: At_Drought_Reproduction_P Parameter: Age (day) Value: 40
  misc_feature: MA Experiment 20001911 PARAMETER Experiment Name: At_Drought_Reproduction_P Parameter: Organism Value: A. thaliana
  misc_feature: MA Experiment 20001911 PARAMETER Experiment Name: At_Drought_Reproduction_P Parameter: Plant Line Value: WS
  misc_feature: MA Experiment 20001911 PARAMETER Experiment Name: At_Drought_Reproduction_P Parameter: Timepoint (day) Value: 10
  misc_feature: MA Experiment 20001911 PARAMETER Experiment Name: At_Drought_Reproduction_P Parameter: Tissue Value: Flowers
  misc_feature: MA Experiment 20001911 PARAMETER Experiment Name: At_Drought_Reproduction_P Parameter: Treatment Value: Drought vs. No Drought
gagacggagaacaagagcaatcaaatcacacaaatcctcgaaaaagtaaaattcttgattaaaaaaaaacggacattttgtgctcagacactcagctttccttattagtcttttgccacctctctgcaaagttctcgaacccactctgtaaccaaaatcaatcataaagatttgatctttttttttcctttttcggtgagatttaatcctctaaggttcttgatactctctagatctattcttacttgggtttgttcgaaatatggaggacaagaacaatgataaggagaaaaaaaccgacgttacgttcgaagatgacgaagataacgaagatctagaagacaacagcagtaagtacgagaacgacagtgaaactgatcaaagcgatctcggagatcttcctggtgatgctgttgatcgtgacgacgacatcgatgaacctttcatttcccaggttcaatggcctcaaagcttcagggaaacgactgattcttatacgattgcggcatcaccaatcttcgggtcgctcaggagtaatcctccgagtttctatagagccagcagaagtaatttagatgttgagtcaaaagcacctttgcttcctgagaggcatgatgattcagacaaagcctcagctacacaatctgcttggtctcataaaggctcatttgctgaggaattgcccattggtggctatggatgcagcgtcattcaaaccattttcaatgctattaatgtaatggctggagttggacttctctcaacaccttatacagtgaaagaagctggttgggcaagtatggtaattcttctcttatttgctgttatttgttgttacactgctactttaatgaaagactgtttcgagaacaagaccggcattatcacttatcctgatattggagaagcagcttttggcaaatatggtcgtattcttatctgtatgctattgtacacagaactatattcatattgtgttgaattcatcattttggaaggagataaccttaccgggcttttccctggtacatccttggatttgctcgggttccgacttgactctaagcatttatttggaatcttaactgctctcattgttcttccaactgtttggttgaaagatctacgcatcatttcctacctctcagccggtggagttatcgcaaccgctttgatagcagtaagcgtgtttttcctcggtacaacgggcgggattgggtttcatcacaccgggcaggctgtgaaatggaacgggataccgtttgcaattggtatatacgggttttgctattcaggacattcagtgttcccaaatatataccaatccatggctgataaaaccaaattcaacaaagcagtgatcacttgtttcattatatgtgttttgttatacggaggagttgcaatcatgggttatctcatgtttggagaagctaccttgtctcagattacactaaacatgccacaggaccaatttttctcaaaagtggcacagtggacaacggttgtgagtccgtttacaaaatacgctctcctgatgaatccacttgcaaggagtatagaagaactattaccggaaagaatgtcagagaacatatggtgctttcttcttctaagaacagcactcgtcgcttcttctgtttgttctgctttccttattccattttttggtcttatgatggctcttataggatctcttctcagtatactagtggcaataataatgccagctttatgcttcataaagataatggggaacaaagcaacaagaacacagatgattctgagttcgatcattgtggccatcggggtggtaagcgggaccttggggacatattcttcggtggcaaagatcattaggaactatcagtgaaggaactccatgacaaagagacccatagtttatcccctgtactttgagttgaatgtttttgttgaagctaataaactcttgattatgaaagattattttggacttgaaagttaataaaactagtgaaaggtttactt

SEQ ID NO: 36517 - protein, 536 aa, Arabidopsis thaliana
  peptide (1)..(536): Ceres Seq. ID no. 12600088
  misc_feature (137)..(416): Homolog of NCBI NO: 25408639 NR Description: hypothetical protein At2g39130 [imported] -
  misc_feature (11)..(532): Homolog of NCBI NO: 22326569 NR Description: putative protein
  misc_feature (18)..(531): Homolog of NCBI NO: 30679549 NR Description: amino acid transporter family [Arabidopsis
  misc_feature (21)..(100): Homolog of NCBI NO: 15292735 NR Description: unknown protein [Arabidopsis thaliana]
  misc_feature (137)..(532): Homolog of NCBI NO: 15292735 NR Description: unknown protein [Arabidopsis thaliana]
  misc_feature (21)..(100): Homolog of NCBI NO: 30687791 NR Description: amino acid transporter family [Arabidopsis
  misc_feature (137)..(532): Homolog of NCBI NO: 30687791 NR Description: amino acid transporter family [Arabidopsis
  misc_feature (130)..(536): Homolog of NCBI NO: 23397299 NR Description: unknown protein [Arabidopsis thaliana]
  misc_feature (1)..(337): Homolog of NCBI NO: 7487631 NR Description: hypothetical protein At2g41190 [imported] -
  misc_feature (1)..(536): Homolog of NCBI NO: 18405629 NR Description: expressed protein
  misc_feature (137)..(416): Homolog of NCBI NO: 25408639 NR Description: hypothetical protein At2g39130 [imported] -
  misc_feature (11)..(532): Homolog of NCBI NO: 22326569 NR Description: putative protein
  misc_feature (18)..(531): Homolog of NCBI NO: 30679549 NR Description: amino acid transporter family [Arabidopsis
  misc_feature (21)..(100): Homolog of NCBI NO: 15292735 NR Description: unknown protein [Arabidopsis thaliana]
  misc_feature (137)..(532): Homolog of NCBI NO: 15292735 NR Description: unknown protein [Arabidopsis thaliana]
  misc_feature (21)..(100): Homolog of NCBI NO: 30687791 NR Description: amino acid transporter family [Arabidopsis
  misc_feature (137)..(532): Homolog of NCBI NO: 30687791 NR Description: amino acid transporter family [Arabidopsis
  misc_feature (130)..(536): Homolog of NCBI NO: 23397299 NR Description: unknown protein [Arabidopsis thaliana]
  misc_feature (1)..(337): Homolog of NCBI NO: 7487631 NR Description: hypothetical protein At2g41190 [imported] -
  misc_feature (1)..(536): Homolog of NCBI NO: 18405629 NR Description: expressed protein
MEDKNNDKEKKTDVTFEDDEDNEDLEDNSSKYENDSETDQSDLGDLPGDAVDRDDDIDEPFISQVQWPQSFRETTDSYTIAASPIFGSLRSNPPSFYRASRSNLDVESKAPLLPERHDDSDKASATQSAWSHKGSFAEELPIGGYGCSVIQTIFNAINVMAGVGLLSTPYTVKEAGWASMVILLLFAVICCYTATLMKDCFENKTGIITYPDIGEAAFGKYGRILICMLLYTELYSYCVEFIILEGDNLTGLFPGTSLDLLGFRLDSKHLFGILTALIVLPTVWLKDLRIISYLSAGGVIATALIAVSVFFLGTTGGIGFHHTGQAVKWNGIPFAIGIYGFCYSGHSVFPNIYQSMADKTKFNKAVITCFIICVLLYGGVAIMGYLMFGEATLSQITLNMPQDQFFSKVAQWTTVVSPFTKYALLMNPLARSIEELLPERMSENIWCFLLLRTALVASSVCSAFLIPFFGLMMALIGSLLSILVAIIMPALCFIKIMGNKATRTQMILSSIIVAIGVVSGTLGTYSSVAKIIRNYQ

SEQ ID NO: 36518 - protein, 377 aa, Arabidopsis thaliana
  peptide (1)..(377): Ceres Seq. ID no. 12600089
  misc_feature (1)..(372): Homolog of NCBI NO: 11358406 NR Description: hypothetical protein T7H20.230 - Arabidopsis
  misc_feature (277)..(373): Homolog of NCBI NO: 25408639 NR Description: hypothetical protein At2g39130 [imported] -
  misc_feature (1)..(257): Homolog of NCBI NO: 25408639 NR Description: hypothetical protein At2g39130 [imported] -
  misc_feature (1)..(373): Homolog of NCBI NO: 22326569 NR Description: putative protein
  misc_feature (1)..(372): Homolog of NCBI NO: 30679549 NR Description: amino acid transporter family [Arabidopsis
  misc_feature (1)..(373): Homolog of NCBI NO: 15292735 NR Description: unknown protein [Arabidopsis thaliana]
  misc_feature (1)..(373): Homolog of NCBI NO: 30687791 NR Description: amino acid transporter family [Arabidopsis
  misc_feature (1)..(377): Homolog of NCBI NO: 23397299 NR Description: unknown protein [Arabidopsis thaliana]
  misc_feature (1)..(178): Homolog of NCBI NO: 7487631 NR Description: hypothetical protein At2g41190 [imported] -
  misc_feature (1)..(377): Homolog of NCBI NO: 18405629 NR Description: expressed protein
  misc_feature (1)..(372): Homolog of NCBI NO: 11358406 NR Description: hypothetical protein T7H20.230 - Arabidopsis
  misc_feature (277)..(373): Homolog of NCBI NO: 25408639 NR Description: hypothetical protein At2g39130 [imported] -
  misc_feature (1)..(257): Homolog of NCBI NO: 25408639 NR Description: hypothetical protein At2g39130 [imported] -
  misc_feature (1)..(373): Homolog of NCBI NO: 22326569 NR Description: putative protein
  misc_feature (1)..(372): Homolog of NCBI NO: 30679549 NR Description: amino acid transporter family [Arabidopsis
  misc_feature (1)..(373): Homolog of NCBI NO: 15292735 NR Description: unknown protein [Arabidopsis thaliana]
  misc_feature (1)..(373): Homolog of NCBI NO: 30687791 NR Description: amino acid transporter family [Arabidopsis
  misc_feature (1)..(377): Homolog of NCBI NO: 23397299 NR Description: unknown protein [Arabidopsis thaliana]
  misc_feature (1)..(178): Homolog of NCBI NO: 7487631 NR Description: hypothetical protein At2g41190 [imported] -
  misc_feature (1)..(377): Homolog of NCBI NO: 18405629 NR Description: expressed protein
MAGVGLLSTPYTVKEAGWASMVILLLFAVICCYTATLMKDCFENKTGIITYPDIGEAAFGKYGRILICMLLYTELYSYCVEFIILEGDNLTGLFPGTSLDLLGFRLDSKHLFGILTALIVLPTVWLKDLRIISYLSAGGVIATALIAVSVFFLGTTGGIGFHHTGQAVKWNGIPFAIGIYGFCYSGHSVFPNIYQSMADKTKFNKAVITCFIICVLLYGGVAIMGYLMFGEATLSQITLNMPQDQFFSKVAQWTTVVSPFTKYALLMNPLARSIEELLPERMSENIWCFLLLRTALVASSVCSAFLIPFFGLMMALIGSLLSILVAIIMPALCFIKIMGNKATRTQMILSSIIVAIGVVSGTLGTYSSVAKIIRNYQ

SEQ ID NO: 36519 - protein, 357 aa, Arabidopsis thaliana
  peptide (1)..(357): Ceres Seq. ID no. 12600090
  misc_feature (1)..(352): Homolog of NCBI NO: 11358406 NR Description: hypothetical protein T7H20.230 - Arabidopsis
  misc_feature (257)..(353): Homolog of NCBI NO: 25408639 NR Description: hypothetical protein At2g39130 [imported] -
  misc_feature (1)..(237): Homolog of NCBI NO: 25408639 NR Description: hypothetical protein At2g39130 [imported] -
  misc_feature (1)..(353): Homolog of NCBI NO: 22326569 NR Description: putative protein
  misc_feature (1)..(352): Homolog of NCBI NO: 30679549 NR Description: amino acid transporter family [Arabidopsis
  misc_feature (1)..(353): Homolog of NCBI NO: 15292735 NR Description: unknown protein [Arabidopsis thaliana]
  misc_feature (1)..(353): Homolog of NCBI NO: 30687791 NR Description: amino acid transporter family [Arabidopsis
  misc_feature (1)..(357): Homolog of NCBI NO: 23397299 NR Description: unknown protein [Arabidopsis thaliana]
  misc_feature (1)..(158): Homolog of NCBI NO: 7487631 NR Description: hypothetical protein At2g41190 [imported] -
  misc_feature (1)..(357): Homolog of NCBI NO: 18405629 NR Description: expressed protein
  misc_feature (1)..(352): Homolog of NCBI NO: 11358406 NR Description: hypothetical protein T7H20.230 - Arabidopsis
  misc_feature (257)..(353): Homolog of NCBI NO: 25408639 NR Description: hypothetical protein At2g39130 [imported] -
  misc_feature (1)..(237): Homolog of NCBI NO: 25408639 NR Description: hypothetical protein At2g39130 [imported] -
  misc_feature (1)..(353): Homolog of NCBI NO: 22326569 NR Description: putative protein
  misc_feature (1)..(352): Homolog of NCBI NO: 30679549 NR Description: amino acid transporter family [Arabidopsis
  misc_feature (1)..(353): Homolog of NCBI NO: 15292735 NR Description: unknown protein [Arabidopsis thaliana]
  misc_feature (1)..(353): Homolog of NCBI NO: 30687791 NR Description: amino acid transporter family [Arabidopsis
  misc_feature (1)..(357): Homolog of NCBI NO: 23397299 NR Description: unknown protein [Arabidopsis thaliana]
  misc_feature (1)..(158): Homolog of NCBI NO: 7487631 NR Description: hypothetical protein At2g41190 [imported] -
  misc_feature (1)..(357): Homolog of NCBI NO: 18405629 NR Description: expressed protein
MVILLLFAVICCYTATLMKDCFENKTGIITYPDIGEAAFGKYGRILICMLLYTELYSYCVEFIILEGDNLTGLFPGTSLDLLGFRLDSKHLFGILTALIVLPTVWLKDLRIISYLSAGGVIATALIAVSVFFLGTTGGIGFHHTGQAVKWNGIPFAIGIYGFCYSGHSVFPNIYQSMADKTKFNKAVITCFIICVLLYGGVAIMGYLMFGEATLSQITLNMPQDQFFSKVAQWTTVVSPFTKYALLMNPLARSIEELLPERMSENIWCFLLLRTALVASSVCSAFLIPFFGLMMALIGSLLSILVAIIMPALCFIKIMGNKATRTQMILSSIIVAIGVVSGTLGTYSSVAKIIRNYQ

SEQ ID NO: 36520 - DNA, 1114 bp, Arabidopsis thaliana
  misc_feature (1)..(1114): Ceres Seq. ID no. 12395025
  misc_feature: MA Experiment ID: 108434 Result: Up-regulated in Transcription
  misc_feature: MA Experiment 108434 PARAMETER Experiment Name: At_Root_Tips_cDNA_P Parameter: Tissue Value: Root Tips
  misc_feature: MA Experiment ID: 108461 Result: Up-regulated in Transcription
  misc_feature: MA Experiment 108461 PARAMETER Experiment Name: At_Germinating_Seeds_cDNA_P Parameter: Age (day) Value: 1 vs. 0
  misc_feature: MA Experiment 108461 PARAMETER Experiment Name: At_Germinating_Seeds_cDNA_P Parameter: Tissue Value: Germinating Seeds
  misc_feature: MA Experiment ID: 108595 Result: Up-regulated in Transcription
  misc_feature: MA Experiment 108595 PARAMETER Experiment Name: At_Ler-pi_Ovule_cDNA_P Parameter: Plant Line Value: null
  misc_feature: MA Experiment ID: 20000179 Result: Up-regulated in Transcription
  misc_feature: MA Experiment 20000179 PARAMETER Experiment Name: At_Germinating_Seeds_P Parameter: Age (hr) Value: 6 vs. 0
  misc_feature: MA Experiment 20000179 PARAMETER Experiment Name: At_Germinating_Seeds_P Parameter: Tissue Value: Germinating Seeds
  misc_feature: MA Experiment ID: 20000227 Result: Up-regulated in Transcription
  misc_feature: MA Experiment 20000227 PARAMETER Experiment Name: At_Root-Tips-vs-Tops_P Parameter: Tissue Value: Root Tips vs. Root Tops
  misc_feature: MA Experiment ID: 20000234 Result: Up-regulated in Transcription
  misc_feature: MA Experiment 20000234 PARAMETER Experiment Name: At_Siliques_P Parameter: Age (day) Value: 21
  misc_feature: MA Experiment 20000234 PARAMETER Experiment Name: At_Siliques_P Parameter: Organism Value: A. thaliana
  misc_feature: MA Experiment 20000234 PARAMETER Experiment Name: At_Siliques_P Parameter: Plant Line Value: WS
  misc_feature: MA Experiment 20000234 PARAMETER Experiment Name: At_Siliques_P Parameter: Tissue Value: Less Than 5mm Siliques vs. Whole Plant
  misc_feature: MA Experiment ID: 20000235 Result: Up-regulated in Transcription
  misc_feature: MA Experiment 20000235 PARAMETER Experiment Name: At_Siliques_P Parameter: Age (day) Value: 21
  misc_feature: MA Experiment 20000235 PARAMETER Experiment Name: At_Siliques_P Parameter: Organism Value: A. thaliana
  misc_feature: MA Experiment 20000235 PARAMETER Experiment Name: At_Siliques_P Parameter: Plant Line Value: WS
  misc_feature: MA Experiment 20000235 PARAMETER Experiment Name: At_Siliques_P Parameter: Tissue Value: 5-10mm Siliques vs. Whole Plant
  misc_feature: MA Experiment ID: 20000264 Result: Up-regulated in Transcription
  misc_feature: MA Experiment 20000264 PARAMETER Experiment Name: At_Open_Flower_P Parameter: Age (day) Value: 21
  misc_feature: MA Experiment 20000264 PARAMETER Experiment Name: At_Open_Flower_P Parameter: Plant Line Value: WS
  misc_feature: MA Experiment 20000264 PARAMETER Experiment Name: At_Open_Flower_P Parameter: Tissue Value: Open Flower vs. Whole Plant
  misc_feature: MA Experiment ID: 20000286 Result: Up-regulated in Transcription
  misc_feature: MA Experiment 20000286 PARAMETER Experiment Name: At_Open_Flower_P Parameter: Age (day) Value: 21
  misc_feature: MA Experiment 20000286 PARAMETER Experiment Name: At_Open_Flower_P Parameter: Plant Line Value: WS
  misc_feature: MA Experiment 20000286 PARAMETER Experiment Name: At_Open_Flower_P Parameter: Tissue Value: Half Open vs. Whole Plant
  misc_feature: MA Experiment ID: 20001771 Result: Up-regulated in Transcription
  misc_feature: MA Experiment 20001771 PARAMETER Experiment Name: At_Far-red-enriched-adult_P Parameter: Age (day) Value: 28
  misc_feature: MA Experiment 20001771 PARAMETER Experiment Name: At_Far-red-enriched-adult_P Parameter: Light Value: Far-red enriched vs. White
  misc_feature: MA Experiment 20001771 PARAMETER Experiment Name: At_Far-red-enriched-adult_P Parameter: Organism Value: A. thaliana
  misc_feature: MA Experiment 20001771 PARAMETER Experiment Name: At_Far-red-enriched-adult_P Parameter: Plant Line Value: Columbia
  misc_feature: MA Experiment 20001771 PARAMETER Experiment Name: At_Far-red-enriched-adult_P Parameter: Timepoint (hr) Value: 16
  misc_feature: MA Experiment 20001771 PARAMETER Experiment Name: At_Far-red-enriched-adult_P Parameter: Tissue Value: Aerial
atactccatggagtagaaaaaggaaaaattcaaggctctttggcttcttctttcttctctgcacttgaatcagaagcttttctcagaatgggttggtcgttgagaatgtggattgtgagtatactcgtgcttacacagctcgttaatggagctctctgttggggagacgctggtcattacgctgtctgcaaaatagctcagagttattttgaggaagatactgtagttgctgtgaagaaacttctgcctgaatctgcaaatggtgagctagcagctgtttgctcatggcctgatgaaatcaaaaagctcccgcaatggcgatggactagtgctttgcattttgctgatacgcctgattacaaatgcaactatgagtactctcgggactgtcctaaagactggtgtgtgacaggggcaatcttcaattacactaaccaactaatgtctacttctgaaaactcacagagtatagtccactataacttaacagaggctctcatgttcttatcacattatatgggagatatccatcagcctttacatgaaggttttattggagatctaggtggtaacaagataaaagttcactggtacaatcaggaaactaatttgcaccgtgtgtgggatgatatgataattgagtctgctctagaaacatactacaattcaagccttccacgcatgattcatgaacttcaagccaaactcaagaacggctggtcaaacgatgtaccttcatgggagtcatgtcaacttaaccaaacggcctgcccaaatccgtatgcttctgaaagcattgatcttgcctgcaagtatgcttacaggaacgccaccgcagggactactttaggagattactatttcgtctctcggttaccggtggtagagaagagacttgcacaaggcggaattcgcttggcagggactcttaaccgaatattttctgcaaaacggaagcttgctagagcatgaaaaaagatccaggagaatcacttgaacatccatgaacactcttatgtattaataatgtgtaatggtagtagttaaggttatggtttggtattgttcctgcgtttaaactataataagtatgaaacgaaaactgtacgtctac

SEQ ID NO: 36521 - protein, 323 aa, Arabidopsis thaliana
  peptide (1)..(323): Ceres Seq. ID no. 12395026
  misc_feature (31)..(314): Homolog of NCBI NO: 15221343 NR Description: putative bifunctional nuclease
  misc_feature (39)..(314): Homolog of NCBI NO: 34895514 NR Description: putative bifunctional nuclease
  misc_feature (39)..(314): Homolog of NCBI NO: 9558456 NR Description: unnamed protein product [Oryza sativa (japonica
  misc_feature (37)..(314): Homolog of NCBI NO: 4099835 NR Description: bifunctional nuclease [Zinnia elegans]
  misc_feature (65)..(129): Homolog of NCBI NO: 7485717 NR Description: hypothetical protein F18E5.210 - Arabidopsis
  misc_feature (160)..(323): Homolog of NCBI NO: 7485717 NR Description: hypothetical protein F18E5.210 - Arabidopsis
  misc_feature (30)..(321): Homolog of NCBI NO: 22328857 NR Description: expressed protein; protein id: At4g21585.1
  misc_feature (34)..(321): Homolog of NCBI NO: 21593575 NR Description: endonuclease, putative [Arabidopsis thaliana]
  misc_feature (34)..(321): Homolog of NCBI NO: 18415729 NR Description: endonuclease, putative
  misc_feature (30)..(323): Homolog of NCBI NO: 18415727 NR Description: putative bifunctional nuclease
ILHGVEKGKIQGSLASSFFSALESEAFLRMGWSLRMWIVSILVLTQLVNGALCWGDAGHYAVCKIAQSYFEEDTVVAVKKLLPESANGELAAVCSWPDEIKKLPQWRWTSALHFADTPDYKCNYEYSRDCPKDWCVTGAIFNYTNQLMSTSENSQSIVHYNLTEALMFLSHYMGDIHQPLHEGFIGDLGGNKIKVHWYNQETNLHRVWDDMIIESALETYYNSSLPRMIHELQAKLKNGWSNDVPSWESCQLNQTACPNPYASESIDLACKYAYRNATAGTTLGDYYFVSRLPVVEKRLAQGGIRLAGTLNRIFSAKRKLARA

SEQ ID NO: 36522 - protein, 294 aa, Arabidopsis thaliana; identical to SEQ ID NO: 30425
  peptide (1)..(294): Ceres Seq. ID no. 12395027
  misc_feature (2)..(285): Homolog of NCBI NO: 15221343 NR Description: putative bifunctional nuclease
  misc_feature (10)..(285): Homolog of NCBI NO: 34895514 NR Description: putative bifunctional nuclease
  misc_feature (10)..(285): Homolog of NCBI NO: 9558456 NR Description: unnamed protein product [Oryza sativa (japonica
  misc_feature (8)..(285): Homolog of NCBI NO: 4099835 NR Description: bifunctional nuclease [Zinnia elegans]
  misc_feature (36)..(100): Homolog of NCBI NO: 7485717 NR Description: hypothetical protein F18E5.210 - Arabidopsis
  misc_feature (131)..(294): Homolog of NCBI NO: 7485717 NR Description: hypothetical protein F18E5.210 - Arabidopsis
  misc_feature (1)..(292): Homolog of NCBI NO: 22328857 NR Description: expressed protein; protein id: At4g21585.1
  misc_feature (5)..(292): Homolog of NCBI NO: 21593575 NR Description: endonuclease, putative [Arabidopsis thaliana]
  misc_feature (5)..(292): Homolog of NCBI NO: 18415729 NR Description: endonuclease, putative
  misc_feature (1)..(294): Homolog of NCBI NO: 18415727 NR Description: putative bifunctional nuclease

SEQ ID NO: 36523 - protein, 288 aa, Arabidopsis thaliana; identical to SEQ ID NO: 30426
  peptide (1)..(288): Ceres Seq. ID no. 12395028
  misc_feature (1)..(279): Homolog of NCBI NO: 15221343 NR Description: putative bifunctional nuclease
  misc_feature (4)..(279): Homolog of NCBI NO: 34895514 NR Description: putative bifunctional nuclease
  misc_feature (4)..(279): Homolog of NCBI NO: 9558456 NR Description: unnamed protein product [Oryza sativa (japonica
  misc_feature (2)..(279): Homolog of NCBI NO: 4099835 NR Description: bifunctional nuclease [Zinnia elegans]
  misc_feature (30)..(94): Homolog of NCBI NO: 7485717 NR Description: hypothetical protein F18E5.210 - Arabidopsis
  misc_feature (125)..(288): Homolog of NCBI NO: 7485717 NR Description: hypothetical protein F18E5.210 - Arabidopsis
  misc_feature (1)..(286): Homolog of NCBI NO: 22328857 NR Description: expressed protein; protein id: At4g21585.1
  misc_feature (1)..(286): Homolog of NCBI NO: 21593575 NR Description: endonuclease, putative [Arabidopsis thaliana]
  misc_feature (1)..(286): Homolog of NCBI NO: 18415729 NR Description: endonuclease, putative
  misc_feature (1)..(288): Homolog of NCBI NO: 18415727 NR Description: putative bifunctional nuclease

SEQ ID NO: 36524 - DNA, 2716 bp, Arabidopsis thaliana
  misc_feature (1)..(2716): Ceres Seq. ID no. 13592888
  misc_feature: MA Experiment ID: 20000180 Result: Up-regulated in Transcription
  misc_feature: MA Experiment 20000180 PARAMETER Experiment Name: At_Germinating_Seeds_P Parameter: Age (hr) Value: 24 vs. 0
  misc_feature: MA Experiment 20000180 PARAMETER Experiment Name: At_Germinating_Seeds_P Parameter: Tissue Value: Germinating Seeds
  misc_feature: MA Experiment ID: 20000185 Result: Up-regulated in Transcription
  misc_feature: MA Experiment 20000185 PARAMETER Experiment Name: At_Roots__P Parameter: Age (day) Value: 7 vs. 21
  misc_feature: MA Experiment 20000185 PARAMETER Experiment Name: At_Roots__P Parameter: Organism Value: A. thaliana
  misc_feature: MA Experiment 20000185 PARAMETER Experiment Name: At_Roots__P Parameter: Tissue Value: Roots vs. Whole Plant
  misc_feature: MA Experiment ID: 20000234 Result: Up-regulated in Transcription
  misc_feature: MA Experiment 20000234 PARAMETER Experiment Name: At_Siliques_P Parameter: Age (day) Value: 21
  misc_feature: MA Experiment 20000234 PARAMETER Experiment Name: At_Siliques_P Parameter: Organism Value: A. thaliana
  misc_feature: MA Experiment 20000234 PARAMETER Experiment Name: At_Siliques_P Parameter: Plant Line Value: WS
  misc_feature: MA Experiment 20000234 PARAMETER Experiment Name: At_Siliques_P Parameter: Tissue Value: Less Than 5mm Siliques vs. Whole Plant
  misc_feature: MA Experiment ID: 20000235 Result: Up-regulated in Transcription
  misc_feature: MA Experiment 20000235 PARAMETER Experiment Name: At_Siliques_P Parameter: Age (day) Value: 21
  misc_feature: MA Experiment 20000235 PARAMETER Experiment Name: At_Siliques_P Parameter: Organism Value: A. thaliana
  misc_feature: MA Experiment 20000235 PARAMETER Experiment Name: At_Siliques_P Parameter: Plant Line Value: WS
  misc_feature: MA Experiment 20000235 PARAMETER Experiment Name: At_Siliques_P Parameter: Tissue Value: 5-10mm Siliques vs. Whole Plant
  misc_feature: MA Experiment ID: 20000264 Result: Up-regulated in Transcription
  misc_feature: MA Experiment 20000264 PARAMETER Experiment Name: At_Open_Flower_P Parameter: Age (day) Value: 21
  misc_feature: MA Experiment 20000264 PARAMETER Experiment Name: At_Open_Flower_P Parameter: Plant Line Value: WS
  misc_feature: MA Experiment 20000264 PARAMETER Experiment Name: At_Open_Flower_P Parameter: Tissue Value: Open Flower vs. Whole Plant
  misc_feature: MA Experiment ID: 20000265 Result: Up-regulated in Transcription
  misc_feature: MA Experiment 20000265 PARAMETER Experiment Name: At_Open_Flower_P Parameter: Age (day) Value: 21
  misc_feature: MA Experiment 20000265 PARAMETER Experiment Name: At_Open_Flower_P Parameter: Plant Line Value: WS
  misc_feature: MA Experiment 20000265 PARAMETER Experiment Name: At_Open_Flower_P Parameter: Tissue Value: Closed Flower vs. Whole Plant
  misc_feature: MA Experiment ID: 20000286 Result: Up-regulated in Transcription
  misc_feature: MA Experiment 20000286 PARAMETER Experiment Name: At_Open_Flower_P Parameter: Age (day) Value: 21
  misc_feature: MA Experiment 20000286 PARAMETER Experiment Name: At_Open_Flower_P Parameter: Plant Line Value: WS
  misc_feature: MA Experiment 20000286 PARAMETER Experiment Name: At_Open_Flower_P Parameter: Tissue Value: Half Open vs. Whole Plant
  misc_feature: MA Experiment ID: 20000439 Result: Up-regulated in Transcription
  misc_feature: MA Experiment 20000439 PARAMETER Experiment Name: At_Roots__P Parameter: Age (day) Value: 14 vs. 21
  misc_feature: MA Experiment 20000439 PARAMETER Experiment Name: At_Roots__P Parameter: Organism Value: A. thaliana
  misc_feature: MA Experiment 20000439 PARAMETER Experiment Name: At_Roots__P Parameter: Tissue Value: Roots vs. Whole Plant
  misc_feature: MA Experiment ID: 20000443 Result: Down-regulated in Transcription
  misc_feature: MA Experiment 20000443 PARAMETER Experiment Name: At_1uM_BR-BRZ__P Parameter: Tissue Value: Shoot Apices
  misc_feature: MA Experiment 20000443 PARAMETER Experiment Name: At_1uM_BR-BRZ__P Parameter: Treatment Value: 1uM BRZ vs. No Treatment
  misc_feature: MA Experiment ID: 20000495 Result: Up-regulated in Transcription
  misc_feature: MA Experiment 20000495 PARAMETER Experiment Name: At_Guard_Cells_P Parameter: Harvest Date Value: 8/2/2002
  misc_feature: MA Experiment 20000495 PARAMETER Experiment Name: At_Guard_Cells_P Parameter: Organism Value: A. thaliana
  misc_feature: MA Experiment 20000495 PARAMETER Experiment Name: At_Guard_Cells_P Parameter: Tissue Value: Guard Cells vs. Leaves
  misc_feature: MA Experiment ID: 20000527 Result: Down-regulated in Transcription
  misc_feature: MA Experiment 20000527 PARAMETER Experiment Name: At_10percent_PEG_P Parameter: Age (day) Value: 20
  misc_feature: MA Experiment 20000527 PARAMETER Experiment Name: At_10percent_PEG_P Parameter: Organism Value: A. thaliana
  misc_feature: MA Experiment 20000527 PARAMETER Experiment Name: At_10percent_PEG_P Parameter: Plant Line Value: WS
  misc_feature: MA Experiment 20000527 PARAMETER Experiment Name: At_10percent_PEG_P Parameter: Timepoint (day) Value: 20
  misc_feature: MA Experiment 20000527 PARAMETER Experiment Name: At_10percent_PEG_P Parameter: Tissue Value: Whole Plant
  misc_feature: MA Experiment 20000527 PARAMETER Experiment Name: At_10percent_PEG_P Parameter: Treatment Value: 10percent PEG vs. No Treatment
  misc_feature: MA Experiment ID: 20000573 Result: Down-regulated in Transcription
  misc_feature: MA Experiment 20000573 PARAMETER Experiment Name: At_100uM_ABA_Mutants__P Parameter: Organism Value: A. thaliana
  misc_feature: MA Experiment 20000573 PARAMETER Experiment Name: At_100uM_ABA_Mutants__P Parameter: Plant Line Value: CS22 vs. Ler wt
  misc_feature: MA Experiment 20000573 PARAMETER Experiment Name: At_100uM_ABA_Mutants__P Parameter: Timepoint (hr) Value: N/A
  misc_feature: MA Experiment 20000573 PARAMETER Experiment Name: At_100uM_ABA_Mutants__P Parameter: Tissue Value: Whole Plant
  misc_feature: MA Experiment 20000573 PARAMETER Experiment Name: At_100uM_ABA_Mutants__P Parameter: Treatment Value: None
  misc_feature: MA Experiment ID: 20000794 Result: Up-regulated in Transcription
  misc_feature: MA Experiment 20000794 PARAMETER Experiment Name: At_Petals_P Parameter: Age (day) Value: 23-25 days
  misc_feature: MA Experiment 20000794 PARAMETER Experiment Name: At_Petals_P Parameter: Plant Line Value: WS
  misc_feature: MA Experiment 20000794 PARAMETER Experiment Name: At_Petals_P Parameter: Tissue Value: Petals vs. Whole plant
  misc_feature: MA Experiment ID: 20001248 Result: Down-regulated in Transcription
  misc_feature: MA Experiment 20001248 PARAMETER Experiment Name: At_Far-red-induction_P Parameter: Age (day) Value: 7
  misc_feature: MA Experiment 20001248 PARAMETER Experiment Name: At_Far-red-induction_P Parameter: Light Value: Far-red vs. White
  misc_feature: MA Experiment 20001248 PARAMETER Experiment Name: At_Far-red-induction_P Parameter: Organism Value: A. thaliana
  misc_feature: MA Experiment 20001248 PARAMETER Experiment Name: At_Far-red-induction_P Parameter: Plant Line Value: Columbia
  misc_feature: MA Experiment 20001248 PARAMETER Experiment Name: At_Far-red-induction_P Parameter: Timepoint (hr) Value: 4
  misc_feature: MA Experiment 20001248 PARAMETER Experiment Name: At_Far-red-induction_P Parameter: Tissue Value: Whole Plant
  misc_feature: MA Experiment ID: 20001558 Result: Up-regulated in Transcription
  misc_feature: MA Experiment 20001558 PARAMETER Experiment Name: At_Drought_Soil_Dry_P Parameter: Age (day) Value: 27
  misc_feature: MA Experiment 20001558 PARAMETER Experiment Name: At_Drought_Soil_Dry_P Parameter: Organism Value: A. thaliana
  misc_feature: MA Experiment 20001558 PARAMETER Experiment Name: At_Drought_Soil_Dry_P Parameter: Plant Line Value: WS
  misc_feature: MA Experiment 20001558 PARAMETER Experiment Name: At_Drought_Soil_Dry_P Parameter: Post Timepoint (hr) Value: 6
  misc_feature: MA Experiment 20001558 PARAMETER Experiment Name: At_Drought_Soil_Dry_P Parameter: Post-Treatment Value: Re-Water vs. No Drought
  misc_feature: MA Experiment 20001558 PARAMETER Experiment Name: At_Drought_Soil_Dry_P Parameter: Timepoint (day) Value: 13
  misc_feature: MA Experiment 20001558 PARAMETER Experiment Name: At_Drought_Soil_Dry_P Parameter: Treatment Value: Drought vs. No Drought
  misc_feature: MA Experiment ID: 20001911 Result: Down-regulated in Transcription
  misc_feature: MA Experiment 20001911 PARAMETER Experiment Name: At_Drought_Reproduction_P Parameter: Age (day) Value: 40
  misc_feature: MA Experiment 20001911 PARAMETER Experiment Name: At_Drought_Reproduction_P Parameter: Organism Value: A. thaliana
  misc_feature: MA Experiment 20001911 PARAMETER Experiment Name: At_Drought_Reproduction_P Parameter: Plant Line Value: WS
  misc_feature: MA Experiment 20001911 PARAMETER Experiment Name: At_Drought_Reproduction_P Parameter: Timepoint (day) Value: 10
  misc_feature: MA Experiment 20001911 PARAMETER Experiment Name: At_Drought_Reproduction_P Parameter: Tissue Value: Flowers
  misc_feature: MA Experiment 20001911 PARAMETER Experiment Name: At_Drought_Reproduction_P Parameter: Treatment Value: Drought vs. No Drought
atggagaagacacagatgcctgtagcccgagaagagaagatactggttctcgtgagattgaggcctctaaaccagaaagagattgccgctaatgaagctgcggattgggaatgtatcaatgataccaccatattgtacagaaacacattgcgcgaaggctcgaactttccttctgcatattcatttgataaagtctaccgaggtgaatgtcccaccagacaagtttacgaggatggaaccaaggaaatcgctctgtctgttgtcaaaggaatcaattgtagtattttcgcatatggccagacgagtagtggaaagacatacaccatgactggtattactgagtttgctgtggctgatatatttgactatatatttcagcatgaagaaagggcgttttccgtgaagttttcagctatagagatctacaatgaggccatacgagatctgcttagctcggatggtacatcactgaggctacgagacgatcctgagaaagggacagttgttgaaaaagccacagaggaaactctgcgagactggaaccatctgaaggaacttctatctatttgtgaaggtaaaactcaaaaaacatgttttctgaaaagtaaacttacatgcttctacattttcgcagcacagcgtaagataggtgaaacctcattgaatgagagaagttccagatctcatcaaatgatcagactgaatttcatcgatctagcaggaagcgagcgtgcttcacaagctatgtcagctggtacaagactcaaggaaggctgccatatcaatagaagtttgctgactcttggaacagtgatccgtaaacttagtaagggaagacaagggcacatcaactttagagactcgaagctcacacgaattctacagccatgcttggggggtaatgcaagaacagctatcatctgcactctgagcccagcaaggagtcatgtagagctaacgaagaacactctcttgtttgcgtgttgtgcaaaggaagtcaccacaaaggcgcggatcaatgttgttatgtcagacaaggctctgctaaagcaactacagcgtgagcttgcgaggctcgagactgagctgagaaaccctgcctcctcacctgcctcaaactgtgattgtgcaatgacggtgaggaagaaagatcttcagatacaaaagatggaaaaggagatcgcagagttgagaaaacagagggatcttgctcaatcccggcttgaagatttcatgagaatgattgaacacaatgtggcgtcaaagcctggaactccacatttcggcaaccacacagacaagtgggaggatggttcagtatcggagacatcaggcgtggtcgattcagacagaaggagttttatatcagatggaatgtctacaccgctgtcaatatcaagagcttatgttcattctcactctgacgatgatgatctggatgaagacttgcctaggcgttcggaagatctatcagaagaatattgcagagaagttcaatgcattgagactgaggaatcagtcacagtctataataacaagaaagacaagagagcagaacctgaaaacgttttaggctgtggtgaggatgctaatggtgaaacgagtgtaagccagaacgtcagggtgagaagttggaaccgcagagagactgtgtcaggcccgagcactccgcctgaaaacatagggacaggtttcctcggaagaccagagagtcacaagattgcgtttcctgatttagagttcggttctactgtatcgaggaatgattctatgtcttcttgcgggagcgattccacagggactcagagcatcagaacgccgttgggagaagagggtggtattactagtatccggactttcgttgaagggcttaaagagatggctaagcgtcaaggcgaggtctcaaatgctgaggattctggtaaaatgaggagggacattggtctggactccatggacagagaatttgagagacagcggcaagagattctggagctatggcaaacttgtaacatctctttggtgcatagaacatacttttacttgctcttcaaaggagatgaggcggattcaatctacatcggagtagagctaagaagacttttgtttatgaaagatagcttctctcagggaaaccaagcattggaaggaggagaaaccttaacattggcctcaagccggaaagagcttcacagggagagaaagatgctgagcaagcttgtggggaaaaggttttcaggagaagagaggaaaagaatctaccacaagtttgggattgcgattaactccaaacgcaggcggttacaacttgtgaatgagctctggagcaatcccaaggacatgactcaggttatggaaagcgcagatgttgtagcgaagcttgtgaggttcgctgagcaaggcagagccatgaaggagatgtttggtctgaccttcacacctccttcgttcttgacaactcggagatcgcatagttggagaaaaagcatgcctgcacttttctaacttctgtttggtccaatgacattttacttttgggtttcttgtagcagaagccatgtcttgtatatcttcttggtgtcatttcatttcctctgtcttttgatttttcaaaacagacaatgttgtaattgaatttttcttttccatcaaattcttttctttttacccgtaaaaattgttattaatgttatgaaaactcataatattttgaccc

SEQ ID NO: 36525 - protein, 834 aa, Arabidopsis thaliana
  peptide (1)..(834): Ceres Seq. ID no. 13592889
  misc_feature (556)..(833): Homolog of NCBI NO: 15208467 NR Description: kinesin heavy chain [Zea mays]
  misc_feature (20)..(422): Homolog of NCBI NO: 15208467 NR Description: kinesin heavy chain [Zea mays]
  misc_feature (655)..(833): Homolog of NCBI NO: 30698217 NR Description: kinesin heavy chain DNA binding protein-related
  misc_feature (7)..(416): Homolog of NCBI NO: 30698217 NR Description: kinesin heavy chain DNA binding protein-related
  misc_feature (655)..(833): Homolog of NCBI NO: 30693419 NR Description: expressed protein [Arabidopsis thaliana]
  misc_feature (2)..(415): Homolog of NCBI NO: 30693419 NR Description: expressed protein [Arabidopsis thaliana]
  misc_feature (556)..(833): Homolog of NCBI NO: 38344976 NR Description: OSJNBa0011L07.1 [Oryza sativa (japonica
  misc_feature (8)..(449): Homolog of NCBI NO: 38344976 NR Description: OSJNBa0011L07.1 [Oryza sativa (japonica
  misc_feature (234)..(418): Homolog of NCBI NO: 15226512 NR Description: kinesin heavy chain -related [Arabidopsis
  misc_feature (1)..(193): Homolog of NCBI NO: 15226512 NR Description: kinesin heavy chain -related [Arabidopsis
MEKTQMPVAREEKILVLVRLRPLNQKEIAANEAADWECINDTTILYRNTLREGSNFPSAYSFDKVYRGECPTRQVYEDGTKEIALSVVKGINCSIFAYGQTSSGKTYTMTGITEFAVADIFDYIFQHEERAFSVKFSAIEIYNEAIRDLLSSDGTSLRLRDDPEKGTVVEKATEETLRDWNHLKELLSICEGKTQKTCFLKSKLTCFYIFAAQRKIGETSLNERSSRSHQMIRLNFIDLAGSERASQAMSAGTRLKEGCHINRSLLTLGTVIRKLSKGRQGHINFRDSKLTRILQPCLGGNARTAIICTLSPARSHVELTKNTLLFACCAKEVTTKARINVVMSDKALLKQLQRELARLETELRNPASSPASNCDCAMTVRKKDLQIQKMEKEIAELRKQRDLAQSRLEDFMRMIEHNVASKPGTPHFGNHTDKWEDGSVSETSGVVDSDRRSFISDGMSTPLSISRAYVHSHSDDDDLDEDLPRRSEDLSEEYCREVQCIETEESVTVYNNKKDKRAEPENVLGCGEDANGETSVSQNVRVRSWNRRETVSGPSTPPENIGTGFLGRPESHKIAFPDLEFGSTVSRNDSMSSCGSDSTGTQSIRTPLGEEGGITSIRTFVEGLKEMAKRQGEVSNAEDSGKMRRDIGLDSMDREFERQRQEILELWQTCNISLVHRTYFYLLFKGDEADSIYIGVELRRLLFMKDSFSQGNQALEGGETLTLASSRKELHRERKMLSKLVGKRFSGEERKRIYHKFGIAINSKRRRLQLVNELWSNPKDMTQVMESADVVAKLVRFAEQGRAMKEMFGLTFTPPSFLTTRRSHSWRKSMPALF

SEQ ID NO: 36526 - protein, 829 aa, Arabidopsis thaliana
  peptide (1)..(829): Ceres Seq. ID no. 13592890
  misc_feature (551)..(828): Homolog of NCBI NO: 15208467 NR Description: kinesin heavy chain [Zea mays]
  misc_feature (15)..(417): Homolog of NCBI NO: 15208467 NR Description: kinesin heavy chain [Zea mays]
  misc_feature (650)..(828): Homolog of NCBI NO: 30698217 NR Description: kinesin heavy chain DNA binding protein-related
  misc_feature (2)..(411): Homolog of NCBI NO: 30698217 NR Description: kinesin heavy chain DNA binding protein-related
  misc_feature (650)..(828): Homolog of NCBI NO: 30693419 NR Description: expressed protein [Arabidopsis thaliana]
  misc_feature (1)..(410): Homolog of NCBI NO: 30693419 NR Description: expressed protein [Arabidopsis thaliana]
  misc_feature (551)..(828): Homolog of NCBI NO: 38344976 NR Description: OSJNBa0011L07.1 [Oryza sativa (japonica
  misc_feature (3)..(444): Homolog of NCBI NO: 38344976 NR Description: OSJNBa0011L07.1 [Oryza sativa (japonica
  misc_feature (229)..(413): Homolog of NCBI NO: 15226512 NR Description: kinesin heavy chain -related [Arabidopsis
  misc_feature (1)..(188): Homolog of NCBI NO: 15226512 NR Description: kinesin heavy chain -related [Arabidopsis
MPVAREEKILVLVRLRPLNQKEIAANEAADWECINDTTILYRNTLREGSNFPSAYSFDKVYRGECPTRQVYEDGTKEIALSVVKGINCSIFAYGQTSSGKTYTMTGITEFAVADIFDYIFQHEERAFSVKFSAIEIYNEAIRDLLSSDGTSLRLRDDPEKGTVVEKATEETLRDWNHLKELLSICEGKTQKTCFLKSKLTCFYIFAAQRKIGETSLNERSSRSHQMIRLNFIDLAGSERASQAMSAGTRLKEGCHINRSLLTLGTVIRKLSKGRQGHINFRDSKLTRILQPCLGGNARTAIICTLSPARSHVELTKNTLLFACCAKEVTTKARINVVMSDKALLKQLQRELARLETELRNPASSPASNCDCAMTVRKKDLQIQKMEKEIAELRKQRDLAQSRLEDFMRMIEHNVASKPGTPHFGNHTDKWEDGSVSETSGVVDSDRRSFISDGMSTPLSISRAYVHSHSDDDDLDEDLPRRSEDLSEEYCREVQCIETEESVTVYNNKKDKRAEPENVLGCGEDANGETSVSQNVRVRSWNRRETVSGPSTPPENIGTGFLGRPESHKIAFPDLEFGSTVSRNDSMSSCGSDSTGTQSIRTPLGEEGGITSIRTFVEGLKEMAKRQGEVSNAEDSGKMRRDIGLDSMDREFERQRQEILELWQTCNISLVHRTYFYLLFKGDEADSIYIGVELRRLLFMKDSFSQGNQALEGGETLTLASSRKELHRERKMLSKLVGKRFSGEERKRIYHKFGIAINSKRRRLQLVNELWSNPKDMTQVMESADVVAKLVRFAEQGRAMKEMFGLTFTPPSFLTTRRSHSWRKSMPALF

SEQ ID NO: 36527 - protein, 726 aa, Arabidopsis thaliana
  peptide (1)..(726): Ceres Seq. ID no. 13592891
  misc_feature (448)..(725): Homolog of NCBI NO: 15208467 NR Description: kinesin heavy chain [Zea mays]
  misc_feature (1)..(314): Homolog of NCBI NO: 15208467 NR Description: kinesin heavy chain [Zea mays]
  misc_feature (547)..(725): Homolog of NCBI NO: 30698217 NR Description: kinesin heavy chain DNA binding protein-related
  misc_feature (1)..(308): Homolog of NCBI NO: 30698217 NR Description: kinesin heavy chain DNA binding protein-related
  misc_feature (547)..(725): Homolog of NCBI NO: 30693419 NR Description: expressed protein [Arabidopsis thaliana]
  misc_feature (1)..(307): Homolog of NCBI NO: 30693419 NR Description: expressed protein [Arabidopsis thaliana]
  misc_feature (448)..(725): Homolog of NCBI NO: 38344976 NR Description: OSJNBa0011L07.1 [Oryza sativa (japonica
  misc_feature (1)..(341): Homolog of NCBI NO: 38344976 NR Description: OSJNBa0011L07.1 [Oryza sativa (japonica
  misc_feature (126)..(310): Homolog of NCBI NO: 15226512 NR Description: kinesin heavy chain -related [Arabidopsis
  misc_feature (1)..(85): Homolog of NCBI NO: 15226512 NR Description: kinesin heavy chain -related [Arabidopsis
MTGITEFAVADIFDYIFQHEERAFSVKFSAIEIYNEAIRDLLSSDGTSLRLRDDPEKGTVVEKATEETLRDWNHLKELLSICEGKTQKTCFLKSKLTCFYIFAAQRKIGETSLNERSSRSHQMIRLNFIDLAGSERASQAMSAGTRLKEGCHINRSLLTLGTVIRKLSKGRQGHINFRDSKLTRILQPCLGGNARTAIICTLSPARSHVELTKNTLLFACCAKEVTTKARINVVMSDKALLKQLQRELARLETELRNPASSPASNCDCAMTVRKKDLQIQKMEKEIAELRKQRDLAQSRLEDFMRMIEHNVASKPGTPHFGNHTDKWEDGSVSETSGVVDSDRRSFISDGMSTPLSISRAYVHSHSDDDDLDEDLPRRSEDLSEEYCREVQCIETEESVTVYNNKKDKRAEPENVLGCGEDANGETSVSQNVRVRSWNRRETVSGPSTPPENIGTGFLGRPESHKIAFPDLEFGSTVSRNDSMSSCGSDSTGTQSIRTPLGEEGGITSIRTFVEGLKEMAKRQGEVSNAEDSGKMRRDIGLDSMDREFERQRQEILELWQTCNISLVHRTYFYLLFKGDEADSIYIGVELRRLLFMKDSFSQGNQALEGGETLTLASSRKELHRERKMLSKLVGKRFSGEERKRIYHKFGIAINSKRRRLQLVNELWSNPKDMTQVMESADVVAKLVRFAEQGRAMKEMFGLTFTPPSFLTTRRSHSWRKSMPALF

SEQ ID NO: 36528 - DNA, 1097 bp, Arabidopsis thaliana
  misc_feature (1)..(1097): Ceres Seq. ID no. 13646094
  misc_feature: MA Experiment ID: 20000173 Result: Down-regulated in Transcription
  misc_feature: MA Experiment 20000173 PARAMETER Experiment Name: At_42deg_Heat_P Parameter: Age (day) Value: 14
  misc_feature: MA Experiment 20000173 PARAMETER Experiment Name: At_42deg_Heat_P Parameter: Organism Value: A. thaliana
  misc_feature: MA Experiment 20000173 PARAMETER Experiment Name: At_42deg_Heat_P Parameter: Plant Line Value: WS
  misc_feature: MA Experiment 20000173 PARAMETER Experiment Name: At_42deg_Heat_P Parameter: Temperature (deg C) Value: 42 vs. 22
  misc_feature: MA Experiment 20000173 PARAMETER Experiment Name: At_42deg_Heat_P Parameter: Timepoint (hr) Value: 6
  misc_feature: MA Experiment 20000173 PARAMETER Experiment Name: At_42deg_Heat_P Parameter: Tissue Value: Aerial
  misc_feature: MA Experiment ID: 20000182 Result: Down-regulated in Transcription
  misc_feature: MA Experiment 20000182 PARAMETER Experiment Name: At_2mM_SA_P Parameter: Age (day) Value: 14
  misc_feature: MA Experiment 20000182 PARAMETER Experiment Name: At_2mM_SA_P Parameter: Organism Value: A. thaliana
  misc_feature: MA Experiment 20000182 PARAMETER Experiment Name: At_2mM_SA_P Parameter: Plant Line Value: WS
  misc_feature: MA Experiment 20000182 PARAMETER Experiment Name: At_2mM_SA_P Parameter: Timepoint (hr) Value: 6
  misc_feature: MA Experiment 20000182 PARAMETER Experiment Name: At_2mM_SA_P Parameter: Tissue Value: Aerial
  misc_feature: MA Experiment 20000182 PARAMETER Experiment Name: At_2mM_SA_P Parameter: Treatment Value: 2mM SA vs. No Treatment
  misc_feature: MA Experiment ID: 20000184 Result: Up-regulated in Transcription
  misc_feature: MA Experiment 20000184 PARAMETER Experiment Name: At_Shoots__P Parameter: Age (day) Value: 7
  misc_feature: MA Experiment 20000184 PARAMETER Experiment Name: At_Shoots__P Parameter: Tissue Value: Shoots vs. Whole Plant
  misc_feature: MA Experiment ID: 20000185 Result: Down-regulated in Transcription
  misc_feature: MA Experiment 20000185 PARAMETER Experiment Name: At_Roots__P Parameter: Age (day) Value: 7 vs. 21
  misc_feature: MA Experiment 20000185 PARAMETER Experiment Name: At_Roots__P Parameter: Organism Value: A. thaliana
  misc_feature: MA Experiment 20000185 PARAMETER Experiment Name: At_Roots__P Parameter: Tissue Value: Roots vs. Whole Plant
  misc_feature: MA Experiment ID: 20000234 Result: Up-regulated in Transcription
  misc_feature: MA Experiment 20000234 PARAMETER Experiment Name: At_Siliques_P Parameter: Age (day) Value: 21
  misc_feature: MA Experiment 20000234 PARAMETER Experiment Name: At_Siliques_P Parameter: Organism Value: A. thaliana
  misc_feature: MA Experiment 20000234 PARAMETER Experiment Name: At_Siliques_P Parameter: Plant Line Value: WS
  misc_feature: MA Experiment 20000234 PARAMETER Experiment Name: At_Siliques_P Parameter: Tissue Value: Less Than 5mm Siliques vs. Whole Plant
  misc_feature: MA Experiment ID: 20000265 Result: Up-regulated in Transcription
  misc_feature: MA Experiment 20000265 PARAMETER Experiment Name: At_Open_Flower_P Parameter: Age (day) Value: 21
  misc_feature: MA Experiment 20000265 PARAMETER Experiment Name: At_Open_Flower_P Parameter: Plant Line Value: WS
  misc_feature: MA Experiment 20000265 PARAMETER Experiment Name: At_Open_Flower_P Parameter: Tissue Value: Closed Flower vs. Whole Plant
  misc_feature: MA Experiment ID: 20000286 Result: Up-regulated in Transcription
  misc_feature: MA Experiment 20000286 PARAMETER Experiment Name: At_Open_Flower_P Parameter: Age (day) Value: 21
  misc_feature: MA Experiment 20000286 PARAMETER Experiment Name: At_Open_Flower_P Parameter: Plant Line Value: WS
  misc_feature: MA Experiment 20000286 PARAMETER Experiment Name: At_Open_Flower_P Parameter: Tissue Value: Half Open vs. Whole Plant
  misc_feature: MA Experiment ID: 20000436 Result: Down-regulated in Transcription
  misc_feature: MA Experiment 20000436 PARAMETER Experiment Name: At_Drought_P Parameter: Age (day) Value: 7
  misc_feature: MA Experiment 20000436 PARAMETER Experiment Name: At_Drought_P Parameter: Organism Value: A. thaliana
  misc_feature: MA Experiment 20000436 PARAMETER Experiment Name: At_Drought_P Parameter: Plant Line Value: WS
  misc_feature: MA Experiment 20000436 PARAMETER Experiment Name: At_Drought_P Parameter: Timepoint (hr) Value: 12
  misc_feature: MA Experiment 20000436 PARAMETER Experiment Name: At_Drought_P Parameter: Tissue Value: Whole Plant
  misc_feature: MA Experiment 20000436 PARAMETER Experiment Name: At_Drought_P Parameter: Treatment Value: Drought vs. No Drought
  misc_feature: MA Experiment ID: 20000437 Result: Down-regulated in Transcription
  misc_feature: MA Experiment 20000437 PARAMETER Experiment Name: At_Drought_P Parameter: Age (day) Value: 8
  misc_feature: MA Experiment 20000437 PARAMETER Experiment Name: At_Drought_P Parameter: Organism Value: A. thaliana
  misc_feature: MA Experiment 20000437 PARAMETER Experiment Name: At_Drought_P Parameter: Plant Line Value: WS
  misc_feature: MA Experiment 20000437 PARAMETER Experiment Name: At_Drought_P Parameter: Timepoint (hr) Value: 24
  misc_feature: MA Experiment 20000437 PARAMETER Experiment Name: At_Drought_P Parameter: Tissue Value: Whole Plant
  misc_feature: MA Experiment 20000437 PARAMETER Experiment Name: At_Drought_P Parameter: Treatment Value: Drought vs. No Drought
  misc_feature: MA Experiment ID: 20000438 Result: Up-regulated in Transcription
  misc_feature: MA Experiment 20000438 PARAMETER Experiment Name: At_Shoots__P Parameter: Age (day) Value: 14
  misc_feature: MA Experiment 20000438 PARAMETER Experiment Name: At_Shoots__P Parameter: Tissue Value: Shoots vs. Whole Plant
  misc_feature: MA Experiment ID: 20000439 Result: Down-regulated in Transcription
  misc_feature: MA Experiment 20000439 PARAMETER Experiment Name: At_Roots__P Parameter: Age (day) Value: 14 vs. 21
  misc_feature: MA Experiment 20000439 PARAMETER Experiment Name: At_Roots__P Parameter: Organism Value: A. thaliana
  misc_feature: MA Experiment 20000439 PARAMETER Experiment Name: At_Roots__P Parameter: Tissue Value: Roots vs. Whole Plant
  misc_feature: MA Experiment ID: 20000453 Result: Down-regulated in Transcription
  misc_feature: MA Experiment 20000453 PARAMETER Experiment Name: At_100uM_ABA_P Parameter: Age (day) Value: 15
  misc_feature: MA Experiment 20000453 PARAMETER Experiment Name: At_100uM_ABA_P Parameter: Organism Value: A. thaliana
  misc_feature: MA Experiment 20000453 PARAMETER Experiment Name: At_100uM_ABA_P Parameter: Plant Line Value: WS
  misc_feature: MA Experiment 20000453 PARAMETER Experiment Name: At_100uM_ABA_P Parameter: Timepoint (hr) Value: 24
  misc_feature: MA Experiment 20000453 PARAMETER Experiment Name: At_100uM_ABA_P Parameter: Tissue Value: Aerial
  misc_feature: MA Experiment 20000453 PARAMETER Experiment Name: At_100uM_ABA_P Parameter: Treatment Value: 100uM ABA vs. No Treatment
  misc_feature: MA Experiment ID: 20000573 Result: Down-regulated in Transcription
  misc_feature: MA Experiment 20000573 PARAMETER Experiment Name: At_100uM_ABA_Mutants__P Parameter: Organism Value: A. thaliana
  misc_feature: MA Experiment 20000573 PARAMETER Experiment Name: At_100uM_ABA_Mutants__P Parameter: Plant Line Value: CS22 vs. Ler wt
  misc_feature: MA Experiment 20000573 PARAMETER Experiment Name: At_100uM_ABA_Mutants__P Parameter: Timepoint (hr) Value: N/A
  misc_feature: MA Experiment 20000573 PARAMETER Experiment Name: At_100uM_ABA_Mutants__P Parameter: Tissue Value: Whole Plant
  misc_feature: MA Experiment 20000573 PARAMETER Experiment Name: At_100uM_ABA_Mutants__P Parameter: Treatment Value: None
  misc_feature: MA Experiment ID: 20001247 Result: Down-regulated in Transcription
  misc_feature: MA Experiment 20001247 PARAMETER Experiment Name: At_Far-red-induction_P Parameter: Age (day) Value: 7
  misc_feature: MA Experiment 20001247 PARAMETER Experiment Name: At_Far-red-induction_P Parameter: Light Value: Far-red vs. White
  misc_feature: MA Experiment 20001247 PARAMETER Experiment Name: At_Far-red-induction_P Parameter: Organism Value: A. thaliana
  misc_feature: MA Experiment 20001247 PARAMETER Experiment Name: At_Far-red-induction_P Parameter: Plant Line Value: Columbia
  misc_feature: MA Experiment 20001247 PARAMETER Experiment Name: At_Far-red-induction_P Parameter: Timepoint (hr) Value: 1
  misc_feature: MA Experiment 20001247 PARAMETER Experiment Name: At_Far-red-induction_P Parameter: Tissue Value: Whole Plant
  misc_feature: MA Experiment ID: 20001555 Result: Down-regulated in Transcription
  misc_feature: MA Experiment 20001555 PARAMETER Experiment Name: At_Drought_Soil_Dry_P Parameter: Age (day) Value: 24
  misc_feature: MA Experiment 20001555 PARAMETER Experiment Name: At_Drought_Soil_Dry_P Parameter: Organism Value: A. thaliana
  misc_feature: MA Experiment 20001555 PARAMETER Experiment Name: At_Drought_Soil_Dry_P Parameter: Plant Line Value: WS
  misc_feature: MA Experiment 20001555 PARAMETER Experiment Name: At_Drought_Soil_Dry_P Parameter: Post Timepoint (hr) Value: None
  misc_feature: MA Experiment 20001555 PARAMETER Experiment Name: At_Drought_Soil_Dry_P Parameter: Post-Treatment Value: None
  misc_feature: MA Experiment 20001555 PARAMETER Experiment Name: At_Drought_Soil_Dry_P Parameter: Timepoint (day) Value: 10
  misc_feature: MA Experiment 20001555 PARAMETER Experiment Name: At_Drought_Soil_Dry_P Parameter: Treatment Value: Drought vs. No Drought
  misc_feature: MA Experiment ID: 20001556 Result: Down-regulated in Transcription
  misc_feature: MA Experiment 20001556 PARAMETER Experiment Name: At_Drought_Soil_Dry_P Parameter: Age (day) Value: 26
  misc_feature: MA Experiment 20001556 PARAMETER Experiment Name: At_Drought_Soil_Dry_P Parameter: Organism Value: A. thaliana
  misc_feature: MA Experiment 20001556 PARAMETER Experiment Name: At_Drought_Soil_Dry_P Parameter: Plant Line Value: WS
  misc_feature: MA Experiment 20001556 PARAMETER Experiment Name: At_Drought_Soil_Dry_P Parameter: Post Timepoint (hr) Value: None
  misc_feature: MA Experiment 20001556 PARAMETER Experiment Name: At_Drought_Soil_Dry_P Parameter: Post-Treatment Value: None
  misc_feature: MA Experiment 20001556 PARAMETER Experiment Name: At_Drought_Soil_Dry_P Parameter: Timepoint (day) Value: 12
  misc_feature: MA Experiment 20001556 PARAMETER Experiment Name: At_Drought_Soil_Dry_P Parameter: Treatment Value: Drought vs. No Drought
  misc_feature: MA Experiment ID: 20001560 Result: Up-regulated in Transcription
  misc_feature: MA Experiment 20001560 PARAMETER Experiment Name: At_Drought_Soil_Dry_P Parameter: Age (day) Value: 28
  misc_feature: MA Experiment 20001560 PARAMETER Experiment Name: At_Drought_Soil_Dry_P Parameter: Organism Value: A. thaliana
  misc_feature: MA Experiment 20001560 PARAMETER Experiment Name: At_Drought_Soil_Dry_P Parameter: Plant Line Value: WS
  misc_feature: MA Experiment 20001560 PARAMETER Experiment Name: At_Drought_Soil_Dry_P Parameter: Post Timepoint (hr) Value: None
  misc_feature: MA Experiment 20001560 PARAMETER Experiment Name: At_Drought_Soil_Dry_P Parameter: Post-Treatment Value: None
  misc_feature: MA Experiment 20001560 PARAMETER Experiment Name: At_Drought_Soil_Dry_P Parameter: Timepoint (day) Value: 14
  misc_feature: MA Experiment 20001560 PARAMETER Experiment Name: At_Drought_Soil_Dry_P Parameter: Treatment Value: Drought vs. No Drought
  misc_feature: MA Experiment ID: 20001906 Result: Down-regulated in Transcription
  misc_feature: MA Experiment 20001906 PARAMETER Experiment Name: At_Drought_Reproduction_P Parameter: Age (day) Value: 35
  misc_feature: MA Experiment 20001906 PARAMETER Experiment Name: At_Drought_Reproduction_P Parameter: Organism Value: A. thaliana
  misc_feature: MA Experiment 20001906 PARAMETER Experiment Name: At_Drought_Reproduction_P Parameter: Plant Line Value: WS
  misc_feature: MA Experiment 20001906 PARAMETER Experiment Name: At_Drought_Reproduction_P Parameter: Timepoint (day) Value: 5
  misc_feature: MA Experiment 20001906 PARAMETER Experiment Name: At_Drought_Reproduction_P Parameter: Tissue Value: Siliques
  misc_feature: MA Experiment 20001906 PARAMETER Experiment Name: At_Drought_Reproduction_P Parameter: Treatment Value: Drought vs. No Drought
gtccctatccaatacacatctctctctctcttattaactcaatgacggcgactgcgtttagggtcggcttgtggttggccgttacggcttcctttctcttaaccgcaacaaacgccaaaatccccggcgtttacagtggcggaccgtggcagaatgcacacgccactttctacggtggcagtgacgcccggcacaatgggcggcgcgtgtgggtacgggaacttgtacagccaaggatacggtgtgaacacggcggcgttgagcactgctttgttcaacaacggattcagctgtggtgcttgttttgagattaagtgtactgatgatccaagatggtgtgttccgggaaatccatctattcttgtgacggcgacgaacttttgtccgccgaattttgctcagccgagtgacgacggagggtggtgcaatccgccgcgcgagcattttgatctcgccatgcctatgttcctcaagatcggtctataccgtgcaggcattgtccccgtctcctatcgcagggtaccttgtcggaagataggagggataagattcacagtaaacggattcagatacttcaatcttgttctggtaactaacgttgccggcgccggagatattaacggagttagcgtaaagggatcaaagacagattgggtgaggatgagtcggaactggggacagaactggcaatccaacgccgttctcatcggccaatcactctctttccgagtcaccgcctctgaccgacgttcttctacctcatggaacgttgctcctgccacgtggcagtttggtcagactttctccggcaaaaactttcgagtctgaaatctgaaaaaccacccaaaagatgttttttaattttattttttacaatggaagaagacacaaacaagaagagagatgagacattttccagccctgggttttccctttaattttcttgggaatattccggtggcttgtggaaaatatttccgtttttagtattattatcagcaaaatttcttttaatctttgcgatttacgagtgatttgtttttctcttggttattttgttcctttaattatttcgttggtggcatcttcgttctgcg

SEQ ID NO: 36529 - protein, 224 aa, Arabidopsis thaliana
  peptide (1)..(224): Ceres Seq. ID no. 13646095
  misc_feature (131)..(208): Pfam Name: Pollen allergen Pfam Description: Pollen allergen
  misc_feature (13)..(224): Homolog of NCBI NO: 11281299 NR Description: alpha-expansin 2 [imported] - Triphysaria
  misc_feature (13)..(224): Homolog of NCBI NO: 29466643 NR Description: expansin [Prunus persica]
  misc_feature (13)..(224): Homolog of NCBI NO: 20138197 NR Description: Alpha-expansin 6 precursor (At-EXP6) (AtEx6)
  misc_feature (13)..(224): Homolog of NCBI NO: 15227005 NR Description: expansin, putative [Arabidopsis thaliana]
  misc_feature (13)..(224): Homolog of NCBI NO: 1076531 NR Description: pollen allergen homolog, hypothetical (clone
  misc_feature (13)..(224): Homolog of NCBI NO: 29467509 NR Description: expansin [Pyrus communis]
  misc_feature (13)..(224): Homolog of NCBI NO: 20502786 NR Description: expansin 12 precursor [Rumex palustris]
  misc_feature (13)..(224): Homolog of NCBI NO: 20502782 NR Description: expansin 10 precursor [Rumex palustris]
  misc_feature (13)..(224): Homolog of NCBI NO: 20502784 NR Description: expansin 11 precursor [Rumex palustris]
  misc_feature (13)..(224): Homolog of NCBI NO: 15224330 NR Description: expansin, putative (EXP3) [Arabidopsis thaliana]
MHTPLSTVAVTPGTMGGACGYGNLYSQGYGVNTAALSTALFNNGFSCGACFEIKCTDDPRWCVPGNPSILVTATNFCPPNFAQPSDDGGWCNPPREHFDLAMPMFLKIGLYRAGIVPVSYRRVPCRKIGGIRFTVNGFRYFNLVLVTNVAGAGDINGVSVKGSKTDWVRMSRNWGQNWQSNAVLIGQSLSFRVTASDRRSSTSWNVAPATWQFGQTFSGKNFRV

SEQ ID NO: 36530 - protein, 210 aa, Arabidopsis thaliana
  peptide (1)..(210): Ceres Seq. ID no. 13646096
  misc_feature (117)..(194): Pfam Name: Pollen allergen Pfam Description: Pollen allergen
  misc_feature (1)..(210): Homolog of NCBI NO: 11281299 NR Description: alpha-expansin 2 [imported] - Triphysaria
  misc_feature (1)..(210): Homolog of NCBI NO: 29466643 NR Description: expansin [Prunus persica]
  misc_feature (1)..(210): Homolog of NCBI NO: 20138197 NR Description: Alpha-expansin 6 precursor (At-EXP6) (AtEx6)
  misc_feature (1)..(210): Homolog of NCBI NO: 15227005 NR Description: expansin, putative [Arabidopsis thaliana]
  misc_feature (1)..(210): Homolog of NCBI NO: 1076531 NR Description: pollen allergen homolog, hypothetical (clone
  misc_feature (1)..(210): Homolog of NCBI NO: 29467509 NR Description: expansin [Pyrus communis]
  misc_feature (1)..(210): Homolog of NCBI NO: 20502786 NR Description: expansin 12 precursor [Rumex palustris]
  misc_feature (1)..(210): Homolog of NCBI NO: 20502782 NR Description: expansin 10 precursor [Rumex palustris]
  misc_feature (1)..(210): Homolog of NCBI NO: 20502784 NR Description: expansin 11 precursor [Rumex palustris]
  misc_feature (1)..(210): Homolog of NCBI NO: 15224330 NR Description: expansin, putative (EXP3) [Arabidopsis thaliana]
MGGACGYGNLYSQGYGVNTAALSTALFNNGFSCGACFEIKCTDDPRWCVPGNPSILVTATNFCPPNFAQPSDDGGWCNPPREHFDLAMPMFLKIGLYRAGIVPVSYRRVPCRKIGGIRFTVNGFRYFNLVLVTNVAGAGDINGVSVKGSKTDWVRMSRNWGQNWQSNAVLIGQSLSFRVTASDRRSSTSWNVAPATWQFGQTFSGKNFRV

SEQ ID NO: 36531 - protein, 123 aa, Arabidopsis thaliana
  peptide (1)..(123): Ceres Seq. ID no. 13646097
  misc_feature (30)..(107): Pfam Name: Pollen allergen Pfam Description: Pollen allergen
  misc_feature (1)..(123): Homolog of NCBI NO: 11281299 NR Description: alpha-expansin 2 [imported] - Triphysaria
  misc_feature (1)..(123): Homolog of NCBI NO: 20138197 NR Description: Alpha-expansin 6 precursor (At-EXP6) (AtEx6)
  misc_feature (1)..(123): Homolog of NCBI NO: 29466643 NR Description: expansin [Prunus persica]
  misc_feature (1)..(123): Homolog of NCBI NO: 15227005 NR Description: expansin, putative [Arabidopsis thaliana]
  misc_feature (1)..(123): Homolog of NCBI NO: 1076531 NR Description: pollen allergen homolog, hypothetical (clone
  misc_feature (1)..(123): Homolog of NCBI NO: 29467509 NR Description: expansin [Pyrus communis]
  misc_feature (1)..(123): Homolog of NCBI NO: 20502786 NR Description: expansin 12 precursor [Rumex palustris]
  misc_feature (1)..(123): Homolog of NCBI NO: 20502782 NR Description: expansin 10 precursor [Rumex palustris]
  misc_feature (1)..(123): Homolog of NCBI NO: 20502784 NR Description: expansin 11 precursor [Rumex palustris]
  misc_feature (1)..(123): Homolog of NCBI NO: 15224330 NR Description: expansin, putative (EXP3) [Arabidopsis thaliana]
MPMFLKIGLYRAGIVPVSYRRVPCRKIGGIRFTVNGFRYFNLVLVTNVAGAGDINGVSVKGSKTDWVRMSRNWGQNWQSNAVLIGQSLSFRVTASDRRSSTSWNVAPATWQFGQTFSGKNFRV

SEQ ID NO: 36532 - DNA, 1233 bp, Arabidopsis thaliana
  misc_feature (1)..(1233): Ceres Seq. ID no. 13509427
  misc_feature: MA Experiment ID: 20000180 Result: Up-regulated in Transcription
  misc_feature: MA Experiment 20000180 PARAMETER Experiment Name: At_Germinating_Seeds_P Parameter: Age (hr) Value: 24 vs. 0
  misc_feature: MA Experiment 20000180 PARAMETER Experiment Name: At_Germinating_Seeds_P Parameter: Tissue Value: Germinating Seeds
  misc_feature: MA Experiment ID: 20000182 Result: Up-regulated in Transcription
  misc_feature: MA Experiment 20000182 PARAMETER Experiment Name: At_2mM_SA_P Parameter: Age (day) Value: 14
  misc_feature: MA Experiment 20000182 PARAMETER Experiment Name: At_2mM_SA_P Parameter: Organism Value: A. thaliana
  misc_feature: MA Experiment 20000182 PARAMETER Experiment Name: At_2mM_SA_P Parameter: Plant Line Value: WS
  misc_feature: MA Experiment 20000182 PARAMETER Experiment Name: At_2mM_SA_P Parameter: Timepoint (hr) Value: 6
  misc_feature: MA Experiment 20000182 PARAMETER Experiment Name: At_2mM_SA_P Parameter: Tissue Value: Aerial
  misc_feature: MA Experiment 20000182 PARAMETER Experiment Name: At_2mM_SA_P Parameter: Treatment Value: 2mM SA vs. No Treatment
  misc_feature: MA Experiment ID: 20000437 Result: Up-regulated in Transcription
  misc_feature: MA Experiment 20000437 PARAMETER Experiment Name: At_Drought_P Parameter: Age (day) Value: 8
  misc_feature: MA Experiment 20000437 PARAMETER Experiment Name: At_Drought_P Parameter: Organism Value: A. thaliana
  misc_feature: MA Experiment 20000437 PARAMETER Experiment Name: At_Drought_P Parameter: Plant Line Value: WS
  misc_feature: MA Experiment 20000437 PARAMETER Experiment Name: At_Drought_P Parameter: Timepoint (hr) Value: 24
  misc_feature: MA Experiment 20000437 PARAMETER Experiment Name: At_Drought_P Parameter: Tissue Value: Whole Plant
  misc_feature: MA Experiment 20000437 PARAMETER Experiment Name: At_Drought_P Parameter: Treatment Value: Drought vs. No Drought
ctcttttctctcttagttcagggaggaggctcgagaacagtgccccatatctgaaagctgaagctaagaatctggacgttcgtgtttaaaccgacgacgtatttgaaattggctttgaaggaaaggtgaaattaatggcggaatcgtcgtcgccgtcgcctactgaagagatcgttcggttgattaagcgtttaagcgcttacgttgctttcaaaatgtcaagccttttctccactacatcgattcgaaatctggattcaagatcaattggtgcgattgcggggcttgcgattgcggtgatatttacgtggagggcgataagaacgcccggagagcaacgtcagagaaggcagccgaagcgtaggattcacaatgctgaaacgtctagtgctgctgctgctgcttctcagtcgaatctagcttcttcggttgctccggaagtttcttcgcctcgtgaggataatgcggtgcaagatgttgttgatcagttctttcaacctgttaaacctactttggggcaaatagttagacagaagcttagtgaaggaaggaaggtaacatgccgtcttcttggagtaattcttgaggaaacaagtccagaagaactccaaaaacaagccacagtgaggtcatctgttttggaagttctactagagattacaaagtatagtgatttgtatcttatggaaagagttcttgacgatgaaagcgaggccaaagttttacaggctttagagaatgcaggagtttttacatctggtggtttagtcaaagataaggtgctcttttgtagtacagagataggaagaacttcctttgtcagacagctagaacctgactggcatattgatacaaacccggaaatcagcacacaactagctaggttcatcaaatatcagcttcatgtcgctacggtgaaacccgagcgaacagctccaaatgtgttcacctcgcagtcaatagaacagttctttggaagtgtttaatatcaacaaaaaaagagaggtgaaagatattacgttgtcctgacttaagcatcgttgatcgagtgtctcttaggctgaaacttgaaacttgtttttcatttttctttgattgtgtctaaattaaagtttgatatacatttggagttagatattactgcgagtgcctctgtgaaagtatccaagtttgtaatttttgtattagcaacttagcaaaattctttaagaaataaacaaatgtccgttgtct

SEQ ID NO: 36533 - protein, 283 aa, Arabidopsis thaliana
  peptide (1)..(283): Ceres Seq. ID no. 13509428
  misc_feature (145)..(283): Homolog of NCBI NO: 23481990 NR Description: hypothetical protein [Plasmodium yoelii yoelii]
  misc_feature (85)..(257): Homolog of NCBI NO: 39546241 NR Description: OSJNBa0089N06.11 [Oryza sativa (japonica
  misc_feature (184)..(283): Homolog of NCBI NO: 18403177 NR Description: expressed protein [Arabidopsis thaliana]
  misc_feature (11)..(94): Homolog of NCBI NO: 38345629 NR Description: OSJNBb0004A17.10 [Oryza sativa (japonica
  misc_feature (101)..(280): Homolog of NCBI NO: 38345629 NR Description: OSJNBb0004A17.10 [Oryza sativa (japonica
  misc_feature (133)..(283): Homolog of NCBI NO: 21618311 NR Description: unknown [Arabidopsis thaliana]
  misc_feature (1)..(283): Homolog of NCBI NO: 17381010 NR Description: unknown protein [Arabidopsis thaliana]
  misc_feature (145)..(283): Homolog of NCBI NO: 23481990 NR Description: hypothetical protein [Plasmodium yoelii yoelii]
  misc_feature (85)..(257): Homolog of NCBI NO: 39546241 NR Description: OSJNBa0089N06.11 [Oryza sativa (japonica
  misc_feature (184)..(283): Homolog of NCBI NO: 18403177 NR Description: expressed protein [Arabidopsis thaliana]
  misc_feature (11)..(94): Homolog of NCBI NO: 38345629 NR Description: OSJNBb0004A17.10 [Oryza sativa (japonica
  misc_feature (101)..(280): Homolog of NCBI NO: 38345629 NR Description: OSJNBb0004A17.10 [Oryza sativa (japonica
  misc_feature (133)..(283): Homolog of NCBI NO: 21618311 NR Description: unknown [Arabidopsis thaliana]
  misc_feature (1)..(283): Homolog of NCBI NO: 17381010 NR Description: unknown protein [Arabidopsis thaliana]
MAESSSPSPTEEIVRLIKRLSAYVAFKMSSLFSTTSIRNLDSRSIGAIAGLAIAVIFTWRAIRTPGEQRQRRQPKRRIHNAETSSAAAAASQSNLASSVAPEVSSPREDNAVQDVVDQFFQPVKPTLGQIVRQKLSEGRKVTCRLLGVILEETSPEELQKQATVRSSVLEVLLEITKYSDLYLMERVLDDESEAKVLQALENAGVFTSGGLVKDKVLFCSTEIGRTSFVRQLEPDWHIDTNPEISTQLARFIKYQLHVATVKPERTAPNVFTSQSIEQFFGSV

SEQ ID NO: 36534 - protein, 256 aa, Arabidopsis thaliana
  peptide (1)..(256): Ceres Seq. ID no. 13509429
  misc_feature (118)..(256): Homolog of NCBI NO: 23481990 NR Description: hypothetical protein [Plasmodium yoelii yoelii]
  misc_feature (58)..(230): Homolog of NCBI NO: 39546241 NR Description: OSJNBa0089N06.11 [Oryza sativa (japonica
  misc_feature (157)..(256): Homolog of NCBI NO: 18403177 NR Description: expressed protein [Arabidopsis thaliana]
  misc_feature (1)..(67): Homolog of NCBI NO: 38345629 NR Description: OSJNBb0004A17.10 [Oryza sativa (japonica
  misc_feature (74)..(253): Homolog of NCBI NO: 38345629 NR Description: OSJNBb0004A17.10 [Oryza sativa (japonica
  misc_feature (106)..(256): Homolog of NCBI NO: 21618311 NR Description: unknown [Arabidopsis thaliana]
  misc_feature (1)..(256): Homolog of NCBI NO: 17381010 NR Description: unknown protein [Arabidopsis thaliana]
  misc_feature (118)..(256): Homolog of NCBI NO: 23481990 NR Description: hypothetical protein [Plasmodium yoelii yoelii]
  misc_feature (58)..(230): Homolog of NCBI NO: 39546241 NR Description: OSJNBa0089N06.11 [Oryza sativa (japonica
  misc_feature (157)..(256): Homolog of NCBI NO: 18403177 NR Description: expressed protein [Arabidopsis thaliana]
  misc_feature (1)..(67): Homolog of NCBI NO: 38345629 NR Description: OSJNBb0004A17.10 [Oryza sativa (japonica
  misc_feature (74)..(253): Homolog of NCBI NO: 38345629 NR Description: OSJNBb0004A17.10 [Oryza sativa (japonica
  misc_feature (106)..(256): Homolog of NCBI NO: 21618311 NR Description: unknown [Arabidopsis thaliana]
  misc_feature (1)..(256): Homolog of NCBI NO: 17381010 NR Description: unknown protein [Arabidopsis thaliana]
MSSLFSTTSIRNLDSRSIGAIAGLAIAVIFTWRAIRTPGEQRQRRQPKRRIHNAETSSAAAAASQSNLASSVAPEVSSPREDNAVQDVVDQFFQPVKPTLGQIVRQKLSEGRKVTCRLLGVILEETSPEELQKQATVRSSVLEVLLEITKYSDLYLMERVLDDESEAKVLQALENAGVFTSGGLVKDKVLFCSTEIGRTSFVRQLEPDWHIDTNPEISTQLARFIKYQLHVATVKPERTAPNVFTSQSIEQFFGSV

SEQ ID NO: 36535 - DNA, 1129 bp, Arabidopsis thaliana
  misc_feature (1)..(1129): Ceres Seq. ID no. 13499586
  misc_feature: MA Experiment ID: 108473 Result: Up-regulated in Transcription
  misc_feature: MA Experiment 108473 PARAMETER Experiment Name: At_Drought_Flowers_cDNA_P Parameter: Timepoint (hr) Value: 7 d
  misc_feature: MA Experiment 108473 PARAMETER Experiment Name: At_Drought_Flowers_cDNA_P Parameter: Tissue Value: Flower
  misc_feature: MA Experiment 108473 PARAMETER Experiment Name: At_Drought_Flowers_cDNA_P Parameter: Treatment Value: Drought vs. No Drought
  misc_feature: MA Experiment ID: 108561 Result: Up-regulated in Transcription
  misc_feature: MA Experiment 108561 PARAMETER Experiment Name: At_100uM_ABA_cDNA_P Parameter: Timepoint (hr) Value: 6
  misc_feature: MA Experiment 108561 PARAMETER Experiment Name: At_100uM_ABA_cDNA_P Parameter: Tissue Value: Aerial
  misc_feature: MA Experiment 108561 PARAMETER Experiment Name: At_100uM_ABA_cDNA_P Parameter: Treatment Value: 100uM ABA vs. No Treatment
  misc_feature: MA Experiment ID: 108585 Result: Up-regulated in Transcription
  misc_feature: MA Experiment 108585 PARAMETER Experiment Name: At_5mM_NaNP_cDNA_P Parameter: Timepoint (hr) Value: 6
  misc_feature: MA Experiment 108585 PARAMETER Experiment Name: At_5mM_NaNP_cDNA_P Parameter: Tissue Value: Aerial
  misc_feature: MA Experiment 108585 PARAMETER Experiment Name: At_5mM_NaNP_cDNA_P Parameter: Treatment Value: null
  misc_feature: MA Experiment ID: 108594 Result: Up-regulated in Transcription
  misc_feature: MA Experiment 108594 PARAMETER Experiment Name: At_Ler-rhl_Root_cDNA_P Parameter: Plant Line Value: null
  misc_feature: MA Experiment ID: 108607 Result: Up-regulated in Transcription
  misc_feature: MA Experiment 108607 PARAMETER Experiment Name: At_100uM_ABA_cDNA_P Parameter: Timepoint (hr) Value: 4
  misc_feature: MA Experiment 108607 PARAMETER Experiment Name: At_100uM_ABA_cDNA_P Parameter: Tissue Value: Aerial
  misc_feature: MA Experiment 108607 PARAMETER Experiment Name: At_100uM_ABA_cDNA_P Parameter: Treatment Value: 100uM ABA vs. No Treatment
  misc_feature: MA Experiment ID: 108608 Result: Up-regulated in Transcription
  misc_feature: MA Experiment 108608 PARAMETER Experiment Name: At_100uM_ABA_cDNA_P Parameter: Timepoint (hr) Value: 1
  misc_feature: MA Experiment 108608 PARAMETER Experiment Name: At_100uM_ABA_cDNA_P Parameter: Tissue Value: Aerial
  misc_feature: MA Experiment 108608 PARAMETER Experiment Name: At_100uM_ABA_cDNA_P Parameter: Treatment Value: 100uM ABA vs. No Treatment
  misc_feature: MA Experiment ID: 108609 Result: Up-regulated in Transcription
  misc_feature: MA Experiment 108609 PARAMETER Experiment Name: At_100uM_ABA_cDNA_P Parameter: Timepoint (hr) Value: 24
  misc_feature: MA Experiment 108609 PARAMETER Experiment Name: At_100uM_ABA_cDNA_P Parameter: Tissue Value: Aerial
  misc_feature: MA Experiment 108609 PARAMETER Experiment Name: At_100uM_ABA_cDNA_P Parameter: Treatment Value: 100uM ABA vs. No Treatment
  misc_feature: MA Experiment ID: 20000069 Result: Up-regulated in Transcription
  misc_feature: MA Experiment 20000069 PARAMETER Experiment Name: At_100uM_ABA_Mutants_cDNA_P Parameter: Plant Line Value: CS23
  misc_feature: MA Experiment 20000069 PARAMETER Experiment Name: At_100uM_ABA_Mutants_cDNA_P Parameter: Timepoint (hr) Value: 6
  misc_feature: MA Experiment 20000069 PARAMETER Experiment Name: At_100uM_ABA_Mutants_cDNA_P Parameter: Tissue Value: Aerial
  misc_feature: MA Experiment 20000069 PARAMETER Experiment Name: At_100uM_ABA_Mutants_cDNA_P Parameter: Treatment Value: 100uM ABA vs. No Treatment
  misc_feature: MA Experiment ID: 20000071 Result: Up-regulated in Transcription
  misc_feature: MA Experiment 20000071 PARAMETER Experiment Name: At_100uM_ABA_Mutants_cDNA_P Parameter: Plant Line Value: CS8104
  misc_feature: MA Experiment 20000071 PARAMETER Experiment Name: At_100uM_ABA_Mutants_cDNA_P Parameter: Timepoint (hr) Value: 6
  misc_feature: MA Experiment 20000071 PARAMETER Experiment Name: At_100uM_ABA_Mutants_cDNA_P Parameter: Tissue Value: Aerial
  misc_feature: MA Experiment 20000071 PARAMETER Experiment Name: At_100uM_ABA_Mutants_cDNA_P Parameter: Treatment Value: 100uM ABA vs. No Treatment
  misc_feature: MA Experiment ID: 20000072 Result: Up-regulated in Transcription
  misc_feature: MA Experiment 20000072 PARAMETER Experiment Name: At_100uM_ABA_Mutants_cDNA_P Parameter: Plant Line Value: CS8105
  misc_feature: MA Experiment 20000072 PARAMETER Experiment Name: At_100uM_ABA_Mutants_cDNA_P Parameter: Timepoint (hr) Value: 6
  misc_feature: MA Experiment 20000072 PARAMETER Experiment Name: At_100uM_ABA_Mutants_cDNA_P Parameter: Tissue Value: Aerial
  misc_feature: MA Experiment 20000072 PARAMETER Experiment Name: At_100uM_ABA_Mutants_cDNA_P Parameter: Treatment Value: 100uM ABA vs. No Treatment
  misc_feature: MA Experiment ID: 20000087 Result: Up-regulated in Transcription
  misc_feature: MA Experiment 20000087 PARAMETER Experiment Name: At_100uM_ABA_Mutants_cDNA_P Parameter: Plant Line Value: WS
  misc_feature: MA Experiment 20000087 PARAMETER Experiment Name: At_100uM_ABA_Mutants_cDNA_P Parameter: Timepoint (hr) Value: 6
  misc_feature: MA Experiment 20000087 PARAMETER Experiment Name: At_100uM_ABA_Mutants_cDNA_P Parameter: Tissue Value: Aerial
  misc_feature: MA Experiment 20000087 PARAMETER Experiment Name: At_100uM_ABA_Mutants_cDNA_P Parameter: Treatment Value: 100uM ABA vs. No Treatment
  misc_feature: MA Experiment ID: 20000112 Result: Up-regulated in Transcription
  misc_feature: MA Experiment 20000112 PARAMETER Experiment Name: At_42deg_Heat_cDNA_P Parameter: Temperature (deg C) Value: 42 vs. 22
  misc_feature: MA Experiment 20000112 PARAMETER Experiment Name: At_42deg_Heat_cDNA_P Parameter: Timepoint (hr) Value: 2
  misc_feature: MA Experiment 20000112 PARAMETER Experiment Name: At_42deg_Heat_cDNA_P Parameter: Tissue Value: Aerial
  misc_feature: MA Experiment ID: 20000166 Result: Up-regulated in Transcription
  misc_feature: MA Experiment 20000166 PARAMETER Experiment Name: At_100uM_ABA_P Parameter: Age (day) Value: 14
  misc_feature: MA Experiment 20000166 PARAMETER Experiment Name: At_100uM_ABA_P Parameter: Organism Value: A. thaliana
  misc_feature: MA Experiment 20000166 PARAMETER Experiment Name: At_100uM_ABA_P Parameter: Plant Line Value: WS
  misc_feature: MA Experiment 20000166 PARAMETER Experiment Name: At_100uM_ABA_P Parameter: Timepoint (hr) Value: 1
  misc_feature: MA Experiment 20000166 PARAMETER Experiment Name: At_100uM_ABA_P Parameter: Tissue Value: Aerial
  misc_feature: MA Experiment 20000166 PARAMETER Experiment Name: At_100uM_ABA_P Parameter: Treatment Value: 100uM ABA vs. No Treatment
  misc_feature: MA Experiment ID: 20000169 Result: Up-regulated in Transcription
  misc_feature: MA Experiment 20000169 PARAMETER Experiment Name: At_100uM_ABA_P Parameter: Age (day) Value: 14
  misc_feature: MA Experiment 20000169 PARAMETER Experiment Name: At_100uM_ABA_P Parameter: Organism Value: A. thaliana
  misc_feature: MA Experiment 20000169 PARAMETER Experiment Name: At_100uM_ABA_P Parameter: Plant Line Value: WS
  misc_feature: MA Experiment 20000169 PARAMETER Experiment Name: At_100uM_ABA_P Parameter: Timepoint (hr) Value: 6
  misc_feature: MA Experiment 20000169 PARAMETER Experiment Name: At_100uM_ABA_P Parameter: Tissue Value: Aerial
  misc_feature: MA Experiment 20000169 PARAMETER Experiment Name: At_100uM_ABA_P Parameter: Treatment Value: 100uM ABA vs. No Treatment
  misc_feature: MA Experiment ID: 20000173 Result: Up-regulated in Transcription
  misc_feature: MA Experiment 20000173 PARAMETER Experiment Name: At_42deg_Heat_P Parameter: Age (day) Value: 14
  misc_feature: MA Experiment 20000173 PARAMETER Experiment Name: At_42deg_Heat_P Parameter: Organism Value: A. thaliana
  misc_feature: MA Experiment 20000173 PARAMETER Experiment Name: At_42deg_Heat_P Parameter: Plant Line Value: WS
  misc_feature: MA Experiment 20000173 PARAMETER Experiment Name: At_42deg_Heat_P Parameter: Temperature (deg C) Value: 42 vs. 22
  misc_feature: MA Experiment 20000173 PARAMETER Experiment Name: At_42deg_Heat_P Parameter: Timepoint (hr) Value: 6
  misc_feature: MA Experiment 20000173 PARAMETER Experiment Name: At_42deg_Heat_P Parameter: Tissue Value: Aerial
  misc_feature: MA Experiment ID: 20000184 Result: Up-regulated in Transcription
  misc_feature: MA Experiment 20000184 PARAMETER Experiment Name: At_Shoots__P Parameter: Age (day) Value: 7
  misc_feature: MA Experiment 20000184 PARAMETER Experiment Name: At_Shoots__P Parameter: Tissue Value: Shoots vs. Whole Plant
  misc_feature: MA Experiment ID: 20000213 Result: Down-regulated in Transcription
  misc_feature: MA Experiment 20000213 PARAMETER Experiment Name: At_4deg_Cold_P Parameter: Timepoint (hr) Value: 2
  misc_feature: MA Experiment ID: 20000224 Result: Down-regulated in Transcription
  misc_feature: MA Experiment ID: 20000227 Result: Down-regulated in Transcription
  misc_feature: MA Experiment 20000227 PARAMETER Experiment Name: At_Root-Tips-vs-Tops_P Parameter: Tissue Value: Root Tips vs. Root Tops
  misc_feature: MA Experiment ID: 20000234 Result: Down-regulated in Transcription
  misc_feature: MA Experiment 20000234 PARAMETER Experiment Name: At_Siliques_P Parameter: Age (day) Value: 21
  misc_feature: MA Experiment 20000234 PARAMETER Experiment Name: At_Siliques_P Parameter: Organism Value: A. thaliana
  misc_feature: MA Experiment 20000234 PARAMETER Experiment Name: At_Siliques_P Parameter: Plant Line Value: WS
  misc_feature: MA Experiment 20000234 PARAMETER Experiment Name: At_Siliques_P Parameter: Tissue Value: Less Than 5mm Siliques vs. Whole Plant
  misc_feature: MA Experiment ID: 20000235 Result: Down-regulated in Transcription
  misc_feature: MA Experiment 20000235 PARAMETER Experiment Name: At_Siliques_P Parameter: Age (day) Value: 21
  misc_feature: MA Experiment 20000235 PARAMETER Experiment Name: At_Siliques_P Parameter: Organism Value: A. thaliana
  misc_feature: MA Experiment 20000235 PARAMETER Experiment Name: At_Siliques_P Parameter: Plant Line Value: WS
  misc_feature: MA Experiment 20000235 PARAMETER Experiment Name: At_Siliques_P Parameter: Tissue Value: 5-10mm Siliques vs. Whole Plant
  misc_feature: MA Experiment ID: 20000264 Result: Down-regulated in Transcription
  misc_feature: MA Experiment 20000264 PARAMETER Experiment Name: At_Open_Flower_P Parameter: Age (day) Value: 21
  misc_feature: MA Experiment 20000264 PARAMETER Experiment Name: At_Open_Flower_P Parameter: Plant Line Value: WS
  misc_feature: MA Experiment 20000264 PARAMETER Experiment Name: At_Open_Flower_P Parameter: Tissue Value: Open Flower vs. Whole Plant
  misc_feature: MA Experiment ID: 20000265 Result: Down-regulated in Transcription
  misc_feature: MA Experiment 20000265 PARAMETER Experiment Name: At_Open_Flower_P Parameter: Age (day) Value: 21
  misc_feature: MA Experiment 20000265 PARAMETER Experiment Name: At_Open_Flower_P Parameter: Plant Line Value: WS
  misc_feature: MA Experiment 20000265 PARAMETER Experiment Name: At_Open_Flower_P Parameter: Tissue Value: Closed Flower vs. Whole Plant
  misc_feature: MA Experiment ID: 20000286 Result: Down-regulated in Transcription
  misc_feature: MA Experiment 20000286 PARAMETER Experiment Name: At_Open_Flower_P Parameter: Age (day) Value: 21
  misc_feature: MA Experiment 20000286 PARAMETER Experiment Name: At_Open_Flower_P Parameter: Plant Line Value: WS
  misc_feature: MA Experiment 20000286 PARAMETER Experiment Name: At_Open_Flower_P Parameter: Tissue Value: Half Open vs. Whole Plant
  misc_feature: MA Experiment ID: 20000436 Result: Up-regulated in Transcription
  misc_feature: MA Experiment 20000436 PARAMETER Experiment Name: At_Drought_P Parameter: Age (day) Value: 7
  misc_feature: MA Experiment 20000436 PARAMETER Experiment Name: At_Drought_P Parameter: Organism Value: A. thaliana
  misc_feature: MA Experiment 20000436 PARAMETER Experiment Name: At_Drought_P Parameter: Plant Line Value: WS
  misc_feature: MA Experiment 20000436 PARAMETER Experiment Name: At_Drought_P Parameter: Timepoint (hr) Value: 12
  misc_feature: MA Experiment 20000436 PARAMETER Experiment Name: At_Drought_P Parameter: Tissue Value: Whole Plant
  misc_feature: MA Experiment 20000436 PARAMETER Experiment Name: At_Drought_P Parameter: Treatment Value: Drought vs. No Drought
  misc_feature: MA Experiment ID: 20000438 Result: Up-regulated in Transcription
  misc_feature: MA Experiment 20000438 PARAMETER Experiment Name: At_Shoots__P Parameter: Age (day) Value: 14
  misc_feature: MA Experiment 20000438 PARAMETER Experiment Name: At_Shoots__P Parameter: Tissue Value: Shoots vs. Whole Plant
  misc_feature: MA Experiment ID: 20000441 Result: Up-regulated in Transcription
  misc_feature: MA Experiment 20000441 PARAMETER Experiment Name: At_1uM_BR-BRZ__P Parameter: Tissue Value: Shoot Apices
  misc_feature: MA Experiment 20000441 PARAMETER Experiment Name: At_1uM_BR-BRZ__P Parameter: Treatment Value: 1uM BR vs. No Treatment
  misc_feature: MA Experiment ID: 20000453 Result: Up-regulated in Transcription
  misc_feature: MA Experiment 20000453 PARAMETER Experiment Name: At_100uM_ABA_P Parameter: Age (day) Value: 15
  misc_feature: MA Experiment 20000453 PARAMETER Experiment Name: At_100uM_ABA_P Parameter: Organism Value: A. thaliana
  misc_feature: MA Experiment 20000453 PARAMETER Experiment Name: At_100uM_ABA_P Parameter: Plant Line Value: WS
  misc_feature: MA Experiment 20000453 PARAMETER Experiment Name: At_100uM_ABA_P Parameter: Timepoint (hr) Value: 24
  misc_feature: MA Experiment 20000453 PARAMETER Experiment Name: At_100uM_ABA_P Parameter: Tissue Value: Aerial
  misc_feature: MA Experiment 20000453 PARAMETER Experiment Name: At_100uM_ABA_P Parameter: Treatment Value: 100uM ABA vs. No Treatment
  misc_feature: MA Experiment ID: 20000456 Result: Down-regulated in Transcription
  misc_feature: MA Experiment 20000456 PARAMETER Experiment Name: At_100uM_BA_P Parameter: Age (day) Value: 14
  misc_feature: MA Experiment 20000456 PARAMETER Experiment Name: At_100uM_BA_P Parameter: Organism Value: A. thaliana
  misc_feature: MA Experiment 20000456 PARAMETER Experiment Name: At_100uM_BA_P Parameter: Plant Line Value: WS
  misc_feature: MA Experiment 20000456 PARAMETER Experiment Name: At_100uM_BA_P Parameter: Timepoint (hr) Value: 6
  misc_feature: MA Experiment 20000456 PARAMETER Experiment Name: At_100uM_BA_P Parameter: Tissue Value: Aerial
  misc_feature: MA Experiment 20000456 PARAMETER Experiment Name: At_100uM_BA_P Parameter: Treatment Value: 100uM BA vs. No Treatment
  misc_feature: MA Experiment ID: 20000574 Result: Down-regulated in Transcription
  misc_feature: MA Experiment 20000574 PARAMETER Experiment Name: At_100uM_ABA_Mutants__P Parameter: Organism Value: A. thaliana
  misc_feature: MA Experiment 20000574 PARAMETER Experiment Name: At_100uM_ABA_Mutants__P Parameter: Plant Line Value: CS23 vs. Ler wt
  misc_feature: MA Experiment 20000574 PARAMETER Experiment Name: At_100uM_ABA_Mutants__P Parameter: Timepoint (hr) Value: N/A
  misc_feature: MA Experiment 20000574 PARAMETER Experiment Name: At_100uM_ABA_Mutants__P Parameter: Tissue Value: Whole Plant
  misc_feature: MA Experiment 20000574 PARAMETER Experiment Name: At_100uM_ABA_Mutants__P Parameter: Treatment Value: None
  misc_feature: MA Experiment ID: 20000794 Result: Down-regulated in Transcription
  misc_feature: MA Experiment 20000794 PARAMETER Experiment Name: At_Petals_P Parameter: Age (day) Value: 23-25 days
  misc_feature: MA Experiment 20000794 PARAMETER Experiment Name: At_Petals_P Parameter: Plant Line Value: WS
  misc_feature: MA Experiment 20000794 PARAMETER Experiment Name: At_Petals_P Parameter: Tissue Value: Petals vs. Whole plant
  misc_feature: MA Experiment ID: 20001247 Result: Up-regulated in Transcription
  misc_feature: MA Experiment 20001247 PARAMETER Experiment Name: At_Far-red-induction_P Parameter: Age (day) Value: 7
  misc_feature: MA Experiment 20001247 PARAMETER Experiment Name: At_Far-red-induction_P Parameter: Light Value: Far-red vs. White
  misc_feature: MA Experiment 20001247 PARAMETER Experiment Name: At_Far-red-induction_P Parameter: Organism Value: A. thaliana
  misc_feature: MA Experiment 20001247 PARAMETER Experiment Name: At_Far-red-induction_P Parameter: Plant Line Value: Columbia
  misc_feature: MA Experiment 20001247 PARAMETER Experiment Name: At_Far-red-induction_P Parameter: Timepoint (hr) Value: 1
  misc_feature: MA Experiment 20001247 PARAMETER Experiment Name: At_Far-red-induction_P Parameter: Tissue Value: Whole Plant
  misc_feature: MA Experiment ID: 20001248 Result: Up-regulated in Transcription
  misc_feature: MA Experiment 20001248 PARAMETER Experiment Name: At_Far-red-induction_P Parameter: Age (day) Value: 7
  misc_feature: MA Experiment 20001248 PARAMETER Experiment Name: At_Far-red-induction_P Parameter: Light Value: Far-red vs. White
  misc_feature: MA Experiment 20001248 PARAMETER Experiment Name: At_Far-red-induction_P Parameter: Organism Value: A. thaliana
  misc_feature: MA Experiment 20001248 PARAMETER Experiment Name: At_Far-red-induction_P Parameter: Plant Line Value: Columbia
  misc_feature: MA Experiment 20001248 PARAMETER Experiment Name: At_Far-red-induction_P Parameter: Timepoint (hr) Value: 4
  misc_feature: MA Experiment 20001248 PARAMETER Experiment Name: At_Far-red-induction_P Parameter: Tissue Value: Whole Plant
  misc_feature: MA Experiment ID: 20001450 Result: Up-regulated in Transcription
  misc_feature: MA Experiment 20001450 PARAMETER Experiment Name: At_Far-red-induction_P Parameter: Age (day) Value: 7
  misc_feature: MA Experiment 20001450 PARAMETER Experiment Name: At_Far-red-induction_P Parameter: Light Value: Far-red vs. White
  misc_feature: MA Experiment 20001450 PARAMETER Experiment Name: At_Far-red-induction_P Parameter: Organism Value: A. thaliana
  misc_feature: MA Experiment 20001450 PARAMETER Experiment Name: At_Far-red-induction_P Parameter: Plant Line Value: Columbia
  misc_feature: MA Experiment 20001450 PARAMETER Experiment Name: At_Far-red-induction_P Parameter: Timepoint (hr) Value: 8
  misc_feature: MA Experiment 20001450 PARAMETER Experiment Name: At_Far-red-induction_P Parameter: Tissue Value: Whole Plant
  misc_feature: MA Experiment ID: 20001451 Result: Up-regulated in Transcription
  misc_feature: MA Experiment 20001451 PARAMETER Experiment Name: At_Far-red-induction_P Parameter: Age (day) Value: 7
  misc_feature: MA Experiment 20001451 PARAMETER Experiment Name: At_Far-red-induction_P Parameter: Light Value: Far-red vs. White
  misc_feature: MA Experiment 20001451 PARAMETER Experiment Name: At_Far-red-induction_P Parameter: Organism Value: A. thaliana
  misc_feature: MA Experiment 20001451 PARAMETER Experiment Name: At_Far-red-induction_P Parameter: Plant Line Value: Columbia
  misc_feature: MA Experiment 20001451 PARAMETER Experiment Name: At_Far-red-induction_P Parameter: Timepoint (hr) Value: 24
  misc_feature: MA Experiment 20001451 PARAMETER Experiment Name: At_Far-red-induction_P Parameter: Tissue Value: Whole Plant
  misc_feature: MA Experiment ID: 20001558 Result: Down-regulated in Transcription
  misc_feature: MA Experiment 20001558 PARAMETER Experiment Name: At_Drought_Soil_Dry_P Parameter: Age (day) Value: 27
  misc_feature: MA Experiment 20001558 PARAMETER Experiment Name: At_Drought_Soil_Dry_P Parameter: Organism Value: A. thaliana
  misc_feature: MA Experiment 20001558 PARAMETER Experiment Name: At_Drought_Soil_Dry_P Parameter: Plant Line Value: WS
  misc_feature: MA Experiment 20001558 PARAMETER Experiment Name: At_Drought_Soil_Dry_P Parameter: Post Timepoint (hr) Value: 6
  misc_feature: MA Experiment 20001558 PARAMETER Experiment Name: At_Drought_Soil_Dry_P Parameter: Post-Treatment Value: Re-Water vs. No Drought
  misc_feature: MA Experiment 20001558 PARAMETER Experiment Name: At_Drought_Soil_Dry_P Parameter: Timepoint (day) Value: 13
  misc_feature: MA Experiment 20001558 PARAMETER Experiment Name: At_Drought_Soil_Dry_P Parameter: Treatment Value: Drought vs. No Drought
  misc_feature: MA Experiment ID: 20001560 Result: Down-regulated in Transcription
  misc_feature: MA Experiment 20001560 PARAMETER Experiment Name: At_Drought_Soil_Dry_P Parameter: Age (day) Value: 28
  misc_feature: MA Experiment 20001560 PARAMETER Experiment Name: At_Drought_Soil_Dry_P Parameter: Organism Value: A. thaliana
  misc_feature: MA Experiment 20001560 PARAMETER Experiment Name: At_Drought_Soil_Dry_P Parameter: Plant Line Value: WS
  misc_feature: MA Experiment 20001560 PARAMETER Experiment Name: At_Drought_Soil_Dry_P Parameter: Post Timepoint (hr) Value: None
  misc_feature: MA Experiment 20001560 PARAMETER Experiment Name: At_Drought_Soil_Dry_P Parameter: Post-Treatment Value: None
  misc_feature: MA Experiment 20001560 PARAMETER Experiment Name: At_Drought_Soil_Dry_P Parameter: Timepoint (day) Value: 14
  misc_feature: MA Experiment 20001560 PARAMETER Experiment Name: At_Drought_Soil_Dry_P Parameter: Treatment Value: Drought vs. No Drought
  misc_feature: MA Experiment ID: 20001757 Result: Up-regulated in Transcription
  misc_feature: MA Experiment 20001757 PARAMETER Experiment Name: At_50mM_NH4NO3_L-to-H_P Parameter: Timepoint (hr) Value: 6
  misc_feature: MA Experiment 20001757 PARAMETER Experiment Name: At_50mM_NH4NO3_L-to-H_P Parameter: Tissue Value: Leaf
  misc_feature: MA Experiment 20001757 PARAMETER Experiment Name: At_50mM_NH4NO3_L-to-H_P Parameter: Treatment Value: 50mM NH4NO3 vs 100mM Mannitol
  misc_feature: MA Experiment ID: 20001904 Result: Up-regulated in Transcription
  misc_feature: MA Experiment 20001904 PARAMETER Experiment Name: At_Drought_Reproduction_P Parameter: Age (day) Value: 37
  misc_feature: MA Experiment 20001904 PARAMETER Experiment Name: At_Drought_Reproduction_P Parameter: Organism Value: A. thaliana
  misc_feature: MA Experiment 20001904 PARAMETER Experiment Name: At_Drought_Reproduction_P Parameter: Plant Line Value: WS
  misc_feature: MA Experiment 20001904 PARAMETER Experiment Name: At_Drought_Reproduction_P Parameter: Timepoint (day) Value: 7
  misc_feature: MA Experiment 20001904 PARAMETER Experiment Name: At_Drought_Reproduction_P Parameter: Tissue Value: Rosettes
  misc_feature: MA Experiment 20001904 PARAMETER Experiment Name: At_Drought_Reproduction_P Parameter: Treatment Value: Drought vs. No Drought
  misc_feature: MA Experiment ID: 20001905 Result: Up-regulated in Transcription
  misc_feature: MA Experiment 20001905 PARAMETER Experiment Name: At_Drought_Reproduction_P Parameter: Age (day) Value: 40
  misc_feature: MA Experiment 20001905 PARAMETER Experiment Name: At_Drought_Reproduction_P Parameter: Organism Value: A. thaliana
  misc_feature: MA Experiment 20001905 PARAMETER Experiment Name: At_Drought_Reproduction_P Parameter: Plant Line Value: WS
  misc_feature: MA Experiment 20001905 PARAMETER Experiment Name: At_Drought_Reproduction_P Parameter: Timepoint (day) Value: 10
  misc_feature: MA Experiment 20001905 PARAMETER Experiment Name: At_Drought_Reproduction_P Parameter: Tissue Value: Rosettes
  misc_feature: MA Experiment 20001905 PARAMETER Experiment Name: At_Drought_Reproduction_P Parameter: Treatment Value: Drought vs. No Drought
  misc_feature: MA Experiment ID: 20001910 Result: Up-regulated in Transcription
  misc_feature: MA Experiment 20001910 PARAMETER Experiment Name: At_Drought_Reproduction_P Parameter: Age (day) Value: 37
  misc_feature: MA Experiment 20001910 PARAMETER Experiment Name: At_Drought_Reproduction_P Parameter: Organism Value: A. thaliana
  misc_feature: MA Experiment 20001910 PARAMETER Experiment Name: At_Drought_Reproduction_P Parameter: Plant Line Value: WS
  misc_feature: MA Experiment 20001910 PARAMETER Experiment Name: At_Drought_Reproduction_P Parameter: Timepoint (day) Value: 7
  misc_feature: MA Experiment 20001910 PARAMETER Experiment Name: At_Drought_Reproduction_P Parameter: Tissue Value: Flowers
  misc_feature: MA Experiment 20001910 PARAMETER Experiment Name: At_Drought_Reproduction_P Parameter: Treatment Value: Drought vs. No Drought
  misc_feature: MA Experiment ID: 20001911 Result: Up-regulated in Transcription
  misc_feature: MA Experiment 20001911 PARAMETER Experiment Name: At_Drought_Reproduction_P Parameter: Age (day) Value: 40
  misc_feature: MA Experiment 20001911 PARAMETER Experiment Name: At_Drought_Reproduction_P Parameter: Organism Value: A. thaliana
  misc_feature: MA Experiment 20001911 PARAMETER Experiment Name: At_Drought_Reproduction_P Parameter: Plant Line Value: WS
  misc_feature: MA Experiment 20001911 PARAMETER Experiment Name: At_Drought_Reproduction_P Parameter: Timepoint (day) Value: 10
  misc_feature: MA Experiment 20001911 PARAMETER Experiment Name: At_Drought_Reproduction_P Parameter: Tissue Value: Flowers
  misc_feature: MA Experiment 20001911 PARAMETER Experiment Name: At_Drought_Reproduction_P Parameter: Treatment Value: Drought vs. No Drought
gagcccaactcctctctcttcacgcatttctcgttgtcaaagacaaagttctctccttttataaacacccatctccacctcctctctcttattcaaacttctttgagaaaattcgagctaagtgtttttataatatatacattctctgatatgggtttctctagagcaaaacgtgtcactgatccacttgcagaagaggttagggctcgtctcgttggatgcagctttagcagcggcagcgaacataccggcgacggaattgaagactacgaagacgacgactcgccttgtctctctgatctagtacaagggttcttggaagatgaagttgatacagttgatgatgagtcatgctggtgtgatcaagattctggttccgactcggattctgactcggaacttggcgagctccctgactttgccgacgatatcgccaagcttctgaggaactctctcagggaagattcatacggacgaacggtgctggtacatgtggcgagagcgatggaaatgttgtcgtctctcggatctcagcccgaacagcgtgccgttttccagcgtaaggtcatgtctcttcttagagaactcggccacaatgcggccatctgcaaaactaaatggaaatcctccggcggactcaccgccggtaaccatgagttcatcgacgtcgtgtatacaccttccgcctcgtctcagtccgtccgtttcatcgtcgatttagatttctcgtcgcggtttcaaatcgcgaggccaacttcacagtacgcgcgtgtgcttcaatcgcttccggcggttttcgtcggaaagggggatgatctgaagcggatcttgcgtctcgtgtgtgacgccgcgaggatttctcttaggaaccgcgggctgacgcttccgccgtggaggaagaatcgttatatgcagacgcggtggcttggtccttacaaacgcaccaccaacttaacgccgtcaacttccggtgtagacaccgtcatgtgtcgtgccatcggtttcgataatgccgtcggaggccgtctatttgtgcgaacacgataaaaactagaccaaaaagaccacgtgtcatttttaacttgattttttccatatacgttctagagaataataattcattatttgc

SEQ ID NO: 36536 - protein, 348 aa, Arabidopsis thaliana
  peptide (1)..(348): Ceres Seq. ID no. 13499587
  misc_feature (98)..(314): Pfam Name: Protein of unknown function (DUF506) Pfam Description: Protein of unknown function (DUF506)
  misc_feature (54)..(316): Homolog of NCBI NO: 28058790 NR Description: unknown protein [Arabidopsis thaliana]
  misc_feature (54)..(316): Homolog of NCBI NO: 15228917 NR Description: expressed protein [Arabidopsis thaliana]
  misc_feature (49)..(316): Homolog of NCBI NO: 30682929 NR Description: expressed protein [Arabidopsis thaliana]
  misc_feature (84)..(314): Homolog of NCBI NO: 37534384 NR Description: unknown protein [Oryza sativa (japonica
  misc_feature (84)..(314): Homolog of NCBI NO: 20042978 NR Description: Hypothetical protein [Oryza sativa]
  misc_feature (84)..(314): Homolog of NCBI NO: 34902608 NR Description: Unknown protein [Oryza sativa (japonica
  misc_feature (63)..(340): Homolog of NCBI NO: 34906942 NR Description: similar to Arabidopsis thaliana chromosome 3,
  misc_feature (92)..(346): Homolog of NCBI NO: 15230824 NR Description: hypothetical protein [Arabidopsis thaliana]
  misc_feature (51)..(348): Homolog of NCBI NO: 21554332 NR Description: unknown [Arabidopsis thaliana]
  misc_feature (51)..(348): Homolog of NCBI NO: 18397919 NR Description: expressed protein [Arabidopsis thaliana]
EPNSSLFTHFSLSKTKFSPFINTHLHLLSLIQTSLRKFELSVFIIYTFSDMGFSRAKRVTDPLAEEVRARLVGCSFSSGSEHTGDGIEDYEDDDSPCLSDLVQGFLEDEVDTVDDESCWCDQDSGSDSDSDSELGELPDFADDIAKLLRNSLREDSYGRTVLVHVARAMEMLSSLGSQPEQRAVFQRKVMSLLRELGHNAAICKTKWKSSGGLTAGNHEFIDVVYTPSASSQSVRFIVDLDFSSRFQIARPTSQYARVLQSLPAVFVGKGDDLKRILRLVCDAARISLRNRGLTLPPWRKNRYMQTRWLGPYKRTTNLTPSTSGVDTVMCRAIGFDNAVGGRLFVRTR

SEQ ID NO: 36537 - protein, 298 aa, Arabidopsis thaliana
  peptide (1)..(298): Ceres Seq. ID no. 13499588
  misc_feature (48)..(264): Pfam Name: Protein of unknown function (DUF506) Pfam Description: Protein of unknown function (DUF506)
  misc_feature (4)..(266): Homolog of NCBI NO: 28058790 NR Description: unknown protein [Arabidopsis thaliana]
  misc_feature (4)..(266): Homolog of NCBI NO: 15228917 NR Description: expressed protein [Arabidopsis thaliana]
  misc_feature (1)..(266): Homolog of NCBI NO: 30682929 NR Description: expressed protein [Arabidopsis thaliana]
  misc_feature (34)..(264): Homolog of NCBI NO: 37534384 NR Description: unknown protein [Oryza sativa (japonica
  misc_feature (34)..(264): Homolog of NCBI NO: 20042978 NR Description: Hypothetical protein [Oryza sativa]
  misc_feature (34)..(264): Homolog of NCBI NO: 34902608 NR Description: Unknown protein [Oryza sativa (japonica
  misc_feature (13)..(290): Homolog of NCBI NO: 34906942 NR Description: similar to Arabidopsis thaliana chromosome 3,
  misc_feature (42)..(296): Homolog of NCBI NO: 15230824 NR Description: hypothetical protein [Arabidopsis thaliana]
  misc_feature (1)..(298): Homolog of NCBI NO: 21554332 NR Description: unknown [Arabidopsis thaliana]
  misc_feature (1)..(298): Homolog of NCBI NO: 18397919 NR Description: expressed protein [Arabidopsis thaliana]
MGFSRAKRVTDPLAEEVRARLVGCSFSSGSEHTGDGIEDYEDDDSPCLSDLVQGFLEDEVDTVDDESCWCDQDSGSDSDSDSELGELPDFADDIAKLLRNSLREDSYGRTVLVHVARAMEMLSSLGSQPEQRAVFQRKVMSLLRELGHNAAICKTKWKSSGGLTAGNHEFIDVVYTPSASSQSVRFIVDLDFSSRFQIARPTSQYARVLQSLPAVFVGKGDDLKRILRLVCDAARISLRNRGLTLPPWRKNRYMQTRWLGPYKRTTNLTPSTSGVDTVMCRAIGFDNAVGGRLFVRTR

SEQ ID NO: 36538 - protein, 180 aa, Arabidopsis thaliana
  peptide (1)..(180): Ceres Seq. ID no. 13499589
  misc_feature (1)..(146): Pfam Name: Protein of unknown function (DUF506) Pfam Description: Protein of unknown function (DUF506)
  misc_feature (1)..(148): Homolog of NCBI NO: 28058790 NR Description: unknown protein [Arabidopsis thaliana]
  misc_feature (1)..(148): Homolog of NCBI NO: 15228917 NR Description: expressed protein [Arabidopsis thaliana]
  misc_feature (1)..(148): Homolog of NCBI NO: 30682929 NR Description: expressed protein [Arabidopsis thaliana]
  misc_feature (1)..(146): Homolog of NCBI NO: 37534384 NR Description: unknown protein [Oryza sativa (japonica
  misc_feature (1)..(146): Homolog of NCBI NO: 20042978 NR Description: Hypothetical protein [Oryza sativa]
  misc_feature (1)..(146): Homolog of NCBI NO: 34902608 NR Description: Unknown protein [Oryza sativa (japonica
  misc_feature (1)..(172): Homolog of NCBI NO: 34906942 NR Description: similar to Arabidopsis thaliana chromosome 3,
  misc_feature (1)..(178): Homolog of NCBI NO: 15230824 NR Description: hypothetical protein [Arabidopsis thaliana]
  misc_feature (1)..(180): Homolog of NCBI NO: 21554332 NR Description: unknown [Arabidopsis thaliana]
  misc_feature (1)..(180): Homolog of NCBI NO: 18397919 NR Description: expressed protein [Arabidopsis thaliana]
MEMLSSLGSQPEQRAVFQRKVMSLLRELGHNAAICKTKWKSSGGLTAGNHEFIDVVYTPSASSQSVRFIVDLDFSSRFQIARPTSQYARVLQSLPAVFVGKGDDLKRILRLVCDAARISLRNRGLTLPPWRKNRYMQTRWLGPYKRTTNLTPSTSGVDTVMCRAIGFDNAVGGRLFVRTR

SEQ ID NO: 36539 - DNA, 696 bp, Arabidopsis thaliana
  misc_feature (1)..(696): Ceres Seq. ID no. 12336350
  misc_feature: MA Experiment ID: 108561 Result: Down-regulated in Transcription
  misc_feature: MA Experiment 108561 PARAMETER Experiment Name: At_100uM_ABA_cDNA_P Parameter: Timepoint (hr) Value: 6
  misc_feature: MA Experiment 108561 PARAMETER Experiment Name: At_100uM_ABA_cDNA_P Parameter: Tissue Value: Aerial
  misc_feature: MA Experiment 108561 PARAMETER Experiment Name: At_100uM_ABA_cDNA_P Parameter: Treatment Value: 100uM ABA vs. No Treatment
  misc_feature: MA Experiment ID: 108573 Result: Down-regulated in Transcription
  misc_feature: MA Experiment 108573 PARAMETER Experiment Name: At_Drought_cDNA_P Parameter: Timepoint (hr) Value: 6
  misc_feature: MA Experiment 108573 PARAMETER Experiment Name: At_Drought_cDNA_P Parameter: Tissue Value: Aerial
  misc_feature: MA Experiment 108573 PARAMETER Experiment Name: At_Drought_cDNA_P Parameter: Treatment Value: Drought vs. No Drought
  misc_feature: MA Experiment ID: 108577 Result: Down-regulated in Transcription
  misc_feature: MA Experiment 108577 PARAMETER Experiment Name: At_42deg_Heat_cDNA_P Parameter: Temperature (deg C) Value: 42 vs. 22
  misc_feature: MA Experiment 108577 PARAMETER Experiment Name: At_42deg_Heat_cDNA_P Parameter: Timepoint (hr) Value: 6
  misc_feature: MA Experiment 108577 PARAMETER Experiment Name: At_42deg_Heat_cDNA_P Parameter: Tissue Value: Aerial
  misc_feature: MA Experiment ID: 20000111 Result: Down-regulated in Transcription
  misc_feature: MA Experiment 20000111 PARAMETER Experiment Name: At_42deg_Heat_cDNA_P Parameter: Temperature (deg C) Value: 42 vs. 22
  misc_feature: MA Experiment 20000111 PARAMETER Experiment Name: At_42deg_Heat_cDNA_P Parameter: Timepoint (hr) Value: 6
  misc_feature: MA Experiment 20000111 PARAMETER Experiment Name: At_42deg_Heat_cDNA_P Parameter: Tissue Value: Aerial
aattaacagtgctttaaatctaagaaccctaattcaatactccacaaagggggtttcttcttcccaaggtttcagattctctccgtatccaaagttttgttttgttttttgtttgaaagcgaggatgaaagaatcgaaatcagccaagctgaatcagctacaacaacaagagaatcaccagaatgctcacttgtctccatcgaaattagcgaaattgttcgatcccgatgcttcttgggacaaggatcaattaggagatgtgttacattggattcgacaagtggtgggattgatctctggattgttatggggctctattccacttgttggaggcatttggatcattctgtttttggcgatatcctctgggatagtttatggttactacgcaatgattctcaaggttgatgaagaagatttcggaggccacgcagctttactccaagagggtctctttgcgtcacttactctctttttgctcgcatggattcttgtctatagcttggcacacttctgaaaaaaaagctgagcaacattcttttcactcagcagcaaaggcattggaacgaatctttttgttcttttgttttgtttttgtaaactgtctgaagataaggctacaagagacaaaacgttatagtaacaatttttatgaatcttttgaatgttacaaaagctttctatagtatcattttt

SEQ ID NO: 36540 - protein, 171 aa, Arabidopsis thaliana
  peptide (1)..(171): Ceres Seq. ID no. 12336351
  misc_feature (61)..(170): Homolog of NCBI NO: 24211596 NR Description: Protein C20orf24 (Rab5-interacting protein)
  misc_feature (61)..(170): Homolog of NCBI NO: 34872254 NR Description: similar to RIKEN cDNA 1110008F13 [Rattus
  misc_feature (54)..(171): Homolog of NCBI NO: 27503935 NR Description: Similar to RIKEN cDNA 1110008F13 gene [Danio
  misc_feature (61)..(171): Homolog of NCBI NO: 27704314 NR Description: similar to RIKEN cDNA 1110008F13
  misc_feature (61)..(171): Homolog of NCBI NO: 10047116 NR Description: putative Rab5-interacting protein [Homo sapiens]
  misc_feature (61)..(171): Homolog of NCBI NO: 13385630 NR Description: RIKEN cDNA 1110008F13 [Mus musculus]
  misc_feature (42)..(160): Homolog of NCBI NO: 14719336 NR Description: hypothetical protein [Oryza sativa]
  misc_feature (42)..(171): Homolog of NCBI NO: 18401926 NR Description: expressed protein
  misc_feature (42)..(159): Homolog of NCBI NO: 8885547 NR Description: gb|AAF17201.1~gene_id:F2O15.9~similar to unknown
  misc_feature (42)..(171): Homolog of NCBI NO: 15238396 NR Description: putative Rab5-interacting protein - like; protein
INSALNLRTLIQYSTKGVSSSQGFRFSPYPKFCFVFCLKARMKESKSAKLNQLQQQENHQNAHLSPSKLAKLFDPDASWDKDQLGDVLHWIRQVVGLISGLLWGSIPLVGGIWIILFLAISSGIVYGYYAMILKVDEEDFGGHAALLQEGLFASLTLFLLAWILVYSLAHF

SEQ ID NO: 36541 - protein, 130 aa, Arabidopsis thaliana
  peptide (1)..(130): Ceres Seq. ID no. 12336352
  misc_feature (20)..(129): Homolog of NCBI NO: 24211596 NR Description: Protein C20orf24 (Rab5-interacting protein)
  misc_feature (20)..(129): Homolog of NCBI NO: 34872254 NR Description: similar to RIKEN cDNA 1110008F13 [Rattus
  misc_feature (13)..(130): Homolog of NCBI NO: 27503935 NR Description: Similar to RIKEN cDNA 1110008F13 gene [Danio
  misc_feature (20)..(130): Homolog of NCBI NO: 27704314 NR Description: similar to RIKEN cDNA 1110008F13
  misc_feature (20)..(130): Homolog of NCBI NO: 10047116 NR Description: putative Rab5-interacting protein [Homo sapiens]
  misc_feature (20)..(130): Homolog of NCBI NO: 13385630 NR Description: RIKEN cDNA 1110008F13 [Mus musculus]
  misc_feature (1)..(119): Homolog of NCBI NO: 14719336 NR Description: hypothetical protein [Oryza sativa]
  misc_feature (1)..(130): Homolog of NCBI NO: 18401926 NR Description: expressed protein
  misc_feature (1)..(118): Homolog of NCBI NO: 8885547 NR Description: gb|AAF17201.1~gene_id:F2O15.9~similar to unknown
  misc_feature (1)..(130): Homolog of NCBI NO: 15238396 NR Description: putative Rab5-interacting protein - like; protein
MKESKSAKLNQLQQQENHQNAHLSPSKLAKLFDPDASWDKDQLGDVLHWIRQVVGLISGLLWGSIPLVGGIWIILFLAISSGIVYGYYAMILKVDEEDFGGHAALLQEGLFASLTLFLLAWILVYSLAHF

SEQ ID NO: 36542 - protein, 92 aa, Arabidopsis thaliana
  peptide (1)..(92): Ceres Seq. ID no. 12336353
MKKISEATQLYSKRVSLRHLLSFCSHGFLSIAWHTSEKKAEQHSFHSAAKALERIFLFFCFVFVNCLKIRLQETKRYSNNFYESFECYKSFL

SEQ ID NO: 36543 - DNA, 2464 bp, Arabidopsis thaliana
  misc_feature (1)..(2464): Ceres Seq. ID no. 12377492
  misc_feature: MA Experiment ID: 20000179 Result: Up-regulated in Transcription
  misc_feature: MA Experiment 20000179 PARAMETER Experiment Name: At_Germinating_Seeds_P Parameter: Age (hr) Value: 6 vs. 0
  misc_feature: MA Experiment 20000179 PARAMETER Experiment Name: At_Germinating_Seeds_P Parameter: Tissue Value: Germinating Seeds
  misc_feature: MA Experiment ID: 20000180 Result: Up-regulated in Transcription
  misc_feature: MA Experiment 20000180 PARAMETER Experiment Name: At_Germinating_Seeds_P Parameter: Age (hr) Value: 24 vs. 0
  misc_feature: MA Experiment 20000180 PARAMETER Experiment Name: At_Germinating_Seeds_P Parameter: Tissue Value: Germinating Seeds
  misc_feature: MA Experiment ID: 20000227 Result: Up-regulated in Transcription
  misc_feature: MA Experiment 20000227 PARAMETER Experiment Name: At_Root-Tips-vs-Tops_P Parameter: Tissue Value: Root Tips vs. Root Tops
  misc_feature: MA Experiment ID: 20000234 Result: Up-regulated in Transcription
  misc_feature: MA Experiment 20000234 PARAMETER Experiment Name: At_Siliques_P Parameter: Age (day) Value: 21
  misc_feature: MA Experiment 20000234 PARAMETER Experiment Name: At_Siliques_P Parameter: Organism Value: A. thaliana
  misc_feature: MA Experiment 20000234 PARAMETER Experiment Name: At_Siliques_P Parameter: Plant Line Value: WS
  misc_feature: MA Experiment 20000234 PARAMETER Experiment Name: At_Siliques_P Parameter: Tissue Value: Less Than 5mm Siliques vs. Whole Plant
  misc_feature: MA Experiment ID: 20000235 Result: Up-regulated in Transcription
  misc_feature: MA Experiment 20000235 PARAMETER Experiment Name: At_Siliques_P Parameter: Age (day) Value: 21
  misc_feature: MA Experiment 20000235 PARAMETER Experiment Name: At_Siliques_P Parameter: Organism Value: A. thaliana
  misc_feature: MA Experiment 20000235 PARAMETER Experiment Name: At_Siliques_P Parameter: Plant Line Value: WS
  misc_feature: MA Experiment 20000235 PARAMETER Experiment Name: At_Siliques_P Parameter: Tissue Value: 5-10mm Siliques vs. Whole Plant
  misc_feature: MA Experiment ID: 20000495 Result: Up-regulated in Transcription
  misc_feature: MA Experiment 20000495 PARAMETER Experiment Name: At_Guard_Cells_P Parameter: Harvest Date Value: 8/2/2002
  misc_feature: MA Experiment 20000495 PARAMETER Experiment Name: At_Guard_Cells_P Parameter: Organism Value: A. thaliana
  misc_feature: MA Experiment 20000495 PARAMETER Experiment Name: At_Guard_Cells_P Parameter: Tissue Value: Guard Cells vs. Leaves
  misc_feature: MA Experiment ID: 20000573 Result: Down-regulated in Transcription
  misc_feature: MA Experiment 20000573 PARAMETER Experiment Name: At_100uM_ABA_Mutants__P Parameter: Organism Value: A. thaliana
  misc_feature: MA Experiment 20000573 PARAMETER Experiment Name: At_100uM_ABA_Mutants__P Parameter: Plant Line Value: CS22 vs. Ler wt
  misc_feature: MA Experiment 20000573 PARAMETER Experiment Name: At_100uM_ABA_Mutants__P Parameter: Timepoint (hr) Value: N/A
  misc_feature: MA Experiment 20000573 PARAMETER Experiment Name: At_100uM_ABA_Mutants__P Parameter: Tissue Value: Whole Plant
  misc_feature: MA Experiment 20000573 PARAMETER Experiment Name: At_100uM_ABA_Mutants__P Parameter: Treatment Value: None
  misc_feature: MA Experiment ID: 20000794 Result: Down-regulated in Transcription
  misc_feature: MA Experiment 20000794 PARAMETER Experiment Name: At_Petals_P Parameter: Age (day) Value: 23-25 days
  misc_feature: MA Experiment 20000794 PARAMETER Experiment Name: At_Petals_P Parameter: Plant Line Value: WS
  misc_feature: MA Experiment 20000794 PARAMETER Experiment Name: At_Petals_P Parameter: Tissue Value: Petals vs. Whole plant
  misc_feature: MA Experiment ID: 20001555 Result: Down-regulated in Transcription
  misc_feature: MA Experiment 20001555 PARAMETER Experiment Name: At_Drought_Soil_Dry_P Parameter: Age (day) Value: 24
  misc_feature: MA Experiment 20001555 PARAMETER Experiment Name: At_Drought_Soil_Dry_P Parameter: Organism Value: A. thaliana
  misc_feature: MA Experiment 20001555 PARAMETER Experiment Name: At_Drought_Soil_Dry_P Parameter: Plant Line Value: WS
  misc_feature: MA Experiment 20001555 PARAMETER Experiment Name: At_Drought_Soil_Dry_P Parameter: Post Timepoint (hr) Value: None
  misc_feature: MA Experiment 20001555 PARAMETER Experiment Name: At_Drought_Soil_Dry_P Parameter: Post-Treatment Value: None
  misc_feature: MA Experiment 20001555 PARAMETER Experiment Name: At_Drought_Soil_Dry_P Parameter: Timepoint (day) Value: 10
  misc_feature: MA Experiment 20001555 PARAMETER Experiment Name: At_Drought_Soil_Dry_P Parameter: Treatment Value: Drought vs. No Drought
  misc_feature: MA Experiment ID: 20001560 Result: Up-regulated in Transcription
  misc_feature: MA Experiment 20001560 PARAMETER Experiment Name: At_Drought_Soil_Dry_P Parameter: Age (day) Value: 28
  misc_feature: MA Experiment 20001560 PARAMETER Experiment Name: At_Drought_Soil_Dry_P Parameter: Organism Value: A. thaliana
  misc_feature: MA Experiment 20001560 PARAMETER Experiment Name: At_Drought_Soil_Dry_P Parameter: Plant Line Value: WS
  misc_feature: MA Experiment 20001560 PARAMETER Experiment Name: At_Drought_Soil_Dry_P Parameter: Post Timepoint (hr) Value: None
  misc_feature: MA Experiment 20001560 PARAMETER Experiment Name: At_Drought_Soil_Dry_P Parameter: Post-Treatment Value: None
  misc_feature: MA Experiment 20001560 PARAMETER Experiment Name: At_Drought_Soil_Dry_P Parameter: Timepoint (day) Value: 14
  misc_feature: MA Experiment 20001560 PARAMETER Experiment Name: At_Drought_Soil_Dry_P Parameter: Treatment Value: Drought vs. No Drought
  misc_feature: MA Experiment ID: 20001911 Result: Down-regulated in Transcription
  misc_feature: MA Experiment 20001911 PARAMETER Experiment Name: At_Drought_Reproduction_P Parameter: Age (day) Value: 40
  misc_feature: MA Experiment 20001911 PARAMETER Experiment Name: At_Drought_Reproduction_P Parameter: Organism Value: A. thaliana
  misc_feature: MA Experiment 20001911 PARAMETER Experiment Name: At_Drought_Reproduction_P Parameter: Plant Line Value: WS
  misc_feature: MA Experiment 20001911 PARAMETER Experiment Name: At_Drought_Reproduction_P Parameter: Timepoint (day) Value: 10
  misc_feature: MA Experiment 20001911 PARAMETER Experiment Name: At_Drought_Reproduction_P Parameter: Tissue Value: Flowers
  misc_feature: MA Experiment 20001911 PARAMETER Experiment Name: At_Drought_Reproduction_P Parameter: Treatment Value: Drought vs. No Drought
atatcagagaatcagagaccaacgtcacttatttacacactctgttttcttttttttggttgcttcttctctgatctttctttctttttttttttttgaaagaatcaatttccctctcaaatcagaaatctaaaaatgggaacaacgatcttggttctctccaagatcctaactttcttactaacaacaatgctgattggatccagtgtgatccagtgtagtagtgtaacctacgataagaaagctatcgtcatcaatggccaccgtagaatcctcctctctggttctattcactacccaagaagcactcctgagatgtgggaagatcttataaagaaagctaaagacggtggcttggatgttattgatacttatgttttctggaatggtcatgaaccttctcctggaacttacaatttcgaaggaagatatgatttggtaagattcattaagacgattcaggaagtgggtctttatgttcatctcagaattggtccttatgtttgtgcagaatggaattttggagggtttcctgtgtggttgaagtatgtagatgggattagtttcagaactgacaatggacccttcaagtctgcaatgcaaggattcacagagaagattgttcagatgatgaaagaacatagattctttgcgtcacaaggtggacctatcattctttctcagattgagaatgagtttgaaccagatcttaaagggcttggaccggctggtcactcgtatgtcaattgggctgcgaaaatggcggtcggtttaaacacgggagtaccgtgggtgatgtgcaaggaagatgatgcacctgacccaattataaacacttgcaacggattctactgtgattattttactccaaataaaccgtataagccaactatgtggacagaggcatggagtggctggttcacagagtttggtggaactgttcctaaacgacctgtagaggatctagcatttggagtagctcgtttcattcaaaagggcggttcgtatataaactactacatgtaccatggaggaacaaactttggacgcaccgcaggaggtccatttatcaccactagttatgactatgatgctcctatcgatgaatacgggttggtccaagagcccaagtacagtcatcttaagcagcttcatcaggcaatcaagcaatgtgaagctgccttagtttcttctgatccacatgttactaaactaggaaactacgaggaggctcatgtgttcactgctggcaaaggaagttgtgtagctttcttaacgaactatcacatgaatgcacctgcaaaagtagtgttcaataaccgacactatactctacctgcttggtccatcagcattcttccagattgtagaaacgttgttttcaacactgcgacggttgctgcaaagacatcacatgtgcaaatggtgccatctggttccatattgtactcggttgctagatacgatgaagatattgctacttatggaaaccgtgggacaatcacagctcgtggattgttggagcaggttaatgttacacgagatacaactgattacctgtggtacacaaccagtgtggatattaaggcatcagaatcattcttgcgtggaggaaaatggccaactcttacagtggattctgcagggcatgctgttcatgtgtttgtcaatggacatttttacggatctgcctttggaacaagagaaaacagaaagttttcatttagctcccaagtcaatctacgaggtggagctaacaaaatcgcactactgagtgtagcagttgggttgccgaatgttggaccacattttgagacgtgggccacaggaatcgtcgggtctgtggtgcttcatggccttgacgagggtaacaaagacttgagttggcagaaatggacttatcaggctggtctgcgaggggaatcaatgaacttggtctctcctactgaggactcctctgttgattggatcaaaggctcattggctaagcaaaacaaacaacctttgacatggtacaaggcctattttgacgcgcctagagggaacgagccgctggctttggatctaaagagtatggggaaagggcaagcttggataaacgggcaaagcatagggagatactggatggcatttgccaaaggagactgcggaagttgtaactacgctggaacatacaggcagaacaaatgccagtctggttgtggcgagccgacacaaagatggtatcatgttccgcgttcgtggttgaagccaaaagggaacttgttagtactttttgaagaacttggtggagatatatccaaagtctctgttgtgaagagatcagtaaactaacttaaaaaataaaaccaatattgtgtgtgcattacactaaaagcattactcgtgctgtgtttaatttatccctctttgtgaacagaaaccatatttgaaactcgagatagttataatacaaaatgtgtag

SEQ ID NO: 36544 - protein, 732 aa, Arabidopsis thaliana
  peptide (1)..(732): Ceres Seq. ID no. 12377493
  misc_feature (1)..(732): Homolog of NCBI NO: 14970839 NR Description: beta-galactosidase [Fragaria x ananassa]
  misc_feature (1)..(731): Homolog of NCBI NO: 4138137 NR Description: ss-galactosidase [Lycopersicon esculentum]
  misc_feature (1)..(732): Homolog of NCBI NO: 7488063 NR Description: probable beta-galactosidase (EC 3.2.1.23)
  misc_feature (8)..(731): Homolog of NCBI NO: 7939625 NR Description: putative beta-galactosidase [Lycopersicon
  misc_feature (24)..(732): Homolog of NCBI NO: 20514290 NR Description: beta-galactosidase [Oryza sativa (japonica
  misc_feature (1)..(732): Homolog of NCBI NO: 25326166 NR Description: beta-galactosidase like protein [imported] -
  misc_feature (1)..(732): Homolog of NCBI NO: 18419821 NR Description: glycosyl hydrolase family 35 (beta-galactosidase)
  misc_feature (8)..(732): Homolog of NCBI NO: 3860321 NR Description: beta-galactosidase [Cicer arietinum]
  misc_feature (4)..(732): Homolog of NCBI NO: 7682680 NR Description: beta galactosidase [Vigna radiata]
  misc_feature (8)..(731): Homolog of NCBI NO: 15081596 NR Description: putative beta-galactosidase BG1 [Vitis vinifera]
  misc_feature (1)..(732): Homolog of NCBI NO: 14970839 NR Description: beta-galactosidase [Fragaria x ananassa]
  misc_feature (1)..(731): Homolog of NCBI NO: 4138137 NR Description: ss-galactosidase [Lycopersicon esculentum]
  misc_feature (1)..(732): Homolog of NCBI NO: 7488063 NR Description: probable beta-galactosidase (EC 3.2.1.23)
  misc_feature (8)..(731): Homolog of NCBI NO: 7939625 NR Description: putative beta-galactosidase [Lycopersicon
  misc_feature (24)..(732): Homolog of NCBI NO: 20514290 NR Description: beta-galactosidase [Oryza sativa (japonica
  misc_feature (1)..(732): Homolog of NCBI NO: 25326166 NR Description: beta-galactosidase like protein [imported] -
  misc_feature (1)..(732): Homolog of NCBI NO: 18419821 NR Description: glycosyl hydrolase family 35 (beta-galactosidase)
  misc_feature (8)..(732): Homolog of NCBI NO: 3860321 NR Description: beta-galactosidase [Cicer arietinum]
  misc_feature (4)..(732): Homolog of NCBI NO: 7682680 NR Description: beta galactosidase [Vigna radiata]
  misc_feature (8)..(731): Homolog of NCBI NO: 15081596 NR Description: putative beta-galactosidase BG1 [Vitis vinifera]
MGTTILVLSKILTFLLTTMLIGSSVIQCSSVTYDKKAIVINGHRRILLSGSIHYPRSTPEMWEDLIKKAKDGGLDVIDTYVFWNGHEPSPGTYNFEGRYDLVRFIKTIQEVGLYVHLRIGPYVCAEWNFGGFPVWLKYVDGISFRTDNGPFKSAMQGFTEKIVQMMKEHRFFASQGGPIILSQIENEFEPDLKGLGPAGHSYVNWAAKMAVGLNTGVPWVMCKEDDAPDPIINTCNGFYCDYFTPNKPYKPTMWTEAWSGWFTEFGGTVPKRPVEDLAFGVARFIQKGGSYINYYMYHGGTNFGRTAGGPFITTSYDYDAPIDEYGLVQEPKYSHLKQLHQAIKQCEAALVSSDPHVTKLGNYEEAHVFTAGKGSCVAFLTNYHMNAPAKVVFNNRHYTLPAWSISILPDCRNVVFNTATVAAKTSHVQMVPSGSILYSVARYDEDIATYGNRGTITARGLLEQVNVTRDTTDYLWYTTSVDIKASESFLRGGKWPTLTVDSAGHAVHVFVNGHFYGSAFGTRENRKFSFSSQVNLRGGANKIALLSVAVGLPNVGPHFETWATGIVGSVVLHGLDEGNKDLSWQKWTYQAGLRGESMNLVSPTEDSSVDWIKGSLAKQNKQPLTWYKAYFDAPRGNEPLALDLKSMGKGQAWINGQSIGRYWMAFAKGDCGSCNYAGTYRQNKCQSGCGEPTQRWYHVPRSWLKPKGNLLVLFEELGGDISKVSVVKRSVN

SEQ ID NO: 36545 - protein, 714 aa, Arabidopsis thaliana
  peptide (1)..(714): Ceres Seq. ID no. 12377494
  misc_feature (1)..(714): Homolog of NCBI NO: 14970839 NR Description: beta-galactosidase [Fragaria x ananassa]
  misc_feature (1)..(713): Homolog of NCBI NO: 4138137 NR Description: ss-galactosidase [Lycopersicon esculentum]
  misc_feature (1)..(714): Homolog of NCBI NO: 7488063 NR Description: probable beta-galactosidase (EC 3.2.1.23)
  misc_feature (1)..(713): Homolog of NCBI NO: 7939625 NR Description: putative beta-galactosidase [Lycopersicon
  misc_feature (6)..(714): Homolog of NCBI NO: 20514290 NR Description: beta-galactosidase [Oryza sativa (japonica
  misc_feature (1)..(714): Homolog of NCBI NO: 25326166 NR Description: beta-galactosidase like protein [imported] -
  misc_feature (1)..(714): Homolog of NCBI NO: 18419821 NR Description: glycosyl hydrolase family 35 (beta-galactosidase)
  misc_feature (1)..(714): Homolog of NCBI NO: 3860321 NR Description: beta-galactosidase [Cicer arietinum]
  misc_feature (1)..(714): Homolog of NCBI NO: 7682680 NR Description: beta galactosidase [Vigna radiata]
  misc_feature (1)..(713): Homolog of NCBI NO: 15081596 NR Description: putative beta-galactosidase BG1 [Vitis vinifera]
  misc_feature (1)..(714): Homolog of NCBI NO: 14970839 NR Description: beta-galactosidase [Fragaria x ananassa]
  misc_feature (1)..(713): Homolog of NCBI NO: 4138137 NR Description: ss-galactosidase [Lycopersicon esculentum]
  misc_feature (1)..(714): Homolog of NCBI NO: 7488063 NR Description: probable beta-galactosidase (EC 3.2.1.23)
  misc_feature (1)..(713): Homolog of NCBI NO: 7939625 NR Description: putative beta-galactosidase [Lycopersicon
  misc_feature (6)..(714): Homolog of NCBI NO: 20514290 NR Description: beta-galactosidase [Oryza sativa (japonica
  misc_feature (1)..(714): Homolog of NCBI NO: 25326166 NR Description: beta-galactosidase like protein [imported] -
  misc_feature (1)..(714): Homolog of NCBI NO: 18419821 NR Description: glycosyl hydrolase family 35 (beta-galactosidase)
  misc_feature (1)..(714): Homolog of NCBI NO: 3860321 NR Description: beta-galactosidase [Cicer arietinum]
  misc_feature (1)..(714): Homolog of NCBI NO: 7682680 NR Description: beta galactosidase [Vigna radiata]
  misc_feature (1)..(713): Homolog of NCBI NO: 15081596 NR Description: putative beta-galactosidase BG1 [Vitis vinifera]
MLIGSSVIQCSSVTYDKKAIVINGHRRILLSGSIHYPRSTPEMWEDLIKKAKDGGLDVIDTYVFWNGHEPSPGTYNFEGRYDLVRFIKTIQEVGLYVHLRIGPYVCAEWNFGGFPVWLKYVDGISFRTDNGPFKSAMQGFTEKIVQMMKEHRFFASQGGPIILSQIENEFEPDLKGLGPAGHSYVNWAAKMAVGLNTGVPWVMCKEDDAPDPIINTCNGFYCDYFTPNKPYKPTMWTEAWSGWFTEFGGTVPKRPVEDLAFGVARFIQKGGSYINYYMYHGGTNFGRTAGGPFITTSYDYDAPIDEYGLVQEPKYSHLKQLHQAIKQCEAALVSSDPHVTKLGNYEEAHVFTAGKGSCVAFLTNYHMNAPAKVVFNNRHYTLPAWSISILPDCRNVVFNTATVAAKTSHVQMVPSGSILYSVARYDEDIATYGNRGTITARGLLEQVNVTRDTTDYLWYTTSVDIKASESFLRGGKWPTLTVDSAGHAVHVFVNGHFYGSAFGTRENRKFSFSSQVNLRGGANKIALLSVAVGLPNVGPHFETWATGIVGSVVLHGLDEGNKDLSWQKWTYQAGLRGESMNLVSPTEDSSVDWIKGSLAKQNKQPLTWYKAYFDAPRGNEPLALDLKSMGKGQAWINGQSIGRYWMAFAKGDCGSCNYAGTYRQNKCQSGCGEPTQRWYHVPRSWLKPKGNLLVLFEELGGDISKVSVVKRSVN

SEQ ID NO: 36546 - protein, 672 aa, Arabidopsis thaliana
  peptide (1)..(672): Ceres Seq. ID no. 12377495
  misc_feature (1)..(672): Homolog of NCBI NO: 14970839 NR Description: beta-galactosidase [Fragaria x ananassa]
  misc_feature (1)..(671): Homolog of NCBI NO: 4138137 NR Description: ss-galactosidase [Lycopersicon esculentum]
  misc_feature (1)..(672): Homolog of NCBI NO: 7488063 NR Description: probable beta-galactosidase (EC 3.2.1.23)
  misc_feature (1)..(671): Homolog of NCBI NO: 7939625 NR Description: putative beta-galactosidase [Lycopersicon
  misc_feature (1)..(672): Homolog of NCBI NO: 20514290 NR Description: beta-galactosidase [Oryza sativa (japonica
  misc_feature (1)..(672): Homolog of NCBI NO: 25326166 NR Description: beta-galactosidase like protein [imported] -
  misc_feature (1)..(672): Homolog of NCBI NO: 18419821 NR Description: glycosyl hydrolase family 35 (beta-galactosidase)
  misc_feature (1)..(672): Homolog of NCBI NO: 3860321 NR Description: beta-galactosidase [Cicer arietinum]
  misc_feature (1)..(672): Homolog of NCBI NO: 7682680 NR Description: beta galactosidase [Vigna radiata]
  misc_feature (1)..(671): Homolog of NCBI NO: 15081596 NR Description: putative beta-galactosidase BG1 [Vitis vinifera]
  misc_feature (1)..(672): Homolog of NCBI NO: 14970839 NR Description: beta-galactosidase [Fragaria x ananassa]
  misc_feature (1)..(671): Homolog of NCBI NO: 4138137 NR Description: ss-galactosidase [Lycopersicon esculentum]
  misc_feature (1)..(672): Homolog of NCBI NO: 7488063 NR Description: probable beta-galactosidase (EC 3.2.1.23)
  misc_feature (1)..(671): Homolog of NCBI NO: 7939625 NR Description: putative beta-galactosidase [Lycopersicon
  misc_feature (1)..(672): Homolog of NCBI NO: 20514290 NR Description: beta-galactosidase [Oryza sativa (japonica
  misc_feature (1)..(672): Homolog of NCBI NO: 25326166 NR Description: beta-galactosidase like protein [imported] -
  misc_feature (1)..(672): Homolog of NCBI NO: 18419821 NR Description: glycosyl hydrolase family 35 (beta-galactosidase)
  misc_feature (1)..(672): Homolog of NCBI NO: 3860321 NR Description: beta-galactosidase [Cicer arietinum]
  misc_feature (1)..(672): Homolog of NCBI NO: 7682680 NR Description: beta galactosidase [Vigna radiata]
  misc_feature (1)..(671): Homolog of NCBI NO: 15081596 NR Description: putative beta-galactosidase BG1 [Vitis vinifera]
MWEDLIKKAKDGGLDVIDTYVFWNGHEPSPGTYNFEGRYDLVRFIKTIQEVGLYVHLRIGPYVCAEWNFGGFPVWLKYVDGISFRTDNGPFKSAMQGFTEKIVQMMKEHRFFASQGGPIILSQIENEFEPDLKGLGPAGHSYVNWAAKMAVGLNTGVPWVMCKEDDAPDPIINTCNGFYCDYFTPNKPYKPTMWTEAWSGWFTEFGGTVPKRPVEDLAFGVARFIQKGGSYINYYMYHGGTNFGRTAGGPFITTSYDYDAPIDEYGLVQEPKYSHLKQLHQAIKQCEAALVSSDPHVTKLGNYEEAHVFTAGKGSCVAFLTNYHMNAPAKVVFNNRHYTLPAWSISILPDCRNVVFNTATVAAKTSHVQMVPSGSILYSVARYDEDIATYGNRGTITARGLLEQVNVTRDTTDYLWYTTSVDIKASESFLRGGKWPTLTVDSAGHAVHVFVNGHFYGSAFGTRENRKFSFSSQVNLRGGANKIALLSVAVGLPNVGPHFETWATGIVGSVVLHGLDEGNKDLSWQKWTYQAGLRGESMNLVSPTEDSSVDWIKGSLAKQNKQPLTWYKAYFDAPRGNEPLALDLKSMGKGQAWINGQSIGRYWMAFAKGDCGSCNYAGTYRQNKCQSGCGEPTQRWYHVPRSWLKPKGNLLVLFEELGGDISKVSVVKRSVN

SEQ ID NO: 36547 - DNA, 1100 bp, Arabidopsis thaliana; identical to SEQ ID NO: 35717
  misc_feature (1)..(1100): Ceres Seq. ID no. 12394844
  misc_feature: MA Experiment ID: 108434 Result: Down-regulated in Transcription
  misc_feature: MA Experiment 108434 PARAMETER Experiment Name: At_Root_Tips_cDNA_P Parameter: Tissue Value: Root Tips
  misc_feature: MA Experiment ID: 108572 Result: Up-regulated in Transcription
  misc_feature: MA Experiment 108572 PARAMETER Experiment Name: At_Drought_cDNA_P Parameter: Timepoint (hr) Value: 1
  misc_feature: MA Experiment 108572 PARAMETER Experiment Name: At_Drought_cDNA_P Parameter: Tissue Value: Aerial
  misc_feature: MA Experiment 108572 PARAMETER Experiment Name: At_Drought_cDNA_P Parameter: Treatment Value: Drought vs. No Drought
  misc_feature: MA Experiment ID: 108574 Result: Up-regulated in Transcription
  misc_feature: MA Experiment 108574 PARAMETER Experiment Name: At_Wounding__cDNA_P Parameter: Timepoint (hr) Value: 1
  misc_feature: MA Experiment 108574 PARAMETER Experiment Name: At_Wounding__cDNA_P Parameter: Tissue Value: Aerial
  misc_feature: MA Experiment 108574 PARAMETER Experiment Name: At_Wounding__cDNA_P Parameter: Treatment Value: Wounding vs. No Wounding
  misc_feature: MA Experiment ID: 108577 Result: Down-regulated in Transcription
  misc_feature: MA Experiment 108577 PARAMETER Experiment Name: At_42deg_Heat_cDNA_P Parameter: Temperature (deg C) Value: 42 vs. 22
  misc_feature: MA Experiment 108577 PARAMETER Experiment Name: At_42deg_Heat_cDNA_P Parameter: Timepoint (hr) Value: 6
  misc_feature: MA Experiment 108577 PARAMETER Experiment Name: At_42deg_Heat_cDNA_P Parameter: Tissue Value: Aerial
  misc_feature: MA Experiment ID: 108579 Result: Up-regulated in Transcription
  misc_feature: MA Experiment 108579 PARAMETER Experiment Name: At_4deg_Cold_cDNA_P Parameter: Temperature (deg C) Value: 4 vs. 22
  misc_feature: MA Experiment 108579 PARAMETER Experiment Name: At_4deg_Cold_cDNA_P Parameter: Timepoint (hr) Value: 6
  misc_feature: MA Experiment 108579 PARAMETER Experiment Name: At_4deg_Cold_cDNA_P Parameter: Tissue Value: Aerial
  misc_feature: MA Experiment ID: 108605 Result: Up-regulated in Transcription
  misc_feature: MA Experiment 108605 PARAMETER Experiment Name: At_100uM_ABA_cDNA_P Parameter: Timepoint (hr) Value: 6
  misc_feature: MA Experiment 108605 PARAMETER Experiment Name: At_100uM_ABA_cDNA_P Parameter: Tissue Value: Aerial
  misc_feature: MA Experiment 108605 PARAMETER Experiment Name: At_100uM_ABA_cDNA_P Parameter: Treatment Value: 100uM ABA vs. No Treatment
  misc_feature: MA Experiment ID: 108607 Result: Up-regulated in Transcription
  misc_feature: MA Experiment 108607 PARAMETER Experiment Name: At_100uM_ABA_cDNA_P Parameter: Timepoint (hr) Value: 4
  misc_feature: MA Experiment 108607 PARAMETER Experiment Name: At_100uM_ABA_cDNA_P Parameter: Tissue Value: Aerial
  misc_feature: MA Experiment 108607 PARAMETER Experiment Name: At_100uM_ABA_cDNA_P Parameter: Treatment Value: 100uM ABA vs. No Treatment
  misc_feature: MA Experiment ID: 20000069 Result: Up-regulated in Transcription
  misc_feature: MA Experiment 20000069 PARAMETER Experiment Name: At_100uM_ABA_Mutants_cDNA_P Parameter: Plant Line Value: CS23
  misc_feature: MA Experiment 20000069 PARAMETER Experiment Name: At_100uM_ABA_Mutants_cDNA_P Parameter: Timepoint (hr) Value: 6
  misc_feature: MA Experiment 20000069 PARAMETER Experiment Name: At_100uM_ABA_Mutants_cDNA_P Parameter: Tissue Value: Aerial
  misc_feature: MA Experiment 20000069 PARAMETER Experiment Name: At_100uM_ABA_Mutants_cDNA_P Parameter: Treatment Value: 100uM ABA vs. No Treatment
  misc_feature: MA Experiment ID: 20000072 Result: Up-regulated in Transcription
  misc_feature: MA Experiment 20000072 PARAMETER Experiment Name: At_100uM_ABA_Mutants_cDNA_P Parameter: Plant Line Value: CS8105
  misc_feature: MA Experiment 20000072 PARAMETER Experiment Name: At_100uM_ABA_Mutants_cDNA_P Parameter: Timepoint (hr) Value: 6
  misc_feature: MA Experiment 20000072 PARAMETER Experiment Name: At_100uM_ABA_Mutants_cDNA_P Parameter: Tissue Value: Aerial
  misc_feature: MA Experiment 20000072 PARAMETER Experiment Name: At_100uM_ABA_Mutants_cDNA_P Parameter: Treatment Value: 100uM ABA vs. No Treatment
  misc_feature: MA Experiment ID: 20000086 Result: Up-regulated in Transcription
  misc_feature: MA Experiment 20000086 PARAMETER Experiment Name: At_100uM_ABA_Mutants_cDNA_P Parameter: Plant Line Value: CS22
  misc_feature: MA Experiment 20000086 PARAMETER Experiment Name: At_100uM_ABA_Mutants_cDNA_P Parameter: Timepoint (hr) Value: 6
  misc_feature: MA Experiment 20000086 PARAMETER Experiment Name: At_100uM_ABA_Mutants_cDNA_P Parameter: Tissue Value: Aerial
  misc_feature: MA Experiment 20000086 PARAMETER Experiment Name: At_100uM_ABA_Mutants_cDNA_P Parameter: Treatment Value: 100uM ABA vs. No Treatment
  misc_feature: MA Experiment ID: 20000087 Result: Up-regulated in Transcription
  misc_feature: MA Experiment 20000087 PARAMETER Experiment Name: At_100uM_ABA_Mutants_cDNA_P Parameter: Plant Line Value: WS
  misc_feature: MA Experiment 20000087 PARAMETER Experiment Name: At_100uM_ABA_Mutants_cDNA_P Parameter: Timepoint (hr) Value: 6
  misc_feature: MA Experiment 20000087 PARAMETER Experiment Name: At_100uM_ABA_Mutants_cDNA_P Parameter: Tissue Value: Aerial
  misc_feature: MA Experiment 20000087 PARAMETER Experiment Name: At_100uM_ABA_Mutants_cDNA_P Parameter: Treatment Value: 100uM ABA vs. No Treatment
  misc_feature: MA Experiment ID: 20000090 Result: Up-regulated in Transcription
  misc_feature: MA Experiment ID: 20000093 Result: Down-regulated in Transcription
  misc_feature: MA Experiment 20000093 PARAMETER Experiment Name: At_42deg_Heat_cDNA_P Parameter: Temperature (deg C) Value: 42 vs. 22
  misc_feature: MA Experiment 20000093 PARAMETER Experiment Name: At_42deg_Heat_cDNA_P Parameter: Timepoint (hr) Value: 0.5
  misc_feature: MA Experiment 20000093 PARAMETER Experiment Name: At_42deg_Heat_cDNA_P Parameter: Tissue Value: Aerial
  misc_feature: MA Experiment ID: 20000113 Result: Down-regulated in Transcription
  misc_feature: MA Experiment 20000113 PARAMETER Experiment Name: At_42deg_Heat_cDNA_P Parameter: Temperature (deg C) Value: 42 vs. 22
  misc_feature: MA Experiment 20000113 PARAMETER Experiment Name: At_42deg_Heat_cDNA_P Parameter: Timepoint (hr) Value: 8
  misc_feature: MA Experiment 20000113 PARAMETER Experiment Name: At_42deg_Heat_cDNA_P Parameter: Tissue Value: Aerial
  misc_feature: MA Experiment ID: 20000144 Result: Down-regulated in Transcription
  misc_feature: MA Experiment 20000144 PARAMETER Experiment Name: At_42deg_Heat_cDNA_P Parameter: Temperature (deg C) Value: 42 vs. 22
  misc_feature: MA Experiment 20000144 PARAMETER Experiment Name: At_42deg_Heat_cDNA_P Parameter: Timepoint (hr) Value: 1
  misc_feature: MA Experiment 20000144 PARAMETER Experiment Name: At_42deg_Heat_cDNA_P Parameter: Tissue Value: Aerial
  misc_feature: MA Experiment ID: 20000171 Result: Down-regulated in Transcription
  misc_feature: MA Experiment 20000171 PARAMETER Experiment Name: At_42deg_Heat_P Parameter: Age (day) Value: 14
  misc_feature: MA Experiment 20000171 PARAMETER Experiment Name: At_42deg_Heat_P Parameter: Organism Value: A. thaliana
  misc_feature: MA Experiment 20000171 PARAMETER Experiment Name: At_42deg_Heat_P Parameter: Plant Line Value: WS
  misc_feature: MA Experiment 20000171 PARAMETER Experiment Name: At_42deg_Heat_P Parameter: Temperature (deg C) Value: 42 vs. 22
  misc_feature: MA Experiment 20000171 PARAMETER Experiment Name: At_42deg_Heat_P Parameter: Timepoint (hr) Value: 1
  misc_feature: MA Experiment 20000171 PARAMETER Experiment Name: At_42deg_Heat_P Parameter: Tissue Value: Aerial
  misc_feature: MA Experiment ID: 20000173 Result: Down-regulated in Transcription
  misc_feature: MA Experiment 20000173 PARAMETER Experiment Name: At_42deg_Heat_P Parameter: Age (day) Value: 14
  misc_feature: MA Experiment 20000173 PARAMETER Experiment Name: At_42deg_Heat_P Parameter: Organism Value: A. thaliana
  misc_feature: MA Experiment 20000173 PARAMETER Experiment Name: At_42deg_Heat_P Parameter: Plant Line Value: WS
  misc_feature: MA Experiment 20000173 PARAMETER Experiment Name: At_42deg_Heat_P Parameter: Temperature (deg C) Value: 42 vs. 22
  misc_feature: MA Experiment 20000173 PARAMETER Experiment Name: At_42deg_Heat_P Parameter: Timepoint (hr) Value: 6
  misc_feature: MA Experiment 20000173 PARAMETER Experiment Name: At_42deg_Heat_P Parameter: Tissue Value: Aerial
  misc_feature: MA Experiment ID: 20000185 Result: Down-regulated in Transcription
  misc_feature: MA Experiment 20000185 PARAMETER Experiment Name: At_Roots__P Parameter: Age (day) Value: 7 vs. 21
  misc_feature: MA Experiment 20000185 PARAMETER Experiment Name: At_Roots__P Parameter: Organism Value: A. thaliana
  misc_feature: MA Experiment 20000185 PARAMETER Experiment Name: At_Roots__P Parameter: Tissue Value: Roots vs. Whole Plant
  misc_feature: MA Experiment ID: 20000234 Result: Up-regulated in Transcription
  misc_feature: MA Experiment 20000234 PARAMETER Experiment Name: At_Siliques_P Parameter: Age (day) Value: 21
  misc_feature: MA Experiment 20000234 PARAMETER Experiment Name: At_Siliques_P Parameter: Organism Value: A. thaliana
  misc_feature: MA Experiment 20000234 PARAMETER Experiment Name: At_Siliques_P Parameter: Plant Line Value: WS
  misc_feature: MA Experiment 20000234 PARAMETER Experiment Name: At_Siliques_P Parameter: Tissue Value: Less Than 5mm Siliques vs. Whole Plant
  misc_feature: MA Experiment ID: 20000264 Result: Up-regulated in Transcription
  misc_feature: MA Experiment 20000264 PARAMETER Experiment Name: At_Open_Flower_P Parameter: Age (day) Value: 21
  misc_feature: MA Experiment 20000264 PARAMETER Experiment Name: At_Open_Flower_P Parameter: Plant Line Value: WS
  misc_feature: MA Experiment 20000264 PARAMETER Experiment Name: At_Open_Flower_P Parameter: Tissue Value: Open Flower vs. Whole Plant
  misc_feature: MA Experiment ID: 20000265 Result: Up-regulated in Transcription
  misc_feature: MA Experiment 20000265 PARAMETER Experiment Name: At_Open_Flower_P Parameter: Age (day) Value: 21
  misc_feature: MA Experiment 20000265 PARAMETER Experiment Name: At_Open_Flower_P Parameter: Plant Line Value: WS
  misc_feature: MA Experiment 20000265 PARAMETER Experiment Name: At_Open_Flower_P Parameter: Tissue Value: Closed Flower vs. Whole Plant
  misc_feature: MA Experiment ID: 20000286 Result: Up-regulated in Transcription
  misc_feature: MA Experiment 20000286 PARAMETER Experiment Name: At_Open_Flower_P Parameter: Age (day) Value: 21
  misc_feature: MA Experiment 20000286 PARAMETER Experiment Name: At_Open_Flower_P Parameter: Plant Line Value: WS
  misc_feature: MA Experiment 20000286 PARAMETER Experiment Name: At_Open_Flower_P Parameter: Tissue Value: Half Open vs. Whole Plant
  misc_feature: MA Experiment ID: 20000439 Result: Down-regulated in Transcription
  misc_feature: MA Experiment 20000439 PARAMETER Experiment Name: At_Roots__P Parameter: Age (day) Value: 14 vs. 21
  misc_feature: MA Experiment 20000439 PARAMETER Experiment Name: At_Roots__P Parameter: Organism Value: A. thaliana
  misc_feature: MA Experiment 20000439 PARAMETER Experiment Name: At_Roots__P Parameter: Tissue Value: Roots vs. Whole Plant
  misc_feature: MA Experiment ID: 20000441 Result: Down-regulated in Transcription
  misc_feature: MA Experiment 20000441 PARAMETER Experiment Name: At_1uM_BR-BRZ__P Parameter: Tissue Value: Shoot Apices
  misc_feature: MA Experiment 20000441 PARAMETER Experiment Name: At_1uM_BR-BRZ__P Parameter: Treatment Value: 1uM BR vs. No Treatment
  misc_feature: MA Experiment ID: 20000443 Result: Down-regulated in Transcription
  misc_feature: MA Experiment 20000443 PARAMETER Experiment Name: At_1uM_BR-BRZ__P Parameter: Tissue Value: Shoot Apices
  misc_feature: MA Experiment 20000443 PARAMETER Experiment Name: At_1uM_BR-BRZ__P Parameter: Treatment Value: 1uM BRZ vs. No Treatment
  misc_feature: MA Experiment ID: 20001905 Result: Down-regulated in Transcription
  misc_feature: MA Experiment 20001905 PARAMETER Experiment Name: At_Drought_Reproduction_P Parameter: Age (day) Value: 40
  misc_feature: MA Experiment 20001905 PARAMETER Experiment Name: At_Drought_Reproduction_P Parameter: Organism Value: A. thaliana
  misc_feature: MA Experiment 20001905 PARAMETER Experiment Name: At_Drought_Reproduction_P Parameter: Plant Line Value: WS
  misc_feature: MA Experiment 20001905 PARAMETER Experiment Name: At_Drought_Reproduction_P Parameter: Timepoint (day) Value: 10
  misc_feature: MA Experiment 20001905 PARAMETER Experiment Name: At_Drought_Reproduction_P Parameter: Tissue Value: Rosettes
  misc_feature: MA Experiment 20001905 PARAMETER Experiment Name: At_Drought_Reproduction_P Parameter: Treatment Value: Drought vs. No Drought
  misc_feature: MA Experiment ID: 20001911 Result: Down-regulated in Transcription
  misc_feature: MA Experiment 20001911 PARAMETER Experiment Name: At_Drought_Reproduction_P Parameter: Age (day) Value: 40
  misc_feature: MA Experiment 20001911 PARAMETER Experiment Name: At_Drought_Reproduction_P Parameter: Organism Value: A. thaliana
  misc_feature: MA Experiment 20001911 PARAMETER Experiment Name: At_Drought_Reproduction_P Parameter: Plant Line Value: WS
  misc_feature: MA Experiment 20001911 PARAMETER Experiment Name: At_Drought_Reproduction_P Parameter: Timepoint (day) Value: 10
  misc_feature: MA Experiment 20001911 PARAMETER Experiment Name: At_Drought_Reproduction_P Parameter: Tissue Value: Flowers
  misc_feature: MA Experiment 20001911 PARAMETER Experiment Name: At_Drought_Reproduction_P Parameter: Treatment Value: Drought vs. No Drought

SEQ ID NO: 36548 - protein, 341 aa, Arabidopsis thaliana; identical to SEQ ID NO: 35718
  peptide (1)..(341): Ceres Seq. ID no. 12394845
  misc_feature (106)..(326): Pfam Name: alpha/beta hydrolase fold Pfam Description: alpha/beta hydrolase fold
  misc_feature (106)..(326): Pfam Name: alpha/beta hydrolase fold Pfam Description: alpha/beta hydrolase fold
  misc_feature (48)..(243): Homolog of NCBI NO: 27436747 NR Description: Hypothetical protein [Oryza sativa (japonica
  misc_feature (47)..(328): Homolog of NCBI NO: 18398716 NR Description: expressed protein
  misc_feature (33)..(332): Homolog of NCBI NO: 22326938 NR Description: similar to putative hydrolase; protein id:
  misc_feature (37)..(332): Homolog of NCBI NO: 37533664 NR Description: putative hydrolase [Oryza sativa (japonica
  misc_feature (33)..(330): Homolog of NCBI NO: 33146617 NR Description: hydrolase-like protein [Oryza sativa (japonica
  misc_feature (48)..(243): Homolog of NCBI NO: 27436747 NR Description: Hypothetical protein [Oryza sativa (japonica
  misc_feature (33)..(332): Homolog of NCBI NO: 22326938 NR Description: similar to putative hydrolase; protein id:
  misc_feature (33)..(330): Homolog of NCBI NO: 33146617 NR Description: hydrolase-like protein [Oryza sativa (japonica
  misc_feature (28)..(341): Homolog of NCBI NO: 18411865 NR Description: hypothetical protein
  misc_feature (28)..(240): Homolog of NCBI NO: 25406548 NR Description: hypothetical protein T11I11.15 [imported] -
  misc_feature (31)..(331): Homolog of NCBI NO: 15242419 NR Description: putative hydrolase; protein id: At5g09430.1
  misc_feature (28)..(328): Homolog of NCBI NO: 18420566 NR Description: Expressed protein
  misc_feature (28)..(328): Homolog of NCBI NO: 21536873 NR Description: putative hydrolase [Arabidopsis thaliana]
  misc_feature (37)..(332): Homolog of NCBI NO: 37533664 NR Description: putative hydrolase [Oryza sativa (japonica
  misc_feature (47)..(328): Homolog of NCBI NO: 18398716 NR Description: expressed protein
  misc_feature (28)..(328): Homolog of NCBI NO: 21536873 NR Description: putative hydrolase [Arabidopsis thaliana]
  misc_feature (28)..(328): Homolog of NCBI NO: 18420566 NR Description: Expressed protein
  misc_feature (31)..(331): Homolog of NCBI NO: 15242419 NR Description: putative hydrolase; protein id: At5g09430.1
  misc_feature (28)..(240): Homolog of NCBI NO: 25406548 NR Description: hypothetical protein T11I11.15 [imported] -
  misc_feature (28)..(341): Homolog of NCBI NO: 18411865 NR Description: hypothetical protein

SEQ ID NO: 36549 - protein, 314 aa, Arabidopsis thaliana; identical to SEQ ID NO: 35719
  peptide (1)..(314): Ceres Seq. ID no. 12394846
  misc_feature (79)..(299): Pfam Name: alpha/beta hydrolase fold Pfam Description: alpha/beta hydrolase fold
  misc_feature (79)..(299): Pfam Name: alpha/beta hydrolase fold Pfam Description: alpha/beta hydrolase fold
  misc_feature (21)..(216): Homolog of NCBI NO: 27436747 NR Description: Hypothetical protein [Oryza sativa (japonica
  misc_feature (20)..(301): Homolog of NCBI NO: 18398716 NR Description: expressed protein
  misc_feature (6)..(305): Homolog of NCBI NO: 22326938 NR Description: similar to putative hydrolase; protein id:
  misc_feature (10)..(305): Homolog of NCBI NO: 37533664 NR Description: putative hydrolase [Oryza sativa (japonica
  misc_feature (6)..(303): Homolog of NCBI NO: 33146617 NR Description: hydrolase-like protein [Oryza sativa (japonica
  misc_feature (21)..(216): Homolog of NCBI NO: 27436747 NR Description: Hypothetical protein [Oryza sativa (japonica
  misc_feature (6)..(305): Homolog of NCBI NO: 22326938 NR Description: similar to putative hydrolase; protein id:
  misc_feature (6)..(303): Homolog of NCBI NO: 33146617 NR Description: hydrolase-like protein [Oryza sativa (japonica
  misc_feature (1)..(314): Homolog of NCBI NO: 18411865 NR Description: hypothetical protein
  misc_feature (1)..(213): Homolog of NCBI NO: 25406548 NR Description: hypothetical protein T11I11.15 [imported] -
  misc_feature (4)..(304): Homolog of NCBI NO: 15242419 NR Description: putative hydrolase; protein id: At5g09430.1
  misc_feature (1)..(301): Homolog of NCBI NO: 18420566 NR Description: Expressed protein
  misc_feature (1)..(301): Homolog of NCBI NO: 21536873 NR Description: putative hydrolase [Arabidopsis thaliana]
  misc_feature (10)..(305): Homolog of NCBI NO: 37533664 NR Description: putative hydrolase [Oryza sativa (japonica
  misc_feature (20)..(301): Homolog of NCBI NO: 18398716 NR Description: expressed protein
  misc_feature (1)..(301): Homolog of NCBI NO: 21536873 NR Description: putative hydrolase [Arabidopsis thaliana]
  misc_feature (1)..(301): Homolog of NCBI NO: 18420566 NR Description: Expressed protein
  misc_feature (4)..(304): Homolog of NCBI NO: 15242419 NR Description: putative hydrolase; protein id: At5g09430.1
  misc_feature (1)..(213): Homolog of NCBI NO: 25406548 NR Description: hypothetical protein T11I11.15 [imported] -
  misc_feature (1)..(314): Homolog of NCBI NO: 18411865 NR Description: hypothetical protein

SEQ ID NO: 36550 - protein, 206 aa, Arabidopsis thaliana; identical to SEQ ID NO: 35720
  peptide (1)..(206): Ceres Seq. ID no. 12394847
  misc_feature (1)..(191): Pfam Name: alpha/beta hydrolase fold Pfam Description: alpha/beta hydrolase fold
  misc_feature (1)..(191): Pfam Name: alpha/beta hydrolase fold Pfam Description: alpha/beta hydrolase fold
  misc_feature (1)..(108): Homolog of NCBI NO: 27436747 NR Description: Hypothetical protein [Oryza sativa (japonica
  misc_feature (1)..(193): Homolog of NCBI NO: 18398716 NR Description: expressed protein
  misc_feature (1)..(197): Homolog of NCBI NO: 22326938 NR Description: similar to putative hydrolase; protein id:
  misc_feature (1)..(197): Homolog of NCBI NO: 37533664 NR Description: putative hydrolase [Oryza sativa (japonica
  misc_feature (1)..(195): Homolog of NCBI NO: 33146617 NR Description: hydrolase-like protein [Oryza sativa (japonica
  misc_feature (1)..(108): Homolog of NCBI NO: 27436747 NR Description: Hypothetical protein [Oryza sativa (japonica
  misc_feature (1)..(197): Homolog of NCBI NO: 22326938 NR Description: similar to putative hydrolase; protein id:
  misc_feature (1)..(195): Homolog of NCBI NO: 33146617 NR Description: hydrolase-like protein [Oryza sativa (japonica
  misc_feature (1)..(206): Homolog of NCBI NO: 18411865 NR Description: hypothetical protein
  misc_feature (1)..(105): Homolog of NCBI NO: 25406548 NR Description: hypothetical protein T11I11.15 [imported] -
  misc_feature (1)..(196): Homolog of NCBI NO: 15242419 NR Description: putative hydrolase; protein id: At5g09430.1
  misc_feature (1)..(193): Homolog of NCBI NO: 18420566 NR Description: Expressed protein
  misc_feature (1)..(193): Homolog of NCBI NO: 21536873 NR Description: putative hydrolase [Arabidopsis thaliana]
  misc_feature (1)..(197): Homolog of NCBI NO: 37533664 NR Description: putative hydrolase [Oryza sativa (japonica
  misc_feature (1)..(193): Homolog of NCBI NO: 18398716 NR Description: expressed protein
  misc_feature (1)..(193): Homolog of NCBI NO: 21536873 NR Description: putative hydrolase [Arabidopsis thaliana]
  misc_feature (1)..(193): Homolog of NCBI NO: 18420566 NR Description: Expressed protein
  misc_feature (1)..(196): Homolog of NCBI NO: 15242419 NR Description: putative hydrolase; protein id: At5g09430.1
  misc_feature (1)..(105): Homolog of NCBI NO: 25406548 NR Description: hypothetical protein T11I11.15 [imported] -
  misc_feature (1)..(206): Homolog of NCBI NO: 18411865 NR Description: hypothetical protein

SEQ ID NO: 36551 - DNA, 981 bp, Arabidopsis thaliana
  misc_feature (1)..(981): Ceres Seq. ID no. 12420512
  misc_feature: MA Experiment ID: 108434 Result: Down-regulated in Transcription
  misc_feature: MA Experiment 108434 PARAMETER Experiment Name: At_Root_Tips_cDNA_P Parameter: Tissue Value: Root Tips
  misc_feature: MA Experiment ID: 108574 Result: Up-regulated in Transcription
  misc_feature: MA Experiment 108574 PARAMETER Experiment Name: At_Wounding__cDNA_P Parameter: Timepoint (hr) Value: 1
  misc_feature: MA Experiment 108574 PARAMETER Experiment Name: At_Wounding__cDNA_P Parameter: Tissue Value: Aerial
  misc_feature: MA Experiment 108574 PARAMETER Experiment Name: At_Wounding__cDNA_P Parameter: Treatment Value: Wounding vs. No Wounding
  misc_feature: MA Experiment ID: 108576 Result: Up-regulated in Transcription
  misc_feature: MA Experiment 108576 PARAMETER Experiment Name: At_42deg_Heat_cDNA_P Parameter: Temperature (deg C) Value: 42 vs. 22
  misc_feature: MA Experiment 108576 PARAMETER Experiment Name: At_42deg_Heat_cDNA_P Parameter: Timepoint (hr) Value: 1
  misc_feature: MA Experiment 108576 PARAMETER Experiment Name: At_42deg_Heat_cDNA_P Parameter: Tissue Value: Aerial
  misc_feature: MA Experiment ID: 108595 Result: Up-regulated in Transcription
  misc_feature: MA Experiment 108595 PARAMETER Experiment Name: At_Ler-pi_Ovule_cDNA_P Parameter: Plant Line Value: null
  misc_feature: MA Experiment ID: 20000111 Result: Up-regulated in Transcription
  misc_feature: MA Experiment 20000111 PARAMETER Experiment Name: At_42deg_Heat_cDNA_P Parameter: Temperature (deg C) Value: 42 vs. 22
  misc_feature: MA Experiment 20000111 PARAMETER Experiment Name: At_42deg_Heat_cDNA_P Parameter: Timepoint (hr) Value: 6
  misc_feature: MA Experiment 20000111 PARAMETER Experiment Name: At_42deg_Heat_cDNA_P Parameter: Tissue Value: Aerial
  misc_feature: MA Experiment ID: 20000234 Result: Down-regulated in Transcription
  misc_feature: MA Experiment 20000234 PARAMETER Experiment Name: At_Siliques_P Parameter: Age (day) Value: 21
  misc_feature: MA Experiment 20000234 PARAMETER Experiment Name: At_Siliques_P Parameter: Organism Value: A. thaliana
  misc_feature: MA Experiment 20000234 PARAMETER Experiment Name: At_Siliques_P Parameter: Plant Line Value: WS
  misc_feature: MA Experiment 20000234 PARAMETER Experiment Name: At_Siliques_P Parameter: Tissue Value: Less Than 5mm Siliques vs. Whole Plant
  misc_feature: MA Experiment ID: 20000235 Result: Down-regulated in Transcription
  misc_feature: MA Experiment 20000235 PARAMETER Experiment Name: At_Siliques_P Parameter: Age (day) Value: 21
  misc_feature: MA Experiment 20000235 PARAMETER Experiment Name: At_Siliques_P Parameter: Organism Value: A. thaliana
  misc_feature: MA Experiment 20000235 PARAMETER Experiment Name: At_Siliques_P Parameter: Plant Line Value: WS
  misc_feature: MA Experiment 20000235 PARAMETER Experiment Name: At_Siliques_P Parameter: Tissue Value: 5-10mm Siliques vs. Whole Plant
  misc_feature: MA Experiment ID: 20000264 Result: Down-regulated in Transcription
  misc_feature: MA Experiment 20000264 PARAMETER Experiment Name: At_Open_Flower_P Parameter: Age (day) Value: 21
  misc_feature: MA Experiment 20000264 PARAMETER Experiment Name: At_Open_Flower_P Parameter: Plant Line Value: WS
  misc_feature: MA Experiment 20000264 PARAMETER Experiment Name: At_Open_Flower_P Parameter: Tissue Value: Open Flower vs. Whole Plant
  misc_feature: MA Experiment ID: 20000265 Result: Down-regulated in Transcription
  misc_feature: MA Experiment 20000265 PARAMETER Experiment Name: At_Open_Flower_P Parameter: Age (day) Value: 21
  misc_feature: MA Experiment 20000265 PARAMETER Experiment Name: At_Open_Flower_P Parameter: Plant Line Value: WS
  misc_feature: MA Experiment 20000265 PARAMETER Experiment Name: At_Open_Flower_P Parameter: Tissue Value: Closed Flower vs. Whole Plant
  misc_feature: MA Experiment ID: 20000438 Result: Down-regulated in Transcription
  misc_feature: MA Experiment 20000438 PARAMETER Experiment Name: At_Shoots__P Parameter: Age (day) Value: 14
  misc_feature: MA Experiment 20000438 PARAMETER Experiment Name: At_Shoots__P Parameter: Tissue Value: Shoots vs. Whole Plant
  misc_feature: MA Experiment ID: 20000495 Result: Down-regulated in Transcription
  misc_feature: MA Experiment 20000495 PARAMETER Experiment Name: At_Guard_Cells_P Parameter: Harvest Date Value: 8/2/2002
  misc_feature: MA Experiment 20000495 PARAMETER Experiment Name: At_Guard_Cells_P Parameter: Organism Value: A. thaliana
  misc_feature: MA Experiment 20000495 PARAMETER Experiment Name: At_Guard_Cells_P Parameter: Tissue Value: Guard Cells vs. Leaves
agaacacaaacaaaaacacattgtaacattagtttaagcattaagcttctttatgtcgaataataataattctccgaccaccgtgaatcaagaaacgacgacgtctcgtgaagtctcaatcacattgcctactgatcaatctcctcaaacctcaccaggatcatcttcttctccttcaccgagaccttccggtggatcaccggcgagaagaacggcgactggattatccggcaagcactctattttcagggggattcgactacgtaacggaaaatgggtatcggagattagagagccacgtaaaacgacaagaatttggctcgggacttatccggtaccggagatggctgccgccgcttacgacgtggctgcgttagctttaaaaggaccaggccgttttgaattttcctggtttagctttgacttacgtggctccggtttcaaactctgctgcggatataagagcggctgctagtagagcagcggagatgaagcaaccggatcagggtggggatgagaaggtattggaaccggttcaacccggcaaagaggaagaattagaagaagtgtcgtgtaactcgtgttcgttggagtttatggatgaggaagcgatgttgaatatgccgactttgttgacggagatggctgaagggatgttgatgagtccaccgagaatgatgatacatccgacgatggaagatgattcgccggagaatcatgaaggagataatctttggagttataaatgaatccattgaagctgctctcttttttattgttttccggtcgaatgagattttccccctttttttttctttttgggtcgctgttatggaaagtcaaataggttattaatatgatctattaatatttttgaaacataatgagtttgaatttgaatttttccatttttatataaatatggtttatatgagggaaaaatagatacatatcgaagatataagaattgtttttctgctt

SEQ ID NO: 36552 - protein, 140 aa, Arabidopsis thaliana
  peptide (1)..(140): Ceres Seq. ID no. 12420513
  misc_feature (62)..(113): Pfam Name: AP2 domain Pfam Description: AP2 domain
  misc_feature (37)..(112): Homolog of NCBI NO: 37147896 NR Description: CaCBF1B [Capsicum annuum]
  misc_feature (37)..(112): Homolog of NCBI NO: 40647095 NR Description: DREB-like protein 1 [Capsicum annuum]
  misc_feature (61)..(114): Homolog of NCBI NO: 37536218 NR Description: putative transcription factor
  misc_feature (27)..(112): Homolog of NCBI NO: 18416562 NR Description: C-repeat/DRE binding factor 1 (CBF1) (DREB1B)
  misc_feature (27)..(112): Homolog of NCBI NO: 1899058 NR Description: transcriptional activator CBF1 [Arabidopsis
  misc_feature (54)..(112): Homolog of NCBI NO: 15227980 NR Description: DRE binding protein; protein id: At2g36450.1
  misc_feature (39)..(112): Homolog of NCBI NO: 8493594 NR Description: Contains similarity to transcriptional activator from Arabidopsis thaliana gb|U77378 and contains an AP2 PF|00847
  misc_feature (39)..(112): Homolog of NCBI NO: 25404394 NR Description: hypothetical protein F16M19.1 [imported] -
  misc_feature (57)..(112): Homolog of NCBI NO: 15222031 NR Description: DRE binding protein; protein id: At1g12630.1
  misc_feature (1)..(113): Homolog of NCBI NO: 15242262 NR Description: DRE binding protein
MSNNNNSPTTVNQETTTSREVSITLPTDQSPQTSPGSSSSPSPRPSGGSPARRTATGLSGKHSIFRGIRLRNGKWVSEIREPRKTTRIWLGTYPVPEMAAAAYDVAALALKGPGRFEFSWFSFDLRGSGFKLCCGYKSGC

SEQ ID NO: 36553 - protein, 86 aa, Arabidopsis thaliana
  peptide (1)..(86): Ceres Seq. ID no. 12420514
  misc_feature (1)..(85): Homolog of NCBI NO: 37147896 NR Description: CaCBF1B [Capsicum annuum]
  misc_feature (1)..(85): Homolog of NCBI NO: 40647095 NR Description: DREB-like protein 1 [Capsicum annuum]
  misc_feature (1)..(65): Homolog of NCBI NO: 37536218 NR Description: putative transcription factor
  misc_feature (1)..(85): Homolog of NCBI NO: 18416562 NR Description: C-repeat/DRE binding factor 1 (CBF1) (DREB1B)
  misc_feature (1)..(85): Homolog of NCBI NO: 1899058 NR Description: transcriptional activator CBF1 [Arabidopsis
  misc_feature (1)..(85): Homolog of NCBI NO: 15227980 NR Description: DRE binding protein; protein id: At2g36450.1
  misc_feature (1)..(75): Homolog of NCBI NO: 8493594 NR Description: Contains similarity to transcriptional activator from Arabidopsis thaliana gb|U77378 and contains an AP2 PF|00847
  misc_feature (1)..(85): Homolog of NCBI NO: 25404394 NR Description: hypothetical protein F16M19.1 [imported] -
  misc_feature (1)..(85): Homolog of NCBI NO: 15222031 NR Description: DRE binding protein; protein id: At1g12630.1
  misc_feature (1)..(86): Homolog of NCBI NO: 15242262 NR Description: DRE binding protein
MKQPDQGGDEKVLEPVQPGKEEELEEVSCNSCSLEFMDEEAMLNMPTLLTEMAEGMLMSPPRMMIHPTMEDDSPENHEGDNLWSYK

SEQ ID NO: 36554 - DNA, 931 bp, Arabidopsis thaliana
  misc_feature (1)..(931): Ceres Seq. ID no. 12738907
  misc_feature: MA Experiment ID: 108569 Result: Up-regulated in Transcription
  misc_feature: MA Experiment 108569 PARAMETER Experiment Name: At_0.001%_MeJA__cDNA_P Parameter: Timepoint (hr) Value: 6
  misc_feature: MA Experiment 108569 PARAMETER Experiment Name: At_0.001%_MeJA__cDNA_P Parameter: Tissue Value: Aerial
  misc_feature: MA Experiment 108569 PARAMETER Experiment Name: At_0.001%_MeJA__cDNA_P Parameter: Treatment Value: 0.001% MeJA vs. No Treatment
  misc_feature: MA Experiment ID: 108573 Result: Up-regulated in Transcription
  misc_feature: MA Experiment 108573 PARAMETER Experiment Name: At_Drought_cDNA_P Parameter: Timepoint (hr) Value: 6
  misc_feature: MA Experiment 108573 PARAMETER Experiment Name: At_Drought_cDNA_P Parameter: Tissue Value: Aerial
  misc_feature: MA Experiment 108573 PARAMETER Experiment Name: At_Drought_cDNA_P Parameter: Treatment Value: Drought vs. No Drought
  misc_feature: MA Experiment ID: 108595 Result: Down-regulated in Transcription
  misc_feature: MA Experiment 108595 PARAMETER Experiment Name: At_Ler-pi_Ovule_cDNA_P Parameter: Plant Line Value: null
  misc_feature: MA Experiment ID: 20000111 Result: Down-regulated in Transcription
  misc_feature: MA Experiment 20000111 PARAMETER Experiment Name: At_42deg_Heat_cDNA_P Parameter: Temperature (deg C) Value: 42 vs. 22
  misc_feature: MA Experiment 20000111 PARAMETER Experiment Name: At_42deg_Heat_cDNA_P Parameter: Timepoint (hr) Value: 6
  misc_feature: MA Experiment 20000111 PARAMETER Experiment Name: At_42deg_Heat_cDNA_P Parameter: Tissue Value: Aerial
  misc_feature: MA Experiment ID: 20000113 Result: Down-regulated in Transcription
  misc_feature: MA Experiment 20000113 PARAMETER Experiment Name: At_42deg_Heat_cDNA_P Parameter: Temperature (deg C) Value: 42 vs. 22
  misc_feature: MA Experiment 20000113 PARAMETER Experiment Name: At_42deg_Heat_cDNA_P Parameter: Timepoint (hr) Value: 8
  misc_feature: MA Experiment 20000113 PARAMETER Experiment Name: At_42deg_Heat_cDNA_P Parameter: Tissue Value: Aerial
  misc_feature: MA Experiment ID: 20000224 Result: Down-regulated in Transcription
  misc_feature: MA Experiment ID: 20001911 Result: Down-regulated in Transcription
  misc_feature: MA Experiment 20001911 PARAMETER Experiment Name: At_Drought_Reproduction_P Parameter: Age (day) Value: 40
  misc_feature: MA Experiment 20001911 PARAMETER Experiment Name: At_Drought_Reproduction_P Parameter: Organism Value: A. thaliana
  misc_feature: MA Experiment 20001911 PARAMETER Experiment Name: At_Drought_Reproduction_P Parameter: Plant Line Value: WS
  misc_feature: MA Experiment 20001911 PARAMETER Experiment Name: At_Drought_Reproduction_P Parameter: Timepoint (day) Value: 10
  misc_feature: MA Experiment 20001911 PARAMETER Experiment Name: At_Drought_Reproduction_P Parameter: Tissue Value: Flowers
  misc_feature: MA Experiment 20001911 PARAMETER Experiment Name: At_Drought_Reproduction_P Parameter: Treatment Value: Drought vs. No Drought
aactgtttgatttctgaggagaatccattgtttccattcgaagaaaactctaactttctcgttgaagctttgagctctctacctctttatctccggagatgtataataacatgggacctcaaccggggatgccaagacctccaggaaaccctgagcctggtccatttggtaatcctttcactggagctggctcgggttttatccgtggtggtttgggagcgtatggggagagaattttaggatcgagctctgagtatgttcagagcaatataagccggtacttctctgatccgcaatactatttccaagtgaatgatcaatatgtgaggaataaactgaaggttgttctgtttcctttcctacaccggggacactggaccagaatatctgaaccagttggtggtaggctctcatacaagcctccaatatatgatatcaatgctccagacttgtacattccctttatggcatttggtacctacgttgttcttgctggtctttcattgggacttaatggaaagtttacaccggaagctttgaattggctgtttgtgaaaggattggttggttggtttttgcaagtaatgctcctgaaagtaacacttctatcacttggtagtggagaggcaccattactagatattgtggcatacggagggtatgcttttgctggtctgtgtcttgcgggctttgccaaaataatgtggggatactcgtactacgcgttgatgccatggacttgtctatgcactgggattttcttggtgaagacgatgaaacgtgttctgtttgctgaagtaagaagttacgattcgagcaaacatcactaccttcttctgtttttagccttggtccagttcccacttttgatatggcttggtaacattagtgttaattggcttctttgaaatgaaaaaagacgtttttgtgt

SEQ ID NO: 36555 - protein, 269 aa, Arabidopsis thaliana
  peptide (1)..(269): Ceres Seq. ID no. 12738908
  misc_feature (1)..(239): Homolog of NCBI NO: 37589677 NR Description: Unknown (protein for MGC:73136) [Danio rerio]
  misc_feature (1)..(239): Homolog of NCBI NO: 28277968 NR Description: Similar to Yip1p-interacting factor [Danio rerio]
  misc_feature (16)..(260): Homolog of NCBI NO: 12861030 NR Description: unnamed protein product [Mus musculus]
  misc_feature (142)..(263): Homolog of NCBI NO: 10241632 NR Description: putative protein [Oryza sativa (indica
  misc_feature (1)..(263): Homolog of NCBI NO: 38346458 NR Description: OSJNBa0019G23.6 [Oryza sativa (japonica
  misc_feature (11)..(268): Homolog of NCBI NO: 33589682 NR Description: At3g59500 [Arabidopsis thaliana]
  misc_feature (11)..(268): Homolog of NCBI NO: 11282553 NR Description: hypothetical protein T16L24.50 - Arabidopsis
  misc_feature (1)..(268): Homolog of NCBI NO: 30695009 NR Description: expressed protein [Arabidopsis thaliana]
  misc_feature (1)..(269): Homolog of NCBI NO: 9755388 NR Description: F17F8.24 [Arabidopsis thaliana]
  misc_feature (1)..(269): Homolog of NCBI NO: 18397705 NR Description: expressed protein
MYNNMGPQPGMPRPPGNPEPGPFGNPFTGAGSGFIRGGLGAYGERILGSSSEYVQSNISRYFSDPQYYFQVNDQYVRNKLKVVLFPFLHRGHWTRISEPVGGRLSYKPPIYDINAPDLYIPFMAFGTYVVLAGLSLGLNGKFTPEALNWLFVKGLVGWFLQVMLLKVTLLSLGSGEAPLLDIVAYGGYAFAGLCLAGFAKIMWGYSYYALMPWTCLCTGIFLVKTMKRVLFAEVRSYDSSKHHYLLLFLALVQFPLLIWLGNISVNWLL

SEQ ID NO: 36556 - protein, 265 aa, Arabidopsis thaliana
  peptide (1)..(265): Ceres Seq. ID no. 12738909
  misc_feature (1)..(235): Homolog of NCBI NO: 37589677 NR Description: Unknown (protein for MGC:73136) [Danio rerio]
  misc_feature (1)..(235): Homolog of NCBI NO: 28277968 NR Description: Similar to Yip1p-interacting factor [Danio rerio]
  misc_feature (12)..(256): Homolog of NCBI NO: 12861030 NR Description: unnamed protein product [Mus musculus]
  misc_feature (138)..(259): Homolog of NCBI NO: 10241632 NR Description: putative protein [Oryza sativa (indica
  misc_feature (1)..(259): Homolog of NCBI NO: 38346458 NR Description: OSJNBa0019G23.6 [Oryza sativa (japonica
  misc_feature (7)..(264): Homolog of NCBI NO: 33589682 NR Description: At3g59500 [Arabidopsis thaliana]
  misc_feature (7)..(264): Homolog of NCBI NO: 11282553 NR Description: hypothetical protein T16L24.50 - Arabidopsis
  misc_feature (1)..(264): Homolog of NCBI NO: 30695009 NR Description: expressed protein [Arabidopsis thaliana]
  misc_feature (1)..(265): Homolog of NCBI NO: 9755388 NR Description: F17F8.24 [Arabidopsis thaliana]
  misc_feature (1)..(265): Homolog of NCBI NO: 18397705 NR Description: expressed protein
MGPQPGMPRPPGNPEPGPFGNPFTGAGSGFIRGGLGAYGERILGSSSEYVQSNISRYFSDPQYYFQVNDQYVRNKLKVVLFPFLHRGHWTRISEPVGGRLSYKPPIYDINAPDLYIPFMAFGTYVVLAGLSLGLNGKFTPEALNWLFVKGLVGWFLQVMLLKVTLLSLGSGEAPLLDIVAYGGYAFAGLCLAGFAKIMWGYSYYALMPWTCLCTGIFLVKTMKRVLFAEVRSYDSSKHHYLLLFLALVQFPLLIWLGNISVNWLL

SEQ ID NO: 36557 - protein, 259 aa, Arabidopsis thaliana
  peptide (1)..(259): Ceres Seq. ID no. 12738910
  misc_feature (1)..(229): Homolog of NCBI NO: 37589677 NR Description: Unknown (protein for MGC:73136) [Danio rerio]
  misc_feature (1)..(229): Homolog of NCBI NO: 28277968 NR Description: Similar to Yip1p-interacting factor [Danio rerio]
  misc_feature (6)..(250): Homolog of NCBI NO: 12861030 NR Description: unnamed protein product [Mus musculus]
  misc_feature (132)..(253): Homolog of NCBI NO: 10241632 NR Description: putative protein [Oryza sativa (indica
  misc_feature (1)..(253): Homolog of NCBI NO: 38346458 NR Description: OSJNBa0019G23.6 [Oryza sativa (japonica
  misc_feature (1)..(258): Homolog of NCBI NO: 33589682 NR Description: At3g59500 [Arabidopsis thaliana]
  misc_feature (1)..(258): Homolog of NCBI NO: 11282553 NR Description: hypothetical protein T16L24.50 - Arabidopsis
  misc_feature (1)..(258): Homolog of NCBI NO: 30695009 NR Description: expressed protein [Arabidopsis thaliana]
  misc_feature (1)..(259): Homolog of NCBI NO: 9755388 NR Description: F17F8.24 [Arabidopsis thaliana]
  misc_feature (1)..(259): Homolog of NCBI NO: 18397705 NR Description: expressed protein
MPRPPGNPEPGPFGNPFTGAGSGFIRGGLGAYGERILGSSSEYVQSNISRYFSDPQYYFQVNDQYVRNKLKVVLFPFLHRGHWTRISEPVGGRLSYKPPIYDINAPDLYIPFMAFGTYVVLAGLSLGLNGKFTPEALNWLFVKGLVGWFLQVMLLKVTLLSLGSGEAPLLDIVAYGGYAFAGLCLAGFAKIMWGYSYYALMPWTCLCTGIFLVKTMKRVLFAEVRSYDSSKHHYLLLFLALVQFPLLIWLGNISVNWLL

SEQ ID NO: 36558 - DNA, 709 bp, Arabidopsis thaliana
  misc_feature (1)..(709): Ceres Seq. ID no. 12560056
  misc_feature: MA Experiment ID: 20000184 Result: Down-regulated in Transcription
  misc_feature: MA Experiment 20000184 PARAMETER Experiment Name: At_Shoots__P Parameter: Age (day) Value: 7
  misc_feature: MA Experiment 20000184 PARAMETER Experiment Name: At_Shoots__P Parameter: Tissue Value: Shoots vs. Whole Plant
  misc_feature: MA Experiment ID: 20001248 Result: Up-regulated in Transcription
  misc_feature: MA Experiment 20001248 PARAMETER Experiment Name: At_Far-red-induction_P Parameter: Age (day) Value: 7
  misc_feature: MA Experiment 20001248 PARAMETER Experiment Name: At_Far-red-induction_P Parameter: Light Value: Far-red vs. White
  misc_feature: MA Experiment 20001248 PARAMETER Experiment Name: At_Far-red-induction_P Parameter: Organism Value: A. thaliana
  misc_feature: MA Experiment 20001248 PARAMETER Experiment Name: At_Far-red-induction_P Parameter: Plant Line Value: Columbia
  misc_feature: MA Experiment 20001248 PARAMETER Experiment Name: At_Far-red-induction_P Parameter: Timepoint (hr) Value: 4
  misc_feature: MA Experiment 20001248 PARAMETER Experiment Name: At_Far-red-induction_P Parameter: Tissue Value: Whole Plant
tatcgaaaatctaatttcgtcctgcgtcgaccttgtgagctacttcagtttccggccatcacgcagctccagttgtatgttttgtgggttatacaaagatgacaacaatcgaaaccggtcagaaaactcaaaagtcttctccttccggttctgctactaccgctactggtacactcaagcagtcatcagcatcgtttaaaaggtggggaaggagacacccgtttgtaagatatggacttccgatgatatctctcactgtatttggagccctaggactcggccaactacttcaaggcagtaaggatattgcaaaggtaaaagatgaccaagaatgggagattatagaaacaagaaaggcactttcgagaacaggacctgtcgatgcctataaacctaaaaacacatccattgaagatgagctcaaggctatgcaagagaaggtggacataaacacgtacgagtacaagaaaattccaaagctaaacgaaagcaagtcgagttaagaagagtctttgtataagattagtctttctagatgtgtttcaagttttaaatgactcttcagttcacataatcgcccaagtacaaattccagtaagttctggctgggcttcctaaaaccaagaacaacgagggacttgccaattgttgataatacatgttgtcgtgttgatttacgacgtccaaatagatctgaaagaggctttat

SEQ ID NO: 36559 - protein, 134 aa, Arabidopsis thaliana
  peptide (1)..(134): Ceres Seq. ID no. 12560057
  misc_feature (1)..(67): Homolog of NCBI NO: 26453208 NR Description: putative kinesin [Arabidopsis thaliana]
  misc_feature (1)..(134): Homolog of NCBI NO: 7428718 NR Description: probable kinesin - Arabidopsis thaliana
  misc_feature (1)..(134): Homolog of NCBI NO: 22328612 NR Description: similar to kinesin like protein {Arabidopsis
MTTIETGQKTQKSSPSGSATTATGTLKQSSASFKRWGRRHPFVRYGLPMISLTVFGALGLGQLLQGSKDIAKVKDDQEWEIIETRKALSRTGPVDAYKPKNTSIEDELKAMQEKVDINTYEYKKIPKLNESKSS

SEQ ID NO: 36560 - protein, 86 aa, Arabidopsis thaliana; identical to SEQ ID NO: 29125
  peptide (1)..(86): Ceres Seq. ID no. 12560058
  misc_feature (1)..(19): Homolog of NCBI NO: 26453208 NR Description: putative kinesin [Arabidopsis thaliana]
  misc_feature (1)..(86): Homolog of NCBI NO: 7428718 NR Description: probable kinesin - Arabidopsis thaliana
  misc_feature (1)..(86): Homolog of NCBI NO: 22328612 NR Description: similar to kinesin like protein {Arabidopsis

SEQ ID NO: 36561 - DNA, 1248 bp, Arabidopsis thaliana
  misc_feature (1)..(1248): Ceres Seq. ID no. 12558635
  misc_feature: MA Experiment ID: 20000355 Result: Down-regulated in Transcription
  misc_feature: MA Experiment 20000355 PARAMETER Experiment Name: At_Siliques_Sub_P Parameter: Age (day) Value: 21
  misc_feature: MA Experiment 20000355 PARAMETER Experiment Name: At_Siliques_Sub_P Parameter: Organism Value: A. thaliana
  misc_feature: MA Experiment 20000355 PARAMETER Experiment Name: At_Siliques_Sub_P Parameter: Plant Line Value: WS
  misc_feature: MA Experiment 20000355 PARAMETER Experiment Name: At_Siliques_Sub_P Parameter: Tissue Value: Less Than 5mm Siliques vs. Whole Plant
atcgttgatttgtcaactcaacaacgcccaaaccctaaaacaatccccaatcatcgtttcaataatcaaatttccccaattgaagaataaagatcaaaactttggaagttttcctgtgaaaataatctatcctttttgcatcatttgcgttttggttgatgaagaggatctgaagaagctgagatttaggaatgatgatgggttttgctgtatcggatgaattgttgggtactgttgctccgattgtggtgtactggttgtattctgggatttatgtagcgctctcctctttagagagttatagattgcattcaaaggttgaagaagaagagaagaatcttgtatcgaaatcttctgttgtgaaaggtgttcttgttcaacaggttgttcaagctgttgtcgctatccttttgttcacggtgacgggaagtgatgccgaagcagacaaagcgcaacagttttccttcttggtcctagcaagacagtttgtgactgccatgatagtcctcgacacatggcaatacttcatgcatcgatatatgcatcagaacaagttcttatacaaacatatccactctcaacaccaccgtcttatcgtcccttatgcatatggagctttatacaaccatccagtggaaggtcttctcttggatacaattggaggcgccttatctttcctagtctctggtatgtctccaagaacttccatcttcttcttctctttcgccacgatcaaaaccgtggacgaccattgcggtctctggctacctggaaacttattccatatggtcttcaagaacaactcggcttaccacgatatccatcatcagctctatggaaccaaatacaatttctctcagcctttctttgtcatgtgggatcggattcttggaacttacatgccttactcgcttgagaaaagagaagatggaggattcgaagctcgcccgactaaagaattcaaagacgattaagattttggagtttggatatatgttatgtatctgccctgaggttggagaaatggatgatactttgtgttattggaggtgtagttttaaaatcagaaacagaactggtttttttgcgttttgcgtttcttctcaagagcgaatttagcttggagtttgagatttgtatataaacattattgagttgttgttctactttcggtttttgttttgcatgtaatattactacaacaaacatgttttttttataatctatccatctacgaggccattcttg

SEQ ID NO: 36562 - protein, 260 aa, Arabidopsis thaliana
  peptide (1)..(260): Ceres Seq. ID no. 12558636
  misc_feature (15)..(89): Homolog of NCBI NO: 19113281 NR Description: hypothetical integral membrane protein, putative
  misc_feature (90)..(256): Homolog of NCBI NO: 19113281 NR Description: hypothetical integral membrane protein, putative
  misc_feature (35)..(199): Homolog of NCBI NO: 5360721 NR Description: acid phosphatase [Lupinus albus]
  misc_feature (3)..(78): Homolog of NCBI NO: 34911990 NR Description: P0694A04.28 [Oryza sativa (japonica
  misc_feature (82)..(253): Homolog of NCBI NO: 34911990 NR Description: P0694A04.28 [Oryza sativa (japonica
  misc_feature (12)..(256): Homolog of NCBI NO: 34913184 NR Description: similar to acid phosphatase
  misc_feature (3)..(260): Homolog of NCBI NO: 25511716 NR Description: F14L17.5 protein - Arabidopsis thaliana
  misc_feature (2)..(260): Homolog of NCBI NO: 18394095 NR Description: acid phosphatase, putative
  misc_feature (3)..(260): Homolog of NCBI NO: 25404823 NR Description: probable sterol desaturase T6C23.16
  misc_feature (1)..(260): Homolog of NCBI NO: 22330531 NR Description: acid phosphatase, putative
MMMGFAVSDELLGTVAPIVVYWLYSGIYVALSSLESYRLHSKVEEEEKNLVSKSSVVKGVLVQQVVQAVVAILLFTVTGSDAEADKAQQFSFLVLARQFVTAMIVLDTWQYFMHRYMHQNKFLYKHIHSQHHRLIVPYAYGALYNHPVEGLLLDTIGGALSFLVSGMSPRTSIFFFSFATIKTVDDHCGLWLPGNLFHMVFKNNSAYHDIHHQLYGTKYNFSQPFFVMWDRILGTYMPYSLEKREDGGFEARPTKEFKDD

SEQ ID NO: 36563 - protein, 259 aa, Arabidopsis thaliana
  peptide (1)..(259): Ceres Seq. ID no. 12558637
  misc_feature (14)..(88): Homolog of NCBI NO: 19113281 NR Description: hypothetical integral membrane protein, putative
  misc_feature (89)..(255): Homolog of NCBI NO: 19113281 NR Description: hypothetical integral membrane protein, putative
  misc_feature (34)..(198): Homolog of NCBI NO: 5360721 NR Description: acid phosphatase [Lupinus albus]
  misc_feature (2)..(77): Homolog of NCBI NO: 34911990 NR Description: P0694A04.28 [Oryza sativa (japonica
  misc_feature (81)..(252): Homolog of NCBI NO: 34911990 NR Description: P0694A04.28 [Oryza sativa (japonica
  misc_feature (11)..(255): Homolog of NCBI NO: 34913184 NR Description: similar to acid phosphatase
  misc_feature (2)..(259): Homolog of NCBI NO: 25511716 NR Description: F14L17.5 protein - Arabidopsis thaliana
  misc_feature (1)..(259): Homolog of NCBI NO: 18394095 NR Description: acid phosphatase, putative
  misc_feature (2)..(259): Homolog of NCBI NO: 25404823 NR Description: probable sterol desaturase T6C23.16
  misc_feature (1)..(259): Homolog of NCBI NO: 22330531 NR Description: acid phosphatase, putative
MMGFAVSDELLGTVAPIVVYWLYSGIYVALSSLESYRLHSKVEEEEKNLVSKSSVVKGVLVQQVVQAVVAILLFTVTGSDAEADKAQQFSFLVLARQFVTAMIVLDTWQYFMHRYMHQNKFLYKHIHSQHHRLIVPYAYGALYNHPVEGLLLDTIGGALSFLVSGMSPRTSIFFFSFATIKTVDDHCGLWLPGNLFHMVFKNNSAYHDIHHQLYGTKYNFSQPFFVMWDRILGTYMPYSLEKREDGGFEARPTKEFKDD

SEQ ID NO: 36564 - protein, 258 aa, Arabidopsis thaliana
  peptide (1)..(258): Ceres Seq. ID no. 12558638
  misc_feature (13)..(87): Homolog of NCBI NO: 19113281 NR Description: hypothetical integral membrane protein, putative
  misc_feature (88)..(254): Homolog of NCBI NO: 19113281 NR Description: hypothetical integral membrane protein, putative
  misc_feature (33)..(197): Homolog of NCBI NO: 5360721 NR Description: acid phosphatase [Lupinus albus]
  misc_feature (1)..(76): Homolog of NCBI NO: 34911990 NR Description: P0694A04.28 [Oryza sativa (japonica
  misc_feature (80)..(251): Homolog of NCBI NO: 34911990 NR Description: P0694A04.28 [Oryza sativa (japonica
  misc_feature (10)..(254): Homolog of NCBI NO: 34913184 NR Description: similar to acid phosphatase
  misc_feature (1)..(258): Homolog of NCBI NO: 25511716 NR Description: F14L17.5 protein - Arabidopsis thaliana
  misc_feature (1)..(258): Homolog of NCBI NO: 18394095 NR Description: acid phosphatase, putative
  misc_feature (1)..(258): Homolog of NCBI NO: 25404823 NR Description: probable sterol desaturase T6C23.16
  misc_feature (1)..(258): Homolog of NCBI NO: 22330531 NR Description: acid phosphatase, putative
MGFAVSDELLGTVAPIVVYWLYSGIYVALSSLESYRLHSKVEEEEKNLVSKSSVVKGVLVQQVVQAVVAILLFTVTGSDAEADKAQQFSFLVLARQFVTAMIVLDTWQYFMHRYMHQNKFLYKHIHSQHHRLIVPYAYGALYNHPVEGLLLDTIGGALSFLVSGMSPRTSIFFFSFATIKTVDDHCGLWLPGNLFHMVFKNNSAYHDIHHQLYGTKYNFSQPFFVMWDRILGTYMPYSLEKREDGGFEARPTKEFKDD

SEQ ID NO: 36565 - DNA, 1725 bp, Arabidopsis thaliana
  misc_feature (1)..(1725): Ceres Seq. ID no. 12385100
  misc_feature: MA Experiment ID: 108434 Result: Up-regulated in Transcription
  misc_feature: MA Experiment 108434 PARAMETER Experiment Name: At_Root_Tips_cDNA_P Parameter: Tissue Value: Root Tips
  misc_feature: MA Experiment ID: 108462 Result: Down-regulated in Transcription
  misc_feature: MA Experiment 108462 PARAMETER Experiment Name: At_Germinating_Seeds_cDNA_P Parameter: Age (day) Value: 2 vs. 0
  misc_feature: MA Experiment 108462 PARAMETER Experiment Name: At_Germinating_Seeds_cDNA_P Parameter: Tissue Value: Germinating Seeds
  misc_feature: MA Experiment ID: 108463 Result: Down-regulated in Transcription
  misc_feature: MA Experiment 108463 PARAMETER Experiment Name: At_Germinating_Seeds_cDNA_P Parameter: Age (day) Value: 3 vs. 0
  misc_feature: MA Experiment 108463 PARAMETER Experiment Name: At_Germinating_Seeds_cDNA_P Parameter: Tissue Value: Germinating Seeds
  misc_feature: MA Experiment ID: 108464 Result: Down-regulated in Transcription
  misc_feature: MA Experiment 108464 PARAMETER Experiment Name: At_Germinating_Seeds_cDNA_P Parameter: Age (day) Value: 4 vs. 0
  misc_feature: MA Experiment 108464 PARAMETER Experiment Name: At_Germinating_Seeds_cDNA_P Parameter: Tissue Value: Germinating Seeds
  misc_feature: MA Experiment ID: 108572 Result: Down-regulated in Transcription
  misc_feature: MA Experiment 108572 PARAMETER Experiment Name: At_Drought_cDNA_P Parameter: Timepoint (hr) Value: 1
  misc_feature: MA Experiment 108572 PARAMETER Experiment Name: At_Drought_cDNA_P Parameter: Tissue Value: Aerial
  misc_feature: MA Experiment 108572 PARAMETER Experiment Name: At_Drought_cDNA_P Parameter: Treatment Value: Drought vs. No Drought
  misc_feature: MA Experiment ID: 108573 Result: Down-regulated in Transcription
  misc_feature: MA Experiment 108573 PARAMETER Experiment Name: At_Drought_cDNA_P Parameter: Timepoint (hr) Value: 6
  misc_feature: MA Experiment 108573 PARAMETER Experiment Name: At_Drought_cDNA_P Parameter: Tissue Value: Aerial
  misc_feature: MA Experiment 108573 PARAMETER Experiment Name: At_Drought_cDNA_P Parameter: Treatment Value: Drought vs. No Drought
  misc_feature: MA Experiment ID: 108595 Result: Down-regulated in Transcription
  misc_feature: MA Experiment 108595 PARAMETER Experiment Name: At_Ler-pi_Ovule_cDNA_P Parameter: Plant Line Value: null
  misc_feature: MA Experiment ID: 20000180 Result: Down-regulated in Transcription
  misc_feature: MA Experiment 20000180 PARAMETER Experiment Name: At_Germinating_Seeds_P Parameter: Age (hr) Value: 24 vs. 0
  misc_feature: MA Experiment 20000180 PARAMETER Experiment Name: At_Germinating_Seeds_P Parameter: Tissue Value: Germinating Seeds
  misc_feature: MA Experiment ID: 20000224 Result: Up-regulated in Transcription
  misc_feature: MA Experiment ID: 20000227 Result: Up-regulated in Transcription
  misc_feature: MA Experiment 20000227 PARAMETER Experiment Name: At_Root-Tips-vs-Tops_P Parameter: Tissue Value: Root Tips vs. Root Tops
  misc_feature: MA Experiment ID: 20000234 Result: Up-regulated in Transcription
  misc_feature: MA Experiment 20000234 PARAMETER Experiment Name: At_Siliques_P Parameter: Age (day) Value: 21
  misc_feature: MA Experiment 20000234 PARAMETER Experiment Name: At_Siliques_P Parameter: Organism Value: A. thaliana
  misc_feature: MA Experiment 20000234 PARAMETER Experiment Name: At_Siliques_P Parameter: Plant Line Value: WS
  misc_feature: MA Experiment 20000234 PARAMETER Experiment Name: At_Siliques_P Parameter: Tissue Value: Less Than 5mm Siliques vs. Whole Plant
  misc_feature: MA Experiment ID: 20000264 Result: Up-regulated in Transcription
  misc_feature: MA Experiment 20000264 PARAMETER Experiment Name: At_Open_Flower_P Parameter: Age (day) Value: 21
  misc_feature: MA Experiment 20000264 PARAMETER Experiment Name: At_Open_Flower_P Parameter: Plant Line Value: WS
  misc_feature: MA Experiment 20000264 PARAMETER Experiment Name: At_Open_Flower_P Parameter: Tissue Value: Open Flower vs. Whole Plant
  misc_feature: MA Experiment ID: 20000265 Result: Up-regulated in Transcription
  misc_feature: MA Experiment 20000265 PARAMETER Experiment Name: At_Open_Flower_P Parameter: Age (day) Value: 21
  misc_feature: MA Experiment 20000265 PARAMETER Experiment Name: At_Open_Flower_P Parameter: Plant Line Value: WS
  misc_feature: MA Experiment 20000265 PARAMETER Experiment Name: At_Open_Flower_P Parameter: Tissue Value: Closed Flower vs. Whole Plant
  misc_feature: MA Experiment ID: 20000286 Result: Up-regulated in Transcription
  misc_feature: MA Experiment 20000286 PARAMETER Experiment Name: At_Open_Flower_P Parameter: Age (day) Value: 21
  misc_feature: MA Experiment 20000286 PARAMETER Experiment Name: At_Open_Flower_P Parameter: Plant Line Value: WS
  misc_feature: MA Experiment 20000286 PARAMETER Experiment Name: At_Open_Flower_P Parameter: Tissue Value: Half Open vs. Whole Plant
  misc_feature: MA Experiment ID: 20001557 Result: Up-regulated in Transcription
  misc_feature: MA Experiment 20001557 PARAMETER Experiment Name: At_Drought_Soil_Dry_P Parameter: Age (day) Value: 27
  misc_feature: MA Experiment 20001557 PARAMETER Experiment Name: At_Drought_Soil_Dry_P Parameter: Organism Value: A. thaliana
  misc_feature: MA Experiment 20001557 PARAMETER Experiment Name: At_Drought_Soil_Dry_P Parameter: Plant Line Value: WS
  misc_feature: MA Experiment 20001557 PARAMETER Experiment Name: At_Drought_Soil_Dry_P Parameter: Post Timepoint (hr) Value: 3
  misc_feature: MA Experiment 20001557 PARAMETER Experiment Name: At_Drought_Soil_Dry_P Parameter: Post-Treatment Value: Re-Water vs. No Drought
  misc_feature: MA Experiment 20001557 PARAMETER Experiment Name: At_Drought_Soil_Dry_P Parameter: Timepoint (day) Value: 13
  misc_feature: MA Experiment 20001557 PARAMETER Experiment Name: At_Drought_Soil_Dry_P Parameter: Treatment Value: Drought vs. No Drought
  misc_feature: MA Experiment ID: 20001558 Result: Up-regulated in Transcription
  misc_feature: MA Experiment 20001558 PARAMETER Experiment Name: At_Drought_Soil_Dry_P Parameter: Age (day) Value: 27
  misc_feature: MA Experiment 20001558 PARAMETER Experiment Name: At_Drought_Soil_Dry_P Parameter: Organism Value: A. thaliana
  misc_feature: MA Experiment 20001558 PARAMETER Experiment Name: At_Drought_Soil_Dry_P Parameter: Plant Line Value: WS
  misc_feature: MA Experiment 20001558 PARAMETER Experiment Name: At_Drought_Soil_Dry_P Parameter: Post Timepoint (hr) Value: 6
  misc_feature: MA Experiment 20001558 PARAMETER Experiment Name: At_Drought_Soil_Dry_P Parameter: Post-Treatment Value: Re-Water vs. No Drought
  misc_feature: MA Experiment 20001558 PARAMETER Experiment Name: At_Drought_Soil_Dry_P Parameter: Timepoint (day) Value: 13
  misc_feature: MA Experiment 20001558 PARAMETER Experiment Name: At_Drought_Soil_Dry_P Parameter: Treatment Value: Drought vs. No Drought
  misc_feature: MA Experiment ID: 20001560 Result: Up-regulated in Transcription
  misc_feature: MA Experiment 20001560 PARAMETER Experiment Name: At_Drought_Soil_Dry_P Parameter: Age (day) Value: 28
  misc_feature: MA Experiment 20001560 PARAMETER Experiment Name: At_Drought_Soil_Dry_P Parameter: Organism Value: A. thaliana
  misc_feature: MA Experiment 20001560 PARAMETER Experiment Name: At_Drought_Soil_Dry_P Parameter: Plant Line Value: WS
  misc_feature: MA Experiment 20001560 PARAMETER Experiment Name: At_Drought_Soil_Dry_P Parameter: Post Timepoint (hr) Value: None
  misc_feature: MA Experiment 20001560 PARAMETER Experiment Name: At_Drought_Soil_Dry_P Parameter: Post-Treatment Value: None
  misc_feature: MA Experiment 20001560 PARAMETER Experiment Name: At_Drought_Soil_Dry_P Parameter: Timepoint (day) Value: 14
  misc_feature: MA Experiment 20001560 PARAMETER Experiment Name: At_Drought_Soil_Dry_P Parameter: Treatment Value: Drought vs. No Drought
aattttctctcactaaatcagaaatgccgccgtcgttaccgtctctgcaactccgacggcttctcctccgtagcttcatttcctcctcctccgtcaatactcttcaatctcagccccgtatcatttcttccaagccgttgttttctcctcttcccccttcccgttcctctatattctcaacatttccttctagattcttctcatctgaaacgaatgcggaatcggaatctttggattcgaatgagatcgctctctctttctcgaaggagctcaccgggaatccagacgccgagtctcaaaccatttcgcagagattcaatctcagcttctcccacatcacgcctaatcccgatttgattctccaaactcttaatctctcaccggaagctggtcgcgcggctctaggttttaacgagtggttagattcgaactctaacttctctcacaccgatgaaacagtttcgtttttcgtcgattactttggccgcacggaaagatttcaaaggaatgctagggatcatctcgaaatacaaaggtatcgccggaggtaaaacactagaatcggcgattgataggcttgttagagctggtagacctaagcaggtcactgatttcttcgagaaaatggagaatgattatggtttgaaacgtgataaagaatcacttaccttggttgtgaagaagctttgtgagaaaggacacgcgagtatcgcagagaagatggtgaagaacactgctaatgaaatatttcctgatgagaatatatgtgatttgttgattagtggatggtgtatttgctgagaaactcgatgaagcaacctaggttagctggtgaaatgtctagaggaggatttgagataggaaccaaagcgtataacatgatgcttgattgtgtttgtaagctttgtaggaagaaagatccttttaagcttcaacctgaagtagagaaggttttgctggagatggagtttcgtggtgtacctagaaacacagagactttcaatgtgttgattaacaatctttgtaaaatcaggagaactgaagaagcaatgacattgtttggtaggatgggtgaatggggttgtcaaccagatgctgagacttatcttgttctgattaggagtttgtatcaagcagcgaggatcggtgaaggggacgaaatgatcgataagatgaaatcagcgggatatggtgagcttttgaataagaaagagtattacgggtttctcaagatattgtgtgggattgagaggcttgagcatgcgatgagtgtgtttaagagcatgaaagctaatggatgcaaacctgggatcaagacttatgatttgttgatggggaaaatgtgtgcgaataaccagctgactagagctaatggtttgtataaagaagcggctaagaaaggaatcgctgttagccctaaggaatacagagtagatccacggtttatgaaaaagaagaccaaggaagtggatagcaatgttaagaagagggagactttgcctgagaaaaccgcgaggaagaagaaacggctcaagcagatcaatatgagttttgttaagaaaccgcacaataagatgagacggagaatgtgatgctgatgaatcttcaacatctgatagaattttctaaagattattgtctttgttctttcctttttaagatattgtcaagagtactcatcattttgcttgatcatgagcaaattgtcccaataatcttttgttc

SEQ ID NO: 36566 - protein, 268 aa, Arabidopsis thaliana
  peptide (1)..(268): Ceres Seq. ID no. 12385101
  misc_feature (70)..(104): Pfam Name: PPR repeat Pfam Description: PPR repeat
  misc_feature (17)..(205): Homolog of NCBI NO: 6721172 NR Description: hypothetical protein [Arabidopsis thaliana]
  misc_feature (17)..(205): Homolog of NCBI NO: 18396782 NR Description: expressed protein
  misc_feature (17)..(191): Homolog of NCBI NO: 21686921 NR Description: putative reverse transcriptase
  misc_feature (4)..(243): Homolog of NCBI NO: 15231863 NR Description: putative protein
  misc_feature (1)..(232): Homolog of NCBI NO: 37534458 NR Description: putative endopeptidase [Oryza sativa (japonica
  misc_feature (1)..(265): Homolog of NCBI NO: 21593376 NR Description: unknown [Arabidopsis thaliana]
  misc_feature (1)..(265): Homolog of NCBI NO: 15240232 NR Description: putative protein
  misc_feature (13)..(266): Homolog of NCBI NO: 34394565 NR Description: unknown protein [Oryza sativa (japonica
  misc_feature (13)..(268): Homolog of NCBI NO: 15239488 NR Description: putative protein
  misc_feature (13)..(268): Homolog of NCBI NO: 21554346 NR Description: unknown [Arabidopsis thaliana]
MVYLLRNSMKQPRLAGEMSRGGFEIGTKAYNMMLDCVCKLCRKKDPFKLQPEVEKVLLEMEFRGVPRNTETFNVLINNLCKIRRTEEAMTLFGRMGEWGCQPDAETYLVLIRSLYQAARIGEGDEMIDKMKSAGYGELLNKKEYYGFLKILCGIERLEHAMSVFKSMKANGCKPGIKTYDLLMGKMCANNQLTRANGLYKEAAKKGIAVSPKEYRVDPRFMKKKTKEVDSNVKKRETLPEKTARKKKRLKQINMSFVKKPHNKMRRRM

SEQ ID NO: 36567 - protein, 260 aa, Arabidopsis thaliana
  peptide (1)..(260): Ceres Seq. ID no. 12385102
  misc_feature (62)..(96): Pfam Name: PPR repeat Pfam Description: PPR repeat
  misc_feature (9)..(197): Homolog of NCBI NO: 6721172 NR Description: hypothetical protein [Arabidopsis thaliana]
  misc_feature (9)..(197): Homolog of NCBI NO: 18396782 NR Description: expressed protein
  misc_feature (9)..(183): Homolog of NCBI NO: 21686921 NR Description: putative reverse transcriptase
  misc_feature (1)..(235): Homolog of NCBI NO: 15231863 NR Description: putative protein
  misc_feature (1)..(224): Homolog of NCBI NO: 37534458 NR Description: putative endopeptidase [Oryza sativa (japonica
  misc_feature (1)..(257): Homolog of NCBI NO: 21593376 NR Description: unknown [Arabidopsis thaliana]
  misc_feature (1)..(257): Homolog of NCBI NO: 15240232 NR Description: putative protein
  misc_feature (5)..(258): Homolog of NCBI NO: 34394565 NR Description: unknown protein [Oryza sativa (japonica
  misc_feature (5)..(260): Homolog of NCBI NO: 15239488 NR Description: putative protein
  misc_feature (5)..(260): Homolog of NCBI NO: 21554346 NR Description: unknown [Arabidopsis thaliana]
MKQPRLAGEMSRGGFEIGTKAYNMMLDCVCKLCRKKDPFKLQPEVEKVLLEMEFRGVPRNTETFNVLINNLCKIRRTEEAMTLFGRMGEWGCQPDAETYLVLIRSLYQAARIGEGDEMIDKMKSAGYGELLNKKEYYGFLKILCGIERLEHAMSVFKSMKANGCKPGIKTYDLLMGKMCANNQLTRANGLYKEAAKKGIAVSPKEYRVDPRFMKKKTKEVDSNVKKRETLPEKTARKKKRLKQINMSFVKKPHNKMRRRM

SEQ ID NO: 36568 - protein, 251 aa, Arabidopsis thaliana
  peptide (1)..(251): Ceres Seq. ID no. 12385103
  misc_feature (53)..(87): Pfam Name: PPR repeat Pfam Description: PPR repeat
  misc_feature (1)..(188): Homolog of NCBI NO: 6721172 NR Description: hypothetical protein [Arabidopsis thaliana]
  misc_feature (1)..(188): Homolog of NCBI NO: 18396782 NR Description: expressed protein
  misc_feature (1)..(174): Homolog of NCBI NO: 21686921 NR Description: putative reverse transcriptase
  misc_feature (1)..(226): Homolog of NCBI NO: 15231863 NR Description: putative protein
  misc_feature (1)..(215): Homolog of NCBI NO: 37534458 NR Description: putative endopeptidase [Oryza sativa (japonica
  misc_feature (1)..(248): Homolog of NCBI NO: 21593376 NR Description: unknown [Arabidopsis thaliana]
  misc_feature (1)..(248): Homolog of NCBI NO: 15240232 NR Description: putative protein
  misc_feature (1)..(249): Homolog of NCBI NO: 34394565 NR Description: unknown protein [Oryza sativa (japonica
  misc_feature (1)..(251): Homolog of NCBI NO: 15239488 NR Description: putative protein
  misc_feature (1)..(251): Homolog of NCBI NO: 21554346 NR Description: unknown [Arabidopsis thaliana]
MSRGGFEIGTKAYNMMLDCVCKLCRKKDPFKLQPEVEKVLLEMEFRGVPRNTETFNVLINNLCKIRRTEEAMTLFGRMGEWGCQPDAETYLVLIRSLYQAARIGEGDEMIDKMKSAGYGELLNKKEYYGFLKILCGIERLEHAMSVFKSMKANGCKPGIKTYDLLMGKMCANNQLTRANGLYKEAAKKGIAVSPKEYRVDPRFMKKKTKEVDSNVKKRETLPEKTARKKKRLKQINMSFVKKPHNKMRRRM

SEQ ID NO: 36569 - DNA, 689 bp, Arabidopsis thaliana
  misc_feature (1)..(689): Ceres Seq. ID no. 12603376
  misc_feature: MA Experiment ID: 20000794 Result: Down-regulated in Transcription
  misc_feature: MA Experiment 20000794 PARAMETER Experiment Name: At_Petals_P Parameter: Age (day) Value: 23-25 days
  misc_feature: MA Experiment 20000794 PARAMETER Experiment Name: At_Petals_P Parameter: Plant Line Value: WS
  misc_feature: MA Experiment 20000794 PARAMETER Experiment Name: At_Petals_P Parameter: Tissue Value: Petals vs. Whole plant
  misc_feature: MA Experiment ID: 20001451 Result: Down-regulated in Transcription
  misc_feature: MA Experiment 20001451 PARAMETER Experiment Name: At_Far-red-induction_P Parameter: Age (day) Value: 7
  misc_feature: MA Experiment 20001451 PARAMETER Experiment Name: At_Far-red-induction_P Parameter: Light Value: Far-red vs. White
  misc_feature: MA Experiment 20001451 PARAMETER Experiment Name: At_Far-red-induction_P Parameter: Organism Value: A. thaliana
  misc_feature: MA Experiment 20001451 PARAMETER Experiment Name: At_Far-red-induction_P Parameter: Plant Line Value: Columbia
  misc_feature: MA Experiment 20001451 PARAMETER Experiment Name: At_Far-red-induction_P Parameter: Timepoint (hr) Value: 24
  misc_feature: MA Experiment 20001451 PARAMETER Experiment Name: At_Far-red-induction_P Parameter: Tissue Value: Whole Plant
  misc_feature: MA Experiment ID: 20001558 Result: Up-regulated in Transcription
  misc_feature: MA Experiment 20001558 PARAMETER Experiment Name: At_Drought_Soil_Dry_P Parameter: Age (day) Value: 27
  misc_feature: MA Experiment 20001558 PARAMETER Experiment Name: At_Drought_Soil_Dry_P Parameter: Organism Value: A. thaliana
  misc_feature: MA Experiment 20001558 PARAMETER Experiment Name: At_Drought_Soil_Dry_P Parameter: Plant Line Value: WS
  misc_feature: MA Experiment 20001558 PARAMETER Experiment Name: At_Drought_Soil_Dry_P Parameter: Post Timepoint (hr) Value: 6
  misc_feature: MA Experiment 20001558 PARAMETER Experiment Name: At_Drought_Soil_Dry_P Parameter: Post-Treatment Value: Re-Water vs. No Drought
  misc_feature: MA Experiment 20001558 PARAMETER Experiment Name: At_Drought_Soil_Dry_P Parameter: Timepoint (day) Value: 13
  misc_feature: MA Experiment 20001558 PARAMETER Experiment Name: At_Drought_Soil_Dry_P Parameter: Treatment Value: Drought vs. No Drought
  misc_feature: MA Experiment ID: 20001560 Result: Up-regulated in Transcription
  misc_feature: MA Experiment 20001560 PARAMETER Experiment Name: At_Drought_Soil_Dry_P Parameter: Age (day) Value: 28
  misc_feature: MA Experiment 20001560 PARAMETER Experiment Name: At_Drought_Soil_Dry_P Parameter: Organism Value: A. thaliana
  misc_feature: MA Experiment 20001560 PARAMETER Experiment Name: At_Drought_Soil_Dry_P Parameter: Plant Line Value: WS
  misc_feature: MA Experiment 20001560 PARAMETER Experiment Name: At_Drought_Soil_Dry_P Parameter: Post Timepoint (hr) Value: None
  misc_feature: MA Experiment 20001560 PARAMETER Experiment Name: At_Drought_Soil_Dry_P Parameter: Post-Treatment Value: None
  misc_feature: MA Experiment 20001560 PARAMETER Experiment Name: At_Drought_Soil_Dry_P Parameter: Timepoint (day) Value: 14
  misc_feature: MA Experiment 20001560 PARAMETER Experiment Name: At_Drought_Soil_Dry_P Parameter: Treatment Value: Drought vs. No Drought
  misc_feature: MA Experiment ID: 20001757 Result: Up-regulated in Transcription
  misc_feature: MA Experiment 20001757 PARAMETER Experiment Name: At_50mM_NH4NO3_L-to-H_P Parameter: Timepoint (hr) Value: 6
  misc_feature: MA Experiment 20001757 PARAMETER Experiment Name: At_50mM_NH4NO3_L-to-H_P Parameter: Tissue Value: Leaf
  misc_feature: MA Experiment 20001757 PARAMETER Experiment Name: At_50mM_NH4NO3_L-to-H_P Parameter: Treatment Value: 50mM NH4NO3 vs 100mM Mannitol
atatataaaccctaatcacatttcgcaaccaccaaagcggaggaaaaatgccggctggacatggagttcgagcgagaacgagggatctgttcgcgaggcctttcaggaagaagggttacattcctctatcgacttacctgaggaccttcaaggtcggcgattacgtcgatgtgaaggtgaatggtgcgatccacaagggtatgcctcacaagttctaccatggtcgtactggtcgtatctggaacgtcaccaagcgcgccgtcggtgttgaagtcaacaaacagattgggaacaggatcataaggaagaggattcatgttcgtgtggagcatgtgcagcagtcaagatgtgccgaggagttcaagctgaggaagaagaaaaacgatgagctcaaggctgcagccaaagccaatggtgagaccatcagcaccaagagacagcctaaaggacccaaaccaggattcatggtcgaaggaatgaccttggagactgtcactccaatcccctacgatgtcgtcaacgatctcaaaggaggctattagttctatcttcttgtgctttagaactctttttcatatgttttgtagcagacttaaaactaagaattatgatttactatataacaggagtttgcaatccagattttgtaaggatggtttatttttattattggtatttttgatcttcct

SEQ ID NO: 36570 - protein, 164 aa, Arabidopsis thaliana
  peptide (1)..(164): Ceres Seq. ID no. 12603377
  misc_feature (2)..(100): Pfam Name: Ribosomal protein L21e Pfam Description: Ribosomal protein L21e
  misc_feature (1)..(157): Homolog of NCBI NO: 20129705 NR Description: CG12775-PA [Drosophila melanogaster]
  misc_feature (1)..(155): Homolog of NCBI NO: 6319668 NR Description: Homology to rat L21; Rpl21ap [Saccharomyces
  misc_feature (1)..(155): Homolog of NCBI NO: 40741182 NR Description: hypothetical protein AN4802.2 [Aspergillus
  misc_feature (1)..(155): Homolog of NCBI NO: 6094029 NR Description: 60S RIBOSOMAL PROTEIN L21
  misc_feature (1)..(157): Homolog of NCBI NO: 15213768 NR Description: ribosomal protein L21 [Spodoptera frugiperda]
  misc_feature (1)..(164): Homolog of NCBI NO: 32400808 NR Description: 60s ribosomal protein L21 [Triticum aestivum]
  misc_feature (1)..(164): Homolog of NCBI NO: 11276828 NR Description: ribosomal protein L21 [imported] - rice
  misc_feature (1)..(164): Homolog of NCBI NO: 37535194 NR Description: 60S ribosomal protein L21
  misc_feature (1)..(164): Homolog of NCBI NO: 18406015 NR Description: 60S ribosomal protein L21, putative
  misc_feature (1)..(164): Homolog of NCBI NO: 18391042 NR Description: putative 60S ribosomal protein L21
MPAGHGVRARTRDLFARPFRKKGYIPLSTYLRTFKVGDYVDVKVNGAIHKGMPHKFYHGRTGRIWNVTKRAVGVEVNKQIGNRIIRKRIHVRVEHVQQSRCAEEFKLRKKKNDELKAAAKANGETISTKRQPKGPKPGFMVEGMTLETVTPIPYDVVNDLKGGY

SEQ ID NO: 36571 - protein, 113 aa, Arabidopsis thaliana
  peptide (1)..(113): Ceres Seq. ID no. 12603378
  misc_feature (1)..(106): Homolog of NCBI NO: 20129705 NR Description: CG12775-PA [Drosophila melanogaster]
  misc_feature (1)..(104): Homolog of NCBI NO: 6319668 NR Description: Homology to rat L21; Rpl21ap [Saccharomyces
  misc_feature (1)..(104): Homolog of NCBI NO: 40741182 NR Description: hypothetical protein AN4802.2 [Aspergillus
  misc_feature (1)..(104): Homolog of NCBI NO: 6094029 NR Description: 60S RIBOSOMAL PROTEIN L21
  misc_feature (1)..(106): Homolog of NCBI NO: 15213768 NR Description: ribosomal protein L21 [Spodoptera frugiperda]
  misc_feature (1)..(113): Homolog of NCBI NO: 32400808 NR Description: 60s ribosomal protein L21 [Triticum aestivum]
  misc_feature (1)..(113): Homolog of NCBI NO: 11276828 NR Description: ribosomal protein L21 [imported] - rice
  misc_feature (1)..(113): Homolog of NCBI NO: 37535194 NR Description: 60S ribosomal protein L21
  misc_feature (1)..(113): Homolog of NCBI NO: 18406015 NR Description: 60S ribosomal protein L21, putative
  misc_feature (1)..(113): Homolog of NCBI NO: 18391042 NR Description: putative 60S ribosomal protein L21
MPHKFYHGRTGRIWNVTKRAVGVEVNKQIGNRIIRKRIHVRVEHVQQSRCAEEFKLRKKKNDELKAAAKANGETISTKRQPKGPKPGFMVEGMTLETVTPIPYDVVNDLKGGY

SEQ ID NO: 36572 - protein, 89 aa, Arabidopsis thaliana
  peptide (1)..(89): Ceres Seq. ID no. 12603379
YINPNHISQPPKRRKNAGWTWSSSENEGSVREAFQEEGLHSSIDLPEDLQGRRLRRCEGEWCDPQGYASQVLPWSYWSYLERHQARRRC

SEQ ID NO: 36573 - DNA, 477 bp, Arabidopsis thaliana
  misc_feature (1)..(477): Ceres Seq. ID no. 13593342
  misc_feature: MA Experiment ID: 20000182 Result: Up-regulated in Transcription
  misc_feature: MA Experiment 20000182 PARAMETER Experiment Name: At_2mM_SA_P Parameter: Age (day) Value: 14
  misc_feature: MA Experiment 20000182 PARAMETER Experiment Name: At_2mM_SA_P Parameter: Organism Value: A. thaliana
  misc_feature: MA Experiment 20000182 PARAMETER Experiment Name: At_2mM_SA_P Parameter: Plant Line Value: WS
  misc_feature: MA Experiment 20000182 PARAMETER Experiment Name: At_2mM_SA_P Parameter: Timepoint (hr) Value: 6
  misc_feature: MA Experiment 20000182 PARAMETER Experiment Name: At_2mM_SA_P Parameter: Tissue Value: Aerial
  misc_feature: MA Experiment 20000182 PARAMETER Experiment Name: At_2mM_SA_P Parameter: Treatment Value: 2mM SA vs. No Treatment
  misc_feature: MA Experiment ID: 20000436 Result: Up-regulated in Transcription
  misc_feature: MA Experiment 20000436 PARAMETER Experiment Name: At_Drought_P Parameter: Age (day) Value: 7
  misc_feature: MA Experiment 20000436 PARAMETER Experiment Name: At_Drought_P Parameter: Organism Value: A. thaliana
  misc_feature: MA Experiment 20000436 PARAMETER Experiment Name: At_Drought_P Parameter: Plant Line Value: WS
  misc_feature: MA Experiment 20000436 PARAMETER Experiment Name: At_Drought_P Parameter: Timepoint (hr) Value: 12
  misc_feature: MA Experiment 20000436 PARAMETER Experiment Name: At_Drought_P Parameter: Tissue Value: Whole Plant
  misc_feature: MA Experiment 20000436 PARAMETER Experiment Name: At_Drought_P Parameter: Treatment Value: Drought vs. No Drought
  misc_feature: MA Experiment ID: 20000451 Result: Down-regulated in Transcription
  misc_feature: MA Experiment 20000451 PARAMETER Experiment Name: At_CS6879_Shoots-Roots_P Parameter: Age (day) Value: 14
  misc_feature: MA Experiment 20000451 PARAMETER Experiment Name: At_CS6879_Shoots-Roots_P Parameter: Organism Value: A. thaliana
  misc_feature: MA Experiment 20000451 PARAMETER Experiment Name: At_CS6879_Shoots-Roots_P Parameter: Plant Line Value: CS6879 vs. WS
  misc_feature: MA Experiment 20000451 PARAMETER Experiment Name: At_CS6879_Shoots-Roots_P Parameter: Tissue Value: Roots
aaaaacaattcagattccaattttctcaaactctaaaatcaatctctcaaatctctcaaccgtgatcaagatgcagatcttcgttaagactctcaccggaaagactatcaccctcgaggtggaaagctctgacaccatcgacaacgttaaggccaagatccaggataaggaaggcattcctccggaccagcagcgtctcatcttcgctggaaagcagcttgaggatggacgtactttggccgactacaacatccagaaggagtctactcttcacttggtcctccgtctccgtggtggtttctaaaccttgtctctctctcttatggttactgaaccaagttcatgtatcgtttcatctagtactttggtggtttatgttttggggccatgtacagcctctgataaataattgatcgactatgtttccgtttctttcatctctcttttctttcaaacaacaaatcgaacttattctcc

SEQ ID NO: 36574 - protein, 100 aa, Arabidopsis thaliana
  peptide (1)..(100): Ceres Seq. ID no. 13593343
  misc_feature (24)..(97): Pfam Name: Ubiquitin family Pfam Description: Ubiquitin family
  misc_feature (24)..(100): Homolog of NCBI NO: 6118549 NR Description: ubiquitin precursor [Hevea brasiliensis]
  misc_feature (24)..(100): Homolog of NCBI NO: 1800281 NR Description: polyubiquitin [Fragaria x ananassa]
  misc_feature (24)..(100): Homolog of NCBI NO: 15982787 NR Description: AT4g05320/C17L7_240 [Arabidopsis thaliana]
  misc_feature (24)..(100): Homolog of NCBI NO: 33327286 NR Description: polyubiquitin 2 [Phaseolus vulgaris]
  misc_feature (24)..(100): Homolog of NCBI NO: 18412077 NR Description: polyubiquitin (UBQ14) [Arabidopsis thaliana]
  misc_feature (24)..(100): Homolog of NCBI NO: 7488781 NR Description: polyubiquitin 4.4 - kidney bean
  misc_feature (24)..(100): Homolog of NCBI NO: 170352 NR Description: hexameric polyubiquitin
  misc_feature (24)..(100): Homolog of NCBI NO: 70645 NR Description: polyubiquitin 5 - garden pea
  misc_feature (24)..(100): Homolog of NCBI NO: 70644 NR Description: ubiquitin precursor - common sunflower (fragment)
  misc_feature (24)..(100): Homolog of NCBI NO: 6671282 NR Description: recombinant ubiquitin-somatotropin fusion protein
KTIQIPIFSNSKINLSNLSTVIKMQIFVKTLTGKTITLEVESSDTIDNVKAKIQDKEGIPPDQQRLIFAGKQLEDGRTLADYNIQKESTLHLVLRLRGGF

SEQ ID NO: 36575 - protein, 77 aa, Arabidopsis thaliana
  peptide (1)..(77): Ceres Seq. ID no. 13593344
  misc_feature (1)..(74): Pfam Name: Ubiquitin family Pfam Description: Ubiquitin family
  misc_feature (1)..(77): Homolog of NCBI NO: 170352 NR Description: hexameric polyubiquitin
  misc_feature (1)..(77): Homolog of NCBI NO: 170354 NR Description: pentameric polyubiquitin
  misc_feature (1)..(77): Homolog of NCBI NO: 1800281 NR Description: polyubiquitin [Fragaria x ananassa]
  misc_feature (1)..(77): Homolog of NCBI NO: 6118549 NR Description: ubiquitin precursor [Hevea brasiliensis]
  misc_feature (1)..(77): Homolog of NCBI NO: 7488781 NR Description: polyubiquitin 4.4 - kidney bean
  misc_feature (1)..(77): Homolog of NCBI NO: 15982787 NR Description: AT4g05320/C17L7_240 [Arabidopsis thaliana]
  misc_feature (1)..(77): Homolog of NCBI NO: 18412077 NR Description: polyubiquitin (UBQ14) [Arabidopsis thaliana]
  misc_feature (1)..(77): Homolog of NCBI NO: 33327286 NR Description: polyubiquitin 2 [Phaseolus vulgaris]
  misc_feature (1)..(77): Homolog of NCBI NO: 70644 NR Description: ubiquitin precursor - common sunflower (fragment)
  misc_feature (1)..(77): Homolog of NCBI NO: 6671282 NR Description: recombinant ubiquitin-somatotropin fusion protein
MQIFVKTLTGKTITLEVESSDTIDNVKAKIQDKEGIPPDQQRLIFAGKQLEDGRTLADYNIQKESTLHLVLRLRGGF

SEQ ID NO: 36576 - protein, 62 aa, Arabidopsis thaliana
  peptide (1)..(62): Ceres Seq. ID no. 13593345
MDVLWPTTTSRRSLLFTWSSVSVVVSKPCLSLLWLLNQVHVSFHLVLWWFMFWGHVQPLINN

SEQ ID NO: 36577 - DNA, 672 bp, Arabidopsis thaliana
  misc_feature (1)..(672): Ceres Seq. ID no. 12330428
  misc_feature: MA Experiment ID: 108573 Result: Up-regulated in Transcription
  misc_feature: MA Experiment 108573 PARAMETER Experiment Name: At_Drought_cDNA_P Parameter: Timepoint (hr) Value: 6
  misc_feature: MA Experiment 108573 PARAMETER Experiment Name: At_Drought_cDNA_P Parameter: Tissue Value: Aerial
  misc_feature: MA Experiment 108573 PARAMETER Experiment Name: At_Drought_cDNA_P Parameter: Treatment Value: Drought vs. No Drought
  misc_feature: MA Experiment ID: 20000224 Result: Down-regulated in Transcription
  misc_feature: MA Experiment ID: 20000264 Result: Down-regulated in Transcription
  misc_feature: MA Experiment 20000264 PARAMETER Experiment Name: At_Open_Flower_P Parameter: Age (day) Value: 21
  misc_feature: MA Experiment 20000264 PARAMETER Experiment Name: At_Open_Flower_P Parameter: Plant Line Value: WS
  misc_feature: MA Experiment 20000264 PARAMETER Experiment Name: At_Open_Flower_P Parameter: Tissue Value: Open Flower vs. Whole Plant
  misc_feature: MA Experiment ID: 20000794 Result: Down-regulated in Transcription
  misc_feature: MA Experiment 20000794 PARAMETER Experiment Name: At_Petals_P Parameter: Age (day) Value: 23-25 days
  misc_feature: MA Experiment 20000794 PARAMETER Experiment Name: At_Petals_P Parameter: Plant Line Value: WS
  misc_feature: MA Experiment 20000794 PARAMETER Experiment Name: At_Petals_P Parameter: Tissue Value: Petals vs. Whole plant
  misc_feature: MA Experiment ID: 20001911 Result: Down-regulated in Transcription
  misc_feature: MA Experiment 20001911 PARAMETER Experiment Name: At_Drought_Reproduction_P Parameter: Age (day) Value: 40
  misc_feature: MA Experiment 20001911 PARAMETER Experiment Name: At_Drought_Reproduction_P Parameter: Organism Value: A. thaliana
  misc_feature: MA Experiment 20001911 PARAMETER Experiment Name: At_Drought_Reproduction_P Parameter: Plant Line Value: WS
  misc_feature: MA Experiment 20001911 PARAMETER Experiment Name: At_Drought_Reproduction_P Parameter: Timepoint (day) Value: 10
  misc_feature: MA Experiment 20001911 PARAMETER Experiment Name: At_Drought_Reproduction_P Parameter: Tissue Value: Flowers
  misc_feature: MA Experiment 20001911 PARAMETER Experiment Name: At_Drought_Reproduction_P Parameter: Treatment Value: Drought vs. No Drought
ctgaacgaagctctctctctgattggccggatctgccggagagaaaaatgacgacgagtattcacatcacagctctcgacggaatcgtcaacgtgaactcactcttcacactcgccgtattcatcggattagcttggaaccctaccgatccagacaacagcctcgtaaccgaccctaattgcgtccccacagctcgtatggctgagaatctcgtcgccttccatgtgtactctttcgcatcattcctattctcaagtctcatcgctctaggtctcaaacaagcaatgaggctcaacatagcttcttcgtttcacatctctactcgaatcgatcctgtggtttactatgtgaacaagacggctcttagatttgggatggttacatccggtttgggatcggtttgtggatgtgggtttctcatgttggctttgattaatgttgttcagatcaagcttgggactttgggctgtggtgctagtggtcatacttatgcagctgttgtgccgcttgtgattctggttccttctgcacttttcatctatgtttctcttatgttatatgcttttactcgttagagacatggtttttgattccatggttgatgcaattagggttatgtttgtatgatgatgatatgatggaaatgagaatgattctatgtttgatatggtt

SEQ ID NO: 36578 - protein, 190 aa, Arabidopsis thaliana
  peptide (1)..(190): Ceres Seq. ID no. 12330429
  misc_feature (147)..(189): Homolog of NCBI NO: 34912580 NR Description: P0046B10.5 [Oryza sativa (japonica
  misc_feature (14)..(104): Homolog of NCBI NO: 38345578 NR Description: OSJNBa0027H06.14 [Oryza sativa (japonica
  misc_feature (17)..(190): Homolog of NCBI NO: 15226312 NR Description: hypothetical protein; protein id: At2g01580.1
  misc_feature (17)..(189): Homolog of NCBI NO: 37531676 NR Description: hypothetical protein [Oryza sativa (japonica
  misc_feature (17)..(188): Homolog of NCBI NO: 18397969 NR Description: expressed protein
  misc_feature (17)..(188): Homolog of NCBI NO: 6041846 NR Description: unknown protein [Arabidopsis thaliana]
  misc_feature (17)..(188): Homolog of NCBI NO: 15232676 NR Description: putative protein; protein id: At3g46890.1
  misc_feature (18)..(190): Homolog of NCBI NO: 34900646 NR Description: hypothetical protein~similar to Arabidopsis
  misc_feature (18)..(190): Homolog of NCBI NO: 34395171 NR Description: unknown protein [Oryza sativa (japonica
  misc_feature (16)..(190): Homolog of NCBI NO: 15239293 NR Description: putative protein
ERSSLSDWPDLPERKMTTSIHITALDGIVNVNSLFTLAVFIGLAWNPTDPDNSLVTDPNCVPTARMAENLVAFHVYSFASFLFSSLIALGLKQAMRLNIASSFHISTRIDPVVYYVNKTALRFGMVTSGLGSVCGCGFLMLALINVVQIKLGTLGCGASGHTYAAVVPLVILVPSALFIYVSLMLYAFTR

SEQ ID NO: 36579 - protein, 175 aa, Arabidopsis thaliana
  peptide (1)..(175): Ceres Seq. ID no. 12330430
  misc_feature (132)..(174): Homolog of NCBI NO: 34912580 NR Description: P0046B10.5 [Oryza sativa (japonica
  misc_feature (1)..(89): Homolog of NCBI NO: 38345578 NR Description: OSJNBa0027H06.14 [Oryza sativa (japonica
  misc_feature (2)..(175): Homolog of NCBI NO: 15226312 NR Description: hypothetical protein; protein id: At2g01580.1
  misc_feature (2)..(174): Homolog of NCBI NO: 37531676 NR Description: hypothetical protein [Oryza sativa (japonica
  misc_feature (2)..(173): Homolog of NCBI NO: 18397969 NR Description: expressed protein
  misc_feature (2)..(173): Homolog of NCBI NO: 6041846 NR Description: unknown protein [Arabidopsis thaliana]
  misc_feature (2)..(173): Homolog of NCBI NO: 15232676 NR Description: putative protein; protein id: At3g46890.1
  misc_feature (3)..(175): Homolog of NCBI NO: 34900646 NR Description: hypothetical protein~similar to Arabidopsis
  misc_feature (3)..(175): Homolog of NCBI NO: 34395171 NR Description: unknown protein [Oryza sativa (japonica
  misc_feature (1)..(175): Homolog of NCBI NO: 15239293 NR Description: putative protein
MTTSIHITALDGIVNVNSLFTLAVFIGLAWNPTDPDNSLVTDPNCVPTARMAENLVAFHVYSFASFLFSSLIALGLKQAMRLNIASSFHISTRIDPVVYYVNKTALRFGMVTSGLGSVCGCGFLMLALINVVQIKLGTLGCGASGHTYAAVVPLVILVPSALFIYVSLMLYAFTR

SEQ ID NO: 36580 - protein, 125 aa, Arabidopsis thaliana
  peptide (1)..(125): Ceres Seq. ID no. 12330431
  misc_feature (82)..(124): Homolog of NCBI NO: 34912580 NR Description: P0046B10.5 [Oryza sativa (japonica
  misc_feature (1)..(39): Homolog of NCBI NO: 38345578 NR Description: OSJNBa0027H06.14 [Oryza sativa (japonica
  misc_feature (1)..(125): Homolog of NCBI NO: 15226312 NR Description: hypothetical protein; protein id: At2g01580.1
  misc_feature (1)..(124): Homolog of NCBI NO: 37531676 NR Description: hypothetical protein [Oryza sativa (japonica
  misc_feature (1)..(123): Homolog of NCBI NO: 18397969 NR Description: expressed protein
  misc_feature (1)..(123): Homolog of NCBI NO: 6041846 NR Description: unknown protein [Arabidopsis thaliana]
  misc_feature (1)..(123): Homolog of NCBI NO: 15232676 NR Description: putative protein; protein id: At3g46890.1
  misc_feature (1)..(125): Homolog of NCBI NO: 34900646 NR Description: hypothetical protein~similar to Arabidopsis
  misc_feature (1)..(125): Homolog of NCBI NO: 34395171 NR Description: unknown protein [Oryza sativa (japonica
  misc_feature (1)..(125): Homolog of NCBI NO: 15239293 NR Description: putative protein
MAENLVAFHVYSFASFLFSSLIALGLKQAMRLNIASSFHISTRIDPVVYYVNKTALRFGMVTSGLGSVCGCGFLMLALINVVQIKLGTLGCGASGHTYAAVVPLVILVPSALFIYVSLMLYAFTR

SEQ ID NO: 36581 - DNA, 2772 bp, Arabidopsis thaliana
  misc_feature (1)..(2772): Ceres Seq. ID no. 12558639
  misc_feature: MA Experiment ID: 20000794 Result: Up-regulated in Transcription
  misc_feature: MA Experiment 20000794 PARAMETER Experiment Name: At_Petals_P Parameter: Age (day) Value: 23-25 days
  misc_feature: MA Experiment 20000794 PARAMETER Experiment Name: At_Petals_P Parameter: Plant Line Value: WS
  misc_feature: MA Experiment 20000794 PARAMETER Experiment Name: At_Petals_P Parameter: Tissue Value: Petals vs. Whole plant
ctgttgctgctgataaaaatatggctccttctacttctggtactccgatccacagatcaggctctagacctcagcttgatctaagcaaagccgaaattcaggggaacctcgaggagagagatcccaccattttattgcctaatcagtctgatgatatctctcatttggctcttgatatcggaggttctttgataaagttgttgtatttttcacgacatgaggactactctaatgatgatgataagcggaagaggacgatcaaggagagattgggtattaccaatggcaacttgagaagttatcctgttcttggtggtagacttcattttgtcaagtttgagactcacaaaattaatgagtgcttggattttattcattccaagcagcttcatcgccgagatccttatccttggagttcaaagaccttgcctttggggactggtgttatcaaggtcacaggtggcggggcatttaaatttgcagacttgttcaaggaacggctgggcgttagtattgagaaagaagatgaaatgcattgtcttgtttctggagcaaattttttgctcaaggctattcgacatgaagcctttacgcacatggagggtgagaaagaatttgtacagatagatcccaatgacttgtatccttatcttcttgtgaacgttggatctggtgttagcataatcaaggttgatggtgaaggaaagtttgaacgtgtgagtggaactaatgttggcggtggtacctattggggcttaggaagacttctaacgaagtgcaagagttttgatgaattgctagaactcagccaaaagggagataatagtgccattgacatgctcgttggtgatatttatggtggcatggattactccaagattggtctctctgcttcaacaatagcttctagttttggcaaggcgatatctgaaaataaggaactggacgattacagacctgaagatatttccttgtctctgttgcggatgatttcatacaatattgggcagatatcgtacttgaatgcccttcgctttgggttgaagcgaatattttttggaggatttttcataaggggtcatgcatataccatggatacaatttcatttgctgtacatttctggtctaagggagagatgcaagctatgttcttgagacatgaaggttttctgggtgctctaggtgcgttcatgagctatgagaagcacggattggatgatttaatgtcccatcagttggttgagaggttcccaatgggtgcaccatatactggaggaaatattcacggaccaccactcggtgatttggacgagaagatttcgtggatggagaagtttgtgcgtagaggaactgaaataactgctcctgtaccaatgactccatcaaaaacgactgggcttggagggtttgaagttccatcatccagaggtagtgctttaagatctgacgccagtgctttaaatgttggtgttctccatcttgtgcccacattggaggtgttcccattactagctgatccgaaaacgtatgagcctaacacgattgatctatcagatcaaggcgaacgagagtactggctcaaagttttgtccgagcatttgccagacctcgttgatacggctgtagcaagtgaaggaggaaccgaggatgcgaaaaggcggggtgatgcttttgctcgtgctttttctgctcatttggcaagattaatggaggagccagctgcatatggaaagctggggctggcaaatctcttggaacttagggaagaatgcttaagagaattccagtttgttgatgcctatagaagcatcaagcaaagggagaacgaggcatcacttgctgttttacctgatttacttgaggagcttgattcgatgagcgaggaggcaaggttgcttacacttatagaaggtgttcttgctgcaaacatatttgactggggatctcgagcatgtgtggatctatatcacaaaggaaccattattgaaatatacagaatgagtcgcaacaagatgcagagaccgtggagggtagacgattttgatgctttcaaagaaaggatgcttggatctggaggtaagcagcctcatcgacataaaagagcattactttttgttgataactcgggagcagatgtcattcttgggatgcttcctcttgctcgagagtttctccgtcgagggactgaagttgttctagtggcaaactctcttcctgctcttaacgacgtgaccgctatggaactgcctgatatagtcgctggggctgctaagcactgtgacatcttgaggagagcggcagaaatgggaggcttacttgtggatgcgatggtaaatccaggggatggatcaaagaaggattcaacgtcagcaccattgatggttgttgaaaatggatgtggaagtccttgtatcgacctcagacaagtcagctctgagcttgcagccgctgccaaagacgctgatcttgttgtcttggaaggtatgggaagagcacttcacaccaacttcaacgctcaattccaatgcgaggctctcaagctagcaatggttaaaaatcagagattggctgagaagttgataaaaggaaacatatatgattgtgtatgcagatacgagcctccctcgctttaacaatgttatgtatcatttcttcaacctttagactactgttgtatacagattaagcattcgtcatgtggcatatgtatttttatttagactacacttttactgtataaaattgtatttgaatgaatcaaaatcacttgct

SEQ ID NO: 36582 - protein, 876 aa, Arabidopsis thaliana
  peptide (1)..(876): Ceres Seq. ID no. 12558640
  misc_feature (40)..(397): Homolog of NCBI NO: 19424184 NR Description: pantothenate kinase 4; hypothetical protein Fang1
  misc_feature (792)..(875): Homolog of NCBI NO: 27370494 NR Description: pantothenate kinase 4 [Mus musculus]
  misc_feature (501)..(747): Homolog of NCBI NO: 27370494 NR Description: pantothenate kinase 4 [Mus musculus]
  misc_feature (40)..(397): Homolog of NCBI NO: 27370494 NR Description: pantothenate kinase 4 [Mus musculus]
  misc_feature (792)..(875): Homolog of NCBI NO: 10241706 NR Description: hypothetical protein [Homo sapiens]
  misc_feature (495)..(747): Homolog of NCBI NO: 10241706 NR Description: hypothetical protein [Homo sapiens]
  misc_feature (40)..(397): Homolog of NCBI NO: 10241706 NR Description: hypothetical protein [Homo sapiens]
  misc_feature (792)..(875): Homolog of NCBI NO: 8922665 NR Description: pantothenate kinase 4; pantothenic acid kinase
  misc_feature (495)..(747): Homolog of NCBI NO: 8922665 NR Description: pantothenate kinase 4; pantothenic acid kinase
  misc_feature (40)..(397): Homolog of NCBI NO: 8922665 NR Description: pantothenate kinase 4; pantothenic acid kinase
VAADKNMAPSTSGTPIHRSGSRPQLDLSKAEIQGNLEERDPTILLPNQSDDISHLALDIGGSLIKLLYFSRHEDYSNDDDKRKRTIKERLGITNGNLRSYPVLGGRLHFVKFETHKINECLDFIHSKQLHRRDPYPWSSKTLPLGTGVIKVTGGGAFKFADLFKERLGVSIEKEDEMHCLVSGANFLLKAIRHEAFTHMEGEKEFVQIDPNDLYPYLLVNVGSGVSIIKVDGEGKFERVSGTNVGGGTYWGLGRLLTKCKSFDELLELSQKGDNSAIDMLVGDIYGGMDYSKIGLSASTIASSFGKAISENKELDDYRPEDISLSLLRMISYNIGQISYLNALRFGLKRIFFGGFFIRGHAYTMDTISFAVHFWSKGEMQAMFLRHEGFLGALGAFMSYEKHGLDDLMSHQLVERFPMGAPYTGGNIHGPPLGDLDEKISWMEKFVRRGTEITAPVPMTPSKTTGLGGFEVPSSRGSALRSDASALNVGVLHLVPTLEVFPLLADPKTYEPNTIDLSDQGEREYWLKVLSEHLPDLVDTAVASEGGTEDAKRRGDAFARAFSAHLARLMEEPAAYGKLGLANLLELREECLREFQFVDAYRSIKQRENEASLAVLPDLLEELDSMSEEARLLTLIEGVLAANIFDWGSRACVDLYHKGTIIEIYRMSRNKMQRPWRVDDFDAFKERMLGSGGKQPHRHKRALLFVDNSGADVILGMLPLAREFLRRGTEVVLVANSLPALNDVTAMELPDIVAGAAKHCDILRRAAEMGGLLVDAMVNPGDGSKKDSTSAPLMVVENGCGSPCIDLRQVSSELAAAAKDADLVVLEGMGRALHTNFNAQFQCEALKLAMVKNQRLAEKLIKGNIYDCVCRYEPPSL

SEQ ID NO: 36583 - protein, 870 aa, Arabidopsis thaliana
  peptide (1)..(870): Ceres Seq. ID no. 12558641
  misc_feature (34)..(391): Homolog of NCBI NO: 19424184 NR Description: pantothenate kinase 4; hypothetical protein Fang1
  misc_feature (786)..(869): Homolog of NCBI NO: 27370494 NR Description: pantothenate kinase 4 [Mus musculus]
  misc_feature (495)..(741): Homolog of NCBI NO: 27370494 NR Description: pantothenate kinase 4 [Mus musculus]
  misc_feature (34)..(391): Homolog of NCBI NO: 27370494 NR Description: pantothenate kinase 4 [Mus musculus]
  misc_feature (786)..(869): Homolog of NCBI NO: 10241706 NR Description: hypothetical protein [Homo sapiens]
  misc_feature (489)..(741): Homolog of NCBI NO: 10241706 NR Description: hypothetical protein [Homo sapiens]
  misc_feature (34)..(391): Homolog of NCBI NO: 10241706 NR Description: hypothetical protein [Homo sapiens]
  misc_feature (786)..(869): Homolog of NCBI NO: 8922665 NR Description: pantothenate kinase 4; pantothenic acid kinase
  misc_feature (489)..(741): Homolog of NCBI NO: 8922665 NR Description: pantothenate kinase 4; pantothenic acid kinase
  misc_feature (34)..(391): Homolog of NCBI NO: 8922665 NR Description: pantothenate kinase 4; pantothenic acid kinase
MAPSTSGTPIHRSGSRPQLDLSKAEIQGNLEERDPTILLPNQSDDISHLALDIGGSLIKLLYFSRHEDYSNDDDKRKRTIKERLGITNGNLRSYPVLGGRLHFVKFETHKINECLDFIHSKQLHRRDPYPWSSKTLPLGTGVIKVTGGGAFKFADLFKERLGVSIEKEDEMHCLVSGANFLLKAIRHEAFTHMEGEKEFVQIDPNDLYPYLLVNVGSGVSIIKVDGEGKFERVSGTNVGGGTYWGLGRLLTKCKSFDELLELSQKGDNSAIDMLVGDIYGGMDYSKIGLSASTIASSFGKAISENKELDDYRPEDISLSLLRMISYNIGQISYLNALRFGLKRIFFGGFFIRGHAYTMDTISFAVHFWSKGEMQAMFLRHEGFLGALGAFMSYEKHGLDDLMSHQLVERFPMGAPYTGGNIHGPPLGDLDEKISWMEKFVRRGTEITAPVPMTPSKTTGLGGFEVPSSRGSALRSDASALNVGVLHLVPTLEVFPLLADPKTYEPNTIDLSDQGEREYWLKVLSEHLPDLVDTAVASEGGTEDAKRRGDAFARAFSAHLARLMEEPAAYGKLGLANLLELREECLREFQFVDAYRSIKQRENEASLAVLPDLLEELDSMSEEARLLTLIEGVLAANIFDWGSRACVDLYHKGTIIEIYRMSRNKMQRPWRVDDFDAFKERMLGSGGKQPHRHKRALLFVDNSGADVILGMLPLAREFLRRGTEVVLVANSLPALNDVTAMELPDIVAGAAKHCDILRRAAEMGGLLVDAMVNPGDGSKKDSTSAPLMVVENGCGSPCIDLRQVSSELAAAAKDADLVVLEGMGRALHTNFNAQFQCEALKLAMVKNQRLAEKLIKGNIYDCVCRYEPPSL

SEQ ID NO: 36584 - protein, 700 aa, Arabidopsis thaliana
  peptide (1)..(700): Ceres Seq. ID no. 12558642
  misc_feature (1)..(221): Homolog of NCBI NO: 19424184 NR Description: pantothenate kinase 4; hypothetical protein Fang1
  misc_feature (616)..(699): Homolog of NCBI NO: 27370494 NR Description: pantothenate kinase 4 [Mus musculus]
  misc_feature (325)..(571): Homolog of NCBI NO: 27370494 NR Description: pantothenate kinase 4 [Mus musculus]
  misc_feature (1)..(221): Homolog of NCBI NO: 27370494 NR Description: pantothenate kinase 4 [Mus musculus]
  misc_feature (616)..(699): Homolog of NCBI NO: 10241706 NR Description: hypothetical protein [Homo sapiens]
  misc_feature (319)..(571): Homolog of NCBI NO: 10241706 NR Description: hypothetical protein [Homo sapiens]
  misc_feature (1)..(221): Homolog of NCBI NO: 10241706 NR Description: hypothetical protein [Homo sapiens]
  misc_feature (616)..(699): Homolog of NCBI NO: 8922665 NR Description: pantothenate kinase 4; pantothenic acid kinase
  misc_feature (319)..(571): Homolog of NCBI NO: 8922665 NR Description: pantothenate kinase 4; pantothenic acid kinase
  misc_feature (1)..(221): Homolog of NCBI NO: 8922665 NR Description: pantothenate kinase 4; pantothenic acid kinase
MHCLVSGANFLLKAIRHEAFTHMEGEKEFVQIDPNDLYPYLLVNVGSGVSIIKVDGEGKFERVSGTNVGGGTYWGLGRLLTKCKSFDELLELSQKGDNSAIDMLVGDIYGGMDYSKIGLSASTIASSFGKAISENKELDDYRPEDISLSLLRMISYNIGQISYLNALRFGLKRIFFGGFFIRGHAYTMDTISFAVHFWSKGEMQAMFLRHEGFLGALGAFMSYEKHGLDDLMSHQLVERFPMGAPYTGGNIHGPPLGDLDEKISWMEKFVRRGTEITAPVPMTPSKTTGLGGFEVPSSRGSALRSDASALNVGVLHLVPTLEVFPLLADPKTYEPNTIDLSDQGEREYWLKVLSEHLPDLVDTAVASEGGTEDAKRRGDAFARAFSAHLARLMEEPAAYGKLGLANLLELREECLREFQFVDAYRSIKQRENEASLAVLPDLLEELDSMSEEARLLTLIEGVLAANIFDWGSRACVDLYHKGTIIEIYRMSRNKMQRPWRVDDFDAFKERMLGSGGKQPHRHKRALLFVDNSGADVILGMLPLAREFLRRGTEVVLVANSLPALNDVTAMELPDIVAGAAKHCDILRRAAEMGGLLVDAMVNPGDGSKKDSTSAPLMVVENGCGSPCIDLRQVSSELAAAAKDADLVVLEGMGRALHTNFNAQFQCEALKLAMVKNQRLAEKLIKGNIYDCVCRYEPPSL

SEQ ID NO: 36585 - DNA, 796 bp, Arabidopsis thaliana
  misc_feature (1)..(796): Ceres Seq. ID no. 13499549
  misc_feature: MA Experiment ID: 108434 Result: Down-regulated in Transcription
  misc_feature: MA Experiment 108434 PARAMETER Experiment Name: At_Root_Tips_cDNA_P Parameter: Tissue Value: Root Tips
  misc_feature: MA Experiment ID: 108573 Result: Up-regulated in Transcription
  misc_feature: MA Experiment 108573 PARAMETER Experiment Name: At_Drought_cDNA_P Parameter: Timepoint (hr) Value: 6
  misc_feature: MA Experiment 108573 PARAMETER Experiment Name: At_Drought_cDNA_P Parameter: Tissue Value: Aerial
  misc_feature: MA Experiment 108573 PARAMETER Experiment Name: At_Drought_cDNA_P Parameter: Treatment Value: Drought vs. No Drought
  misc_feature: MA Experiment ID: 108595 Result: Down-regulated in Transcription
  misc_feature: MA Experiment 108595 PARAMETER Experiment Name: At_Ler-pi_Ovule_cDNA_P Parameter: Plant Line Value: null
  misc_feature: MA Experiment ID: 20000112 Result: Down-regulated in Transcription
  misc_feature: MA Experiment 20000112 PARAMETER Experiment Name: At_42deg_Heat_cDNA_P Parameter: Temperature (deg C) Value: 42 vs. 22
  misc_feature: MA Experiment 20000112 PARAMETER Experiment Name: At_42deg_Heat_cDNA_P Parameter: Timepoint (hr) Value: 2
  misc_feature: MA Experiment 20000112 PARAMETER Experiment Name: At_42deg_Heat_cDNA_P Parameter: Tissue Value: Aerial
  misc_feature: MA Experiment ID: 20000113 Result: Down-regulated in Transcription
  misc_feature: MA Experiment 20000113 PARAMETER Experiment Name: At_42deg_Heat_cDNA_P Parameter: Temperature (deg C) Value: 42 vs. 22
  misc_feature: MA Experiment 20000113 PARAMETER Experiment Name: At_42deg_Heat_cDNA_P Parameter: Timepoint (hr) Value: 8
  misc_feature: MA Experiment 20000113 PARAMETER Experiment Name: At_42deg_Heat_cDNA_P Parameter: Tissue Value: Aerial
  misc_feature: MA Experiment ID: 20000227 Result: Down-regulated in Transcription
  misc_feature: MA Experiment 20000227 PARAMETER Experiment Name: At_Root-Tips-vs-Tops_P Parameter: Tissue Value: Root Tips vs. Root Tops
aatgattaatgtctgaaaaatttgatatttgaagcgaatcaacaacaacagtcgggttcgtgaaaaaaaaagatttgatcggctaaacttggtcggacttgtcaatggcagacgtacctggatacctgcgcacttgtttggatatggggaagatagctttcttagcaatccttgtatctacagggattgtgttgcagattctggcttgtgctctgttcaataactggtggccaatgctaagtgttataatgtatgtgctcctcccaatgcctttgctcttctttggtggatcagacagtacatctctattcaacgagtcagataatagttggatcaatgcagccaagttcttgactggtgcgtcagcagttggaagcgtcgcgataccatcgattctaaaacacgccggactcatcggttggggcgcattagcccttgatctctcatcctaccttgtcttcctcgtggctattttgggttacatttgcataggagatgccagtgagaactattacagctacatttaaaaagacacacacaaattcatcatcatttgtttaaacctcaacaaagtctcagccttttatcacttccccgttcgattgatgcttcgaaacgaaaacatcttgtttctatggaatgactcgctgattggattttcacaagtttaagagtttgtgtgtcaagtgtatgtatgaatgattttttttttgggtggttttgttacgttttgatgtatagaacatatttattatttggtggaatatatataaattttctttacaaaagcatattg

SEQ ID NO: 36586 - protein, 140 aa, Arabidopsis thaliana
  peptide (1)..(140): Ceres Seq. ID no. 13499550
  misc_feature (17)..(126): Homolog of NCBI NO: 38103616 NR Description: hypothetical protein MG04054.4 [Magnaporthe
  misc_feature (13)..(124): Homolog of NCBI NO: 19113819 NR Description: Protein with similarity to Drosophila yakuba NADH
  misc_feature (16)..(105): Homolog of NCBI NO: 6322504 NR Description: Vacuolar Protein Sorting; Vps55p [Saccharomyces
  misc_feature (55)..(124): Homolog of NCBI NO: 34905898 NR Description: P0458E05.25 [Oryza sativa (japonica
  misc_feature (23)..(124): Homolog of NCBI NO: 18399269 NR Description: expressed protein [Arabidopsis thaliana]
  misc_feature (17)..(124): Homolog of NCBI NO: 16648828 NR Description: AT3g11530/F24K9_21 [Arabidopsis thaliana]
  misc_feature (17)..(124): Homolog of NCBI NO: 12322900 NR Description: unknown protein; 72859-71336 [Arabidopsis
  misc_feature (1)..(139): Homolog of NCBI NO: 25518386 NR Description: hypothetical protein F5D14.18 - Arabidopsis
  misc_feature (1)..(140): Homolog of NCBI NO: 18398420 NR Description: expressed protein [Arabidopsis thaliana]
  misc_feature (1)..(140): Homolog of NCBI NO: 21554354 NR Description: unknown [Arabidopsis thaliana]
MADVPGYLRTCLDMGKIAFLAILVSTGIVLQILACALFNNWWPMLSVIMYVLLPMPLLFFGGSDSTSLFNESDNSWINAAKFLTGASAVGSVAIPSILKHAGLIGWGALALDLSSYLVFLVAILGYICIGDASENYYSYI

SEQ ID NO: 36587 - protein, 127 aa, Arabidopsis thaliana
  peptide (1)..(127): Ceres Seq. ID no. 13499551
  misc_feature (4)..(113): Homolog of NCBI NO: 38103616 NR Description: hypothetical protein MG04054.4 [Magnaporthe
  misc_feature (1)..(111): Homolog of NCBI NO: 19113819 NR Description: Protein with similarity to Drosophila yakuba NADH
  misc_feature (3)..(92): Homolog of NCBI NO: 6322504 NR Description: Vacuolar Protein Sorting; Vps55p [Saccharomyces
  misc_feature (42)..(111): Homolog of NCBI NO: 34905898 NR Description: P0458E05.25 [Oryza sativa (japonica
  misc_feature (10)..(111): Homolog of NCBI NO: 18399269 NR Description: expressed protein [Arabidopsis thaliana]
  misc_feature (4)..(111): Homolog of NCBI NO: 16648828 NR Description: AT3g11530/F24K9_21 [Arabidopsis thaliana]
  misc_feature (4)..(111): Homolog of NCBI NO: 12322900 NR Description: unknown protein; 72859-71336 [Arabidopsis
  misc_feature (1)..(126): Homolog of NCBI NO: 25518386 NR Description: hypothetical protein F5D14.18 - Arabidopsis
  misc_feature (1)..(127): Homolog of NCBI NO: 18398420 NR Description: expressed protein [Arabidopsis thaliana]
  misc_feature (1)..(127): Homolog of NCBI NO: 21554354 NR Description: unknown [Arabidopsis thaliana]
MGKIAFLAILVSTGIVLQILACALFNNWWPMLSVIMYVLLPMPLLFFGGSDSTSLFNESDNSWINAAKFLTGASAVGSVAIPSILKHAGLIGWGALALDLSSYLVFLVAILGYICIGDASENYYSYI

SEQ ID NO: 36588 - protein, 97 aa, Arabidopsis thaliana
  peptide (1)..(97): Ceres Seq. ID no. 13499552
  misc_feature (1)..(83): Homolog of NCBI NO: 38103616 NR Description: hypothetical protein MG04054.4 [Magnaporthe
  misc_feature (1)..(81): Homolog of NCBI NO: 19113819 NR Description: Protein with similarity to Drosophila yakuba NADH
  misc_feature (1)..(62): Homolog of NCBI NO: 6322504 NR Description: Vacuolar Protein Sorting; Vps55p [Saccharomyces
  misc_feature (12)..(81): Homolog of NCBI NO: 34905898 NR Description: P0458E05.25 [Oryza sativa (japonica
  misc_feature (1)..(81): Homolog of NCBI NO: 18399269 NR Description: expressed protein [Arabidopsis thaliana]
  misc_feature (1)..(81): Homolog of NCBI NO: 16648828 NR Description: AT3g11530/F24K9_21 [Arabidopsis thaliana]
  misc_feature (1)..(81): Homolog of NCBI NO: 12322900 NR Description: unknown protein; 72859-71336 [Arabidopsis
  misc_feature (1)..(96): Homolog of NCBI NO: 25518386 NR Description: hypothetical protein F5D14.18 - Arabidopsis
  misc_feature (1)..(97): Homolog of NCBI NO: 18398420 NR Description: expressed protein [Arabidopsis thaliana]
  misc_feature (1)..(97): Homolog of NCBI NO: 21554354 NR Description: unknown [Arabidopsis thaliana]
MLSVIMYVLLPMPLLFFGGSDSTSLFNESDNSWINAAKFLTGASAVGSVAIPSILKHAGLIGWGALALDLSSYLVFLVAILGYICIGDASENYYSYI

SEQ ID NO: 36589 - DNA, 853 bp, Arabidopsis thaliana
  misc_feature (1)..(853): Ceres Seq. ID no. 12393853
  misc_feature: MA Experiment ID: 108579 Result: Down-regulated in Transcription
  misc_feature: MA Experiment 108579 PARAMETER Experiment Name: At_4deg_Cold_cDNA_P Parameter: Temperature (deg C) Value: 4 vs. 22
  misc_feature: MA Experiment 108579 PARAMETER Experiment Name: At_4deg_Cold_cDNA_P Parameter: Timepoint (hr) Value: 6
  misc_feature: MA Experiment 108579 PARAMETER Experiment Name: At_4deg_Cold_cDNA_P Parameter: Tissue Value: Aerial
  misc_feature: MA Experiment ID: 20001451 Result: Up-regulated in Transcription
  misc_feature: MA Experiment 20001451 PARAMETER Experiment Name: At_Far-red-induction_P Parameter: Age (day) Value: 7
  misc_feature: MA Experiment 20001451 PARAMETER Experiment Name: At_Far-red-induction_P Parameter: Light Value: Far-red vs. White
  misc_feature: MA Experiment 20001451 PARAMETER Experiment Name: At_Far-red-induction_P Parameter: Organism Value: A. thaliana
  misc_feature: MA Experiment 20001451 PARAMETER Experiment Name: At_Far-red-induction_P Parameter: Plant Line Value: Columbia
  misc_feature: MA Experiment 20001451 PARAMETER Experiment Name: At_Far-red-induction_P Parameter: Timepoint (hr) Value: 24
  misc_feature: MA Experiment 20001451 PARAMETER Experiment Name: At_Far-red-induction_P Parameter: Tissue Value: Whole Plant
atgaaagttgttgtttttaggtacaattcattctattcaaaacaattttgacgtctctcaatcccattttagatacaattgattctatttcaggttttggggttatttctcaaatcgattcctgtcaccaaaatcaaaatctgaaagcaaatggttgatgaggatcacttggaagattttgtctgtgtttgactatggagttgcacataaatggttagggatcagaggaataagttgactcaggaagtttcttctgctttcagcggcaagctcaacatccttgctatatattctgcttcaaaacatgctcttcatggctacttccacagcttgcgttctgagttctgtcagaagggaatcaaggttaccgtcgtttgtcctggtccaatagaaacctggaatggtacaggaacatcaacttcggaagacagcaagtctcctgagaaacgtgtgtcatctgaacgatgtgcagagctgactataatcgctgcatctcataacttgaaggaagcttggatttcatatcagccagtactactcgtgatgtatctagtgcagtacatgccttcccttggcttctggctcatggacaaggttggaggaaagcgtgtggaggtcgcggaaaagaaaggcaacacatactcgtgggatttactgttcgggaagaagactaaaacaaactgaagctgattctctagaagatacacatagatgtggttggttgagccttagtccgtagatgtggttggtgtttgtttgctagtttgattgttaaataactaccaaagcgtcgaaaaatgttttgttgccttgtgaggtgctcaataagtaagaaaagatgtgatcttctgtg

SEQ ID NO: 36590 - protein, 157 aa, Arabidopsis thaliana
  peptide (1)..(157): Ceres Seq. ID no. 12393854
  misc_feature (27)..(136): Homolog of NCBI NO: 20856701 NR Description: similar to CGI-86 protein [Homo sapiens] [Mus
  misc_feature (1)..(135): Homolog of NCBI NO: 34395851 NR Description: Retinal short-chain dehydrogenase/reductase 4
  misc_feature (1)..(135): Homolog of NCBI NO: 21313492 NR Description: RIKEN cDNA 2310016E22 [Mus musculus]
  misc_feature (13)..(78): Homolog of NCBI NO: 22330816 NR Description: unknown protein; protein id: At3g03350.1
  misc_feature (1)..(135): Homolog of NCBI NO: 34865424 NR Description: similar to retinal short-chain
  misc_feature (1)..(135): Homolog of NCBI NO: 7706318 NR Description: CGI-86 protein [Homo sapiens]
  misc_feature (1)..(135): Homolog of NCBI NO: 6318548 NR Description: retinal short-chain dehydrogenase/reductase
  misc_feature (13)..(78): Homolog of NCBI NO: 6017123 NR Description: unknown protein [Arabidopsis thaliana]
  misc_feature (78)..(157): Homolog of NCBI NO: 6017123 NR Description: unknown protein [Arabidopsis thaliana]
  misc_feature (13)..(157): Homolog of NCBI NO: 30678824 NR Description: short-chain dehydrogenase/reductase family
MVRDQRNKLTQEVSSAFSGKLNILAIYSASKHALHGYFHSLRSEFCQKGIKVTVVCPGPIETWNGTGTSTSEDSKSPEKRVSSERCAELTIIAASHNLKEAWISYQPVLLVMYLVQYMPSLGFWLMDKVGGKRVEVAEKKGNTYSWDLLFGKKTKTN

SEQ ID NO: 36591 - DNA, 619 bp, Arabidopsis thaliana
  misc_feature (1)..(619): Ceres Seq. ID no. 12394008
  misc_feature: MA Experiment ID: 20000069 Result: Down-regulated in Transcription
  misc_feature: MA Experiment 20000069 PARAMETER Experiment Name: At_100uM_ABA_Mutants_cDNA_P Parameter: Plant Line Value: CS23
  misc_feature: MA Experiment 20000069 PARAMETER Experiment Name: At_100uM_ABA_Mutants_cDNA_P Parameter: Timepoint (hr) Value: 6
  misc_feature: MA Experiment 20000069 PARAMETER Experiment Name: At_100uM_ABA_Mutants_cDNA_P Parameter: Tissue Value: Aerial
  misc_feature: MA Experiment 20000069 PARAMETER Experiment Name: At_100uM_ABA_Mutants_cDNA_P Parameter: Treatment Value: 100uM ABA vs. No Treatment
  misc_feature: MA Experiment ID: 20000070 Result: Down-regulated in Transcription
  misc_feature: MA Experiment 20000070 PARAMETER Experiment Name: At_100uM_ABA_Mutants_cDNA_P Parameter: Plant Line Value: CS24
  misc_feature: MA Experiment 20000070 PARAMETER Experiment Name: At_100uM_ABA_Mutants_cDNA_P Parameter: Timepoint (hr) Value: 6
  misc_feature: MA Experiment 20000070 PARAMETER Experiment Name: At_100uM_ABA_Mutants_cDNA_P Parameter: Tissue Value: Aerial
  misc_feature: MA Experiment 20000070 PARAMETER Experiment Name: At_100uM_ABA_Mutants_cDNA_P Parameter: Treatment Value: 100uM ABA vs. No Treatment
  misc_feature: MA Experiment ID: 20000071 Result: Down-regulated in Transcription
  misc_feature: MA Experiment 20000071 PARAMETER Experiment Name: At_100uM_ABA_Mutants_cDNA_P Parameter: Plant Line Value: CS8104
  misc_feature: MA Experiment 20000071 PARAMETER Experiment Name: At_100uM_ABA_Mutants_cDNA_P Parameter: Timepoint (hr) Value: 6
  misc_feature: MA Experiment 20000071 PARAMETER Experiment Name: At_100uM_ABA_Mutants_cDNA_P Parameter: Tissue Value: Aerial
  misc_feature: MA Experiment 20000071 PARAMETER Experiment Name: At_100uM_ABA_Mutants_cDNA_P Parameter: Treatment Value: 100uM ABA vs. No Treatment
  misc_feature: MA Experiment ID: 20000086 Result: Down-regulated in Transcription
  misc_feature: MA Experiment 20000086 PARAMETER Experiment Name: At_100uM_ABA_Mutants_cDNA_P Parameter: Plant Line Value: CS22
  misc_feature: MA Experiment 20000086 PARAMETER Experiment Name: At_100uM_ABA_Mutants_cDNA_P Parameter: Timepoint (hr) Value: 6
  misc_feature: MA Experiment 20000086 PARAMETER Experiment Name: At_100uM_ABA_Mutants_cDNA_P Parameter: Tissue Value: Aerial
  misc_feature: MA Experiment 20000086 PARAMETER Experiment Name: At_100uM_ABA_Mutants_cDNA_P Parameter: Treatment Value: 100uM ABA vs. No Treatment
  misc_feature: MA Experiment ID: 20000087 Result: Down-regulated in Transcription
  misc_feature: MA Experiment 20000087 PARAMETER Experiment Name: At_100uM_ABA_Mutants_cDNA_P Parameter: Plant Line Value: WS
  misc_feature: MA Experiment 20000087 PARAMETER Experiment Name: At_100uM_ABA_Mutants_cDNA_P Parameter: Timepoint (hr) Value: 6
  misc_feature: MA Experiment 20000087 PARAMETER Experiment Name: At_100uM_ABA_Mutants_cDNA_P Parameter: Tissue Value: Aerial
  misc_feature: MA Experiment 20000087 PARAMETER Experiment Name: At_100uM_ABA_Mutants_cDNA_P Parameter: Treatment Value: 100uM ABA vs. No Treatment
  misc_feature: MA Experiment ID: 20000117 Result: Down-regulated in Transcription
  misc_feature: MA Experiment 20000117 PARAMETER Experiment Name: At_100uM_ABA_Mutants_cDNA_P Parameter: Plant Line Value: Columbia
  misc_feature: MA Experiment 20000117 PARAMETER Experiment Name: At_100uM_ABA_Mutants_cDNA_P Parameter: Timepoint (hr) Value: 6
  misc_feature: MA Experiment 20000117 PARAMETER Experiment Name: At_100uM_ABA_Mutants_cDNA_P Parameter: Tissue Value: Aerial
  misc_feature: MA Experiment 20000117 PARAMETER Experiment Name: At_100uM_ABA_Mutants_cDNA_P Parameter: Treatment Value: 100uM ABA vs. No Treatment
  misc_feature: MA Experiment ID: 20000185 Result: Down-regulated in Transcription
  misc_feature: MA Experiment 20000185 PARAMETER Experiment Name: At_Roots__P Parameter: Age (day) Value: 7 vs. 21
  misc_feature: MA Experiment 20000185 PARAMETER Experiment Name: At_Roots__P Parameter: Organism Value: A. thaliana
  misc_feature: MA Experiment 20000185 PARAMETER Experiment Name: At_Roots__P Parameter: Tissue Value: Roots vs. Whole Plant
  misc_feature: MA Experiment ID: 20000227 Result: Down-regulated in Transcription
  misc_feature: MA Experiment 20000227 PARAMETER Experiment Name: At_Root-Tips-vs-Tops_P Parameter: Tissue Value: Root Tips vs. Root Tops
  misc_feature: MA Experiment ID: 20000439 Result: Down-regulated in Transcription
  misc_feature: MA Experiment 20000439 PARAMETER Experiment Name: At_Roots__P Parameter: Age (day) Value: 14 vs. 21
  misc_feature: MA Experiment 20000439 PARAMETER Experiment Name: At_Roots__P Parameter: Organism Value: A. thaliana
  misc_feature: MA Experiment 20000439 PARAMETER Experiment Name: At_Roots__P Parameter: Tissue Value: Roots vs. Whole Plant
  misc_feature: MA Experiment ID: 20001557 Result: Down-regulated in Transcription
  misc_feature: MA Experiment 20001557 PARAMETER Experiment Name: At_Drought_Soil_Dry_P Parameter: Age (day) Value: 27
  misc_feature: MA Experiment 20001557 PARAMETER Experiment Name: At_Drought_Soil_Dry_P Parameter: Organism Value: A. thaliana
  misc_feature: MA Experiment 20001557 PARAMETER Experiment Name: At_Drought_Soil_Dry_P Parameter: Plant Line Value: WS
  misc_feature: MA Experiment 20001557 PARAMETER Experiment Name: At_Drought_Soil_Dry_P Parameter: Post Timepoint (hr) Value: 3
  misc_feature: MA Experiment 20001557 PARAMETER Experiment Name: At_Drought_Soil_Dry_P Parameter: Post-Treatment Value: Re-Water vs. No Drought
  misc_feature: MA Experiment 20001557 PARAMETER Experiment Name: At_Drought_Soil_Dry_P Parameter: Timepoint (day) Value: 13
  misc_feature: MA Experiment 20001557 PARAMETER Experiment Name: At_Drought_Soil_Dry_P Parameter: Treatment Value: Drought vs. No Drought
  misc_feature: MA Experiment ID: 20001757 Result: Up-regulated in Transcription
  misc_feature: MA Experiment 20001757 PARAMETER Experiment Name: At_50mM_NH4NO3_L-to-H_P Parameter: Timepoint (hr) Value: 6
  misc_feature: MA Experiment 20001757 PARAMETER Experiment Name: At_50mM_NH4NO3_L-to-H_P Parameter: Tissue Value: Leaf
  misc_feature: MA Experiment 20001757 PARAMETER Experiment Name: At_50mM_NH4NO3_L-to-H_P Parameter: Treatment Value: 50mM NH4NO3 vs 100mM Mannitol
  misc_feature: MA Experiment ID: 20001908 Result: Down-regulated in Transcription
  misc_feature: MA Experiment 20001908 PARAMETER Experiment Name: At_Drought_Reproduction_P Parameter: Age (day) Value: 40
  misc_feature: MA Experiment 20001908 PARAMETER Experiment Name: At_Drought_Reproduction_P Parameter: Organism Value: A. thaliana
  misc_feature: MA Experiment 20001908 PARAMETER Experiment Name: At_Drought_Reproduction_P Parameter: Plant Line Value: WS
  misc_feature: MA Experiment 20001908 PARAMETER Experiment Name: At_Drought_Reproduction_P Parameter: Timepoint (day) Value: 10
  misc_feature: MA Experiment 20001908 PARAMETER Experiment Name: At_Drought_Reproduction_P Parameter: Tissue Value: Siliques
  misc_feature: MA Experiment 20001908 PARAMETER Experiment Name: At_Drought_Reproduction_P Parameter: Treatment Value: Drought vs. No Drought
  misc_feature: MA Experiment ID: 20001911 Result: Down-regulated in Transcription
  misc_feature: MA Experiment 20001911 PARAMETER Experiment Name: At_Drought_Reproduction_P Parameter: Age (day) Value: 40
  misc_feature: MA Experiment 20001911 PARAMETER Experiment Name: At_Drought_Reproduction_P Parameter: Organism Value: A. thaliana
  misc_feature: MA Experiment 20001911 PARAMETER Experiment Name: At_Drought_Reproduction_P Parameter: Plant Line Value: WS
  misc_feature: MA Experiment 20001911 PARAMETER Experiment Name: At_Drought_Reproduction_P Parameter: Timepoint (day) Value: 10
  misc_feature: MA Experiment 20001911 PARAMETER Experiment Name: At_Drought_Reproduction_P Parameter: Tissue Value: Flowers
  misc_feature: MA Experiment 20001911 PARAMETER Experiment Name: At_Drought_Reproduction_P Parameter: Treatment Value: Drought vs. No Drought
ccgcgcaggaaatgttcagccctatcagtttgttctaccgccgaattggaaacagttgcgaatagccaatattttgtcaggtaattactgtcaaccgaaatgtgcagagccatggatcgaagtgaagtttgagaacgagaagcaaggcaaggttcaagtagttgcatctcctttaatccgcttaaccaacaaaccaaatgcaactattgaagatctcggtgagcctgagaaagtgattgcttctcttggtccttttgtcaccggaaactcttatgactctgatgaacttttgaagacttcaatcgaaaaaattggagatcaaacgtactataagtatgtgttggagacgccatttgcgctcacgggaagtcacaatcttgcaaaagcgacagcaaagggaagcacggttgttttgtttgttgtaagtgctactgaaaagcaatggcagagctcacagaagactcttgaagccattcttgattcttttcaactgtaaatcagagtttttgttatgactctggacttgagaaactaaagagcaaacagtttatgctaaggggtgtctgtgcgtagtaacattaactcattcttttctactgtaaattcgagctatgactcg

SEQ ID NO: 36592 - protein, 164 aa, Arabidopsis thaliana
  peptide (1)..(164): Ceres Seq. ID no. 12394009
  misc_feature (7)..(164): Homolog of NCBI NO: 30699237 NR Description: thylakoid lumenal 29.8 kDa protein [Arabidopsis
  misc_feature (7)..(164): Homolog of NCBI NO: 8928455 NR Description: Thylakoid lumenal 29.8 kDa protein, chloroplast
  misc_feature (129)..(164): Homolog of NCBI NO: 34909044 NR Description: P0034E02.35 [Oryza sativa (japonica
  misc_feature (1)..(108): Homolog of NCBI NO: 34909044 NR Description: P0034E02.35 [Oryza sativa (japonica
  misc_feature (1)..(164): Homolog of NCBI NO: 15228983 NR Description: thylakoid lumenal 20 kDa protein; protein id:
RAGNVQPYQFVLPPNWKQLRIANILSGNYCQPKCAEPWIEVKFENEKQGKVQVVASPLIRLTNKPNATIEDLGEPEKVIASLGPFVTGNSYDSDELLKTSIEKIGDQTYYKYVLETPFALTGSHNLAKATAKGSTVVLFVVSATEKQWQSSQKTLEAILDSFQL

SEQ ID NO: 36593 - DNA, 1023 bp, Arabidopsis thaliana
  misc_feature (1)..(1023): Ceres Seq. ID no. 12394000
  misc_feature: MA Experiment ID: 108435 Result: Down-regulated in Transcription
  misc_feature: MA Experiment 108435 PARAMETER Experiment Name: At_stm_Mutants_cDNA_P Parameter: Plant Line Value: wt Landsburg vs stm
  misc_feature: MA Experiment 108435 PARAMETER Experiment Name: At_stm_Mutants_cDNA_P Parameter: Tissue Value: Shoot Apical Meristem Region
  misc_feature: MA Experiment ID: 108461 Result: Up-regulated in Transcription
  misc_feature: MA Experiment 108461 PARAMETER Experiment Name: At_Germinating_Seeds_cDNA_P Parameter: Age (day) Value: 1 vs. 0
  misc_feature: MA Experiment 108461 PARAMETER Experiment Name: At_Germinating_Seeds_cDNA_P Parameter: Tissue Value: Germinating Seeds
  misc_feature: MA Experiment ID: 108462 Result: Up-regulated in Transcription
  misc_feature: MA Experiment 108462 PARAMETER Experiment Name: At_Germinating_Seeds_cDNA_P Parameter: Age (day) Value: 2 vs. 0
  misc_feature: MA Experiment 108462 PARAMETER Experiment Name: At_Germinating_Seeds_cDNA_P Parameter: Tissue Value: Germinating Seeds
  misc_feature: MA Experiment ID: 108463 Result: Up-regulated in Transcription
  misc_feature: MA Experiment 108463 PARAMETER Experiment Name: At_Germinating_Seeds_cDNA_P Parameter: Age (day) Value: 3 vs. 0
  misc_feature: MA Experiment 108463 PARAMETER Experiment Name: At_Germinating_Seeds_cDNA_P Parameter: Tissue Value: Germinating Seeds
  misc_feature: MA Experiment ID: 108464 Result: Up-regulated in Transcription
  misc_feature: MA Experiment 108464 PARAMETER Experiment Name: At_Germinating_Seeds_cDNA_P Parameter: Age (day) Value: 4 vs. 0
  misc_feature: MA Experiment 108464 PARAMETER Experiment Name: At_Germinating_Seeds_cDNA_P Parameter: Tissue Value: Germinating Seeds
  misc_feature: MA Experiment ID: 108469 Result: Down-regulated in Transcription
  misc_feature: MA Experiment ID: 108579 Result: Up-regulated in Transcription
  misc_feature: MA Experiment 108579 PARAMETER Experiment Name: At_4deg_Cold_cDNA_P Parameter: Temperature (deg C) Value: 4 vs. 22
  misc_feature: MA Experiment 108579 PARAMETER Experiment Name: At_4deg_Cold_cDNA_P Parameter: Timepoint (hr) Value: 6
  misc_feature: MA Experiment 108579 PARAMETER Experiment Name: At_4deg_Cold_cDNA_P Parameter: Tissue Value: Aerial
  misc_feature: MA Experiment ID: 108595 Result: Down-regulated in Transcription
  misc_feature: MA Experiment 108595 PARAMETER Experiment Name: At_Ler-pi_Ovule_cDNA_P Parameter: Plant Line Value: null
  misc_feature: MA Experiment ID: 108668 Result: Down-regulated in Transcription
  misc_feature: MA Experiment 108668 PARAMETER Experiment Name: At_2mM_SA_cDNA_P Parameter: Plant Line Value: WS
  misc_feature: MA Experiment 108668 PARAMETER Experiment Name: At_2mM_SA_cDNA_P Parameter: Timepoint (hr) Value: 6
  misc_feature: MA Experiment 108668 PARAMETER Experiment Name: At_2mM_SA_cDNA_P Parameter: Treatment Value: 2mM SA vs. No Treatment
  misc_feature: MA Experiment ID: 20000069 Result: Down-regulated in Transcription
  misc_feature: MA Experiment 20000069 PARAMETER Experiment Name: At_100uM_ABA_Mutants_cDNA_P Parameter: Plant Line Value: CS23
  misc_feature: MA Experiment 20000069 PARAMETER Experiment Name: At_100uM_ABA_Mutants_cDNA_P Parameter: Timepoint (hr) Value: 6
  misc_feature: MA Experiment 20000069 PARAMETER Experiment Name: At_100uM_ABA_Mutants_cDNA_P Parameter: Tissue Value: Aerial
  misc_feature: MA Experiment 20000069 PARAMETER Experiment Name: At_100uM_ABA_Mutants_cDNA_P Parameter: Treatment Value: 100uM ABA vs. No Treatment
  misc_feature: MA Experiment ID: 20000070 Result: Down-regulated in Transcription
  misc_feature: MA Experiment 20000070 PARAMETER Experiment Name: At_100uM_ABA_Mutants_cDNA_P Parameter: Plant Line Value: CS24
  misc_feature: MA Experiment 20000070 PARAMETER Experiment Name: At_100uM_ABA_Mutants_cDNA_P Parameter: Timepoint (hr) Value: 6
  misc_feature: MA Experiment 20000070 PARAMETER Experiment Name: At_100uM_ABA_Mutants_cDNA_P Parameter: Tissue Value: Aerial
  misc_feature: MA Experiment 20000070 PARAMETER Experiment Name: At_100uM_ABA_Mutants_cDNA_P Parameter: Treatment Value: 100uM ABA vs. No Treatment
  misc_feature: MA Experiment ID: 20000071 Result: Down-regulated in Transcription
  misc_feature: MA Experiment 20000071 PARAMETER Experiment Name: At_100uM_ABA_Mutants_cDNA_P Parameter: Plant Line Value: CS8104
  misc_feature: MA Experiment 20000071 PARAMETER Experiment Name: At_100uM_ABA_Mutants_cDNA_P Parameter: Timepoint (hr) Value: 6
  misc_feature: MA Experiment 20000071 PARAMETER Experiment Name: At_100uM_ABA_Mutants_cDNA_P Parameter: Tissue Value: Aerial
  misc_feature: MA Experiment 20000071 PARAMETER Experiment Name: At_100uM_ABA_Mutants_cDNA_P Parameter: Treatment Value: 100uM ABA vs. No Treatment
  misc_feature: MA Experiment ID: 20000072 Result: Down-regulated in Transcription
  misc_feature: MA Experiment 20000072 PARAMETER Experiment Name: At_100uM_ABA_Mutants_cDNA_P Parameter: Plant Line Value: CS8105
  misc_feature: MA Experiment 20000072 PARAMETER Experiment Name: At_100uM_ABA_Mutants_cDNA_P Parameter: Timepoint (hr) Value: 6
  misc_feature: MA Experiment 20000072 PARAMETER Experiment Name: At_100uM_ABA_Mutants_cDNA_P Parameter: Tissue Value: Aerial
  misc_feature: MA Experiment 20000072 PARAMETER Experiment Name: At_100uM_ABA_Mutants_cDNA_P Parameter: Treatment Value: 100uM ABA vs. No Treatment
  misc_feature: MA Experiment ID: 20000086 Result: Down-regulated in Transcription
  misc_feature: MA Experiment 20000086 PARAMETER Experiment Name: At_100uM_ABA_Mutants_cDNA_P Parameter: Plant Line Value: CS22
  misc_feature: MA Experiment 20000086 PARAMETER Experiment Name: At_100uM_ABA_Mutants_cDNA_P Parameter: Timepoint (hr) Value: 6
  misc_feature: MA Experiment 20000086 PARAMETER Experiment Name: At_100uM_ABA_Mutants_cDNA_P Parameter: Tissue Value: Aerial
  misc_feature: MA Experiment 20000086 PARAMETER Experiment Name: At_100uM_ABA_Mutants_cDNA_P Parameter: Treatment Value: 100uM ABA vs. No Treatment
  misc_feature: MA Experiment ID: 20000087 Result: Down-regulated in Transcription
  misc_feature: MA Experiment 20000087 PARAMETER Experiment Name: At_100uM_ABA_Mutants_cDNA_P Parameter: Plant Line Value: WS
  misc_feature: MA Experiment 20000087 PARAMETER Experiment Name: At_100uM_ABA_Mutants_cDNA_P Parameter: Timepoint (hr) Value: 6
  misc_feature: MA Experiment 20000087 PARAMETER Experiment Name: At_100uM_ABA_Mutants_cDNA_P Parameter: Tissue Value: Aerial
  misc_feature: MA Experiment 20000087 PARAMETER Experiment Name: At_100uM_ABA_Mutants_cDNA_P Parameter: Treatment Value: 100uM ABA vs. No Treatment
  misc_feature: MA Experiment ID: 20000088 Result: Down-regulated in Transcription
  misc_feature: MA Experiment 20000088 PARAMETER Experiment Name: At_100uM_ABA_Mutants_cDNA_P Parameter: Plant Line Value: Landsberg
  misc_feature: MA Experiment 20000088 PARAMETER Experiment Name: At_100uM_ABA_Mutants_cDNA_P Parameter: Timepoint (hr) Value: 6
  misc_feature: MA Experiment 20000088 PARAMETER Experiment Name: At_100uM_ABA_Mutants_cDNA_P Parameter: Tissue Value: Aerial
  misc_feature: MA Experiment 20000088 PARAMETER Experiment Name: At_100uM_ABA_Mutants_cDNA_P Parameter: Treatment Value: 100uM ABA vs. No Treatment
  misc_feature: MA Experiment ID: 20000089 Result: Down-regulated in Transcription
  misc_feature: MA Experiment ID: 20000117 Result: Down-regulated in Transcription
  misc_feature: MA Experiment 20000117 PARAMETER Experiment Name: At_100uM_ABA_Mutants_cDNA_P Parameter: Plant Line Value: Columbia
  misc_feature: MA Experiment 20000117 PARAMETER Experiment Name: At_100uM_ABA_Mutants_cDNA_P Parameter: Timepoint (hr) Value: 6
  misc_feature: MA Experiment 20000117 PARAMETER Experiment Name: At_100uM_ABA_Mutants_cDNA_P Parameter: Tissue Value: Aerial
  misc_feature: MA Experiment 20000117 PARAMETER Experiment Name: At_100uM_ABA_Mutants_cDNA_P Parameter: Treatment Value: 100uM ABA vs. No Treatment
  misc_feature: MA Experiment ID: 20000180 Result: Up-regulated in Transcription
  misc_feature: MA Experiment 20000180 PARAMETER Experiment Name: At_Germinating_Seeds_P Parameter: Age (hr) Value: 24 vs. 0
  misc_feature: MA Experiment 20000180 PARAMETER Experiment Name: At_Germinating_Seeds_P Parameter: Tissue Value: Germinating Seeds
  misc_feature: MA Experiment ID: 20000182 Result: Down-regulated in Transcription
  misc_feature: MA Experiment 20000182 PARAMETER Experiment Name: At_2mM_SA_P Parameter: Age (day) Value: 14
  misc_feature: MA Experiment 20000182 PARAMETER Experiment Name: At_2mM_SA_P Parameter: Organism Value: A. thaliana
  misc_feature: MA Experiment 20000182 PARAMETER Experiment Name: At_2mM_SA_P Parameter: Plant Line Value: WS
  misc_feature: MA Experiment 20000182 PARAMETER Experiment Name: At_2mM_SA_P Parameter: Timepoint (hr) Value: 6
  misc_feature: MA Experiment 20000182 PARAMETER Experiment Name: At_2mM_SA_P Parameter: Tissue Value: Aerial
  misc_feature: MA Experiment 20000182 PARAMETER Experiment Name: At_2mM_SA_P Parameter: Treatment Value: 2mM SA vs. No Treatment
  misc_feature: MA Experiment ID: 20000184 Result: Up-regulated in Transcription
  misc_feature: MA Experiment 20000184 PARAMETER Experiment Name: At_Shoots__P Parameter: Age (day) Value: 7
  misc_feature: MA Experiment 20000184 PARAMETER Experiment Name: At_Shoots__P Parameter: Tissue Value: Shoots vs. Whole Plant
  misc_feature: MA Experiment ID: 20000185 Result: Down-regulated in Transcription
  misc_feature: MA Experiment 20000185 PARAMETER Experiment Name: At_Roots__P Parameter: Age (day) Value: 7 vs. 21
  misc_feature: MA Experiment 20000185 PARAMETER Experiment Name: At_Roots__P Parameter: Organism Value: A. thaliana
  misc_feature: MA Experiment 20000185 PARAMETER Experiment Name: At_Roots__P Parameter: Tissue Value: Roots vs. Whole Plant
  misc_feature: MA Experiment ID: 20000264 Result: Down-regulated in Transcription
  misc_feature: MA Experiment 20000264 PARAMETER Experiment Name: At_Open_Flower_P Parameter: Age (day) Value: 21
  misc_feature: MA Experiment 20000264 PARAMETER Experiment Name: At_Open_Flower_P Parameter: Plant Line Value: WS
  misc_feature: MA Experiment 20000264 PARAMETER Experiment Name: At_Open_Flower_P Parameter: Tissue Value: Open Flower vs. Whole Plant
  misc_feature: MA Experiment ID: 20000437 Result: Down-regulated in Transcription
  misc_feature: MA Experiment 20000437 PARAMETER Experiment Name: At_Drought_P Parameter: Age (day) Value: 8
  misc_feature: MA Experiment 20000437 PARAMETER Experiment Name: At_Drought_P Parameter: Organism Value: A. thaliana
  misc_feature: MA Experiment 20000437 PARAMETER Experiment Name: At_Drought_P Parameter: Plant Line Value: WS
  misc_feature: MA Experiment 20000437 PARAMETER Experiment Name: At_Drought_P Parameter: Timepoint (hr) Value: 24
  misc_feature: MA Experiment 20000437 PARAMETER Experiment Name: At_Drought_P Parameter: Tissue Value: Whole Plant
  misc_feature: MA Experiment 20000437 PARAMETER Experiment Name: At_Drought_P Parameter: Treatment Value: Drought vs. No Drought
  misc_feature: MA Experiment ID: 20000438 Result: Up-regulated in Transcription
  misc_feature: MA Experiment 20000438 PARAMETER Experiment Name: At_Shoots__P Parameter: Age (day) Value: 14
  misc_feature: MA Experiment 20000438 PARAMETER Experiment Name: At_Shoots__P Parameter: Tissue Value: Shoots vs. Whole Plant
  misc_feature: MA Experiment ID: 20000439 Result: Down-regulated in Transcription
  misc_feature: MA Experiment 20000439 PARAMETER Experiment Name: At_Roots__P Parameter: Age (day) Value: 14 vs. 21
  misc_feature: MA Experiment 20000439 PARAMETER Experiment Name: At_Roots__P Parameter: Organism Value: A. thaliana
  misc_feature: MA Experiment 20000439 PARAMETER Experiment Name: At_Roots__P Parameter: Tissue Value: Roots vs. Whole Plant
  misc_feature: MA Experiment ID: 20000794 Result: Down-regulated in Transcription
  misc_feature: MA Experiment 20000794 PARAMETER Experiment Name: At_Petals_P Parameter: Age (day) Value: 23-25 days
  misc_feature: MA Experiment 20000794 PARAMETER Experiment Name: At_Petals_P Parameter: Plant Line Value: WS
  misc_feature: MA Experiment 20000794 PARAMETER Experiment Name: At_Petals_P Parameter: Tissue Value: Petals vs. Whole plant
  misc_feature: MA Experiment ID: 20001248 Result: Down-regulated in Transcription
  misc_feature: MA Experiment 20001248 PARAMETER Experiment Name: At_Far-red-induction_P Parameter: Age (day) Value: 7
  misc_feature: MA Experiment 20001248 PARAMETER Experiment Name: At_Far-red-induction_P Parameter: Light Value: Far-red vs. White
  misc_feature: MA Experiment 20001248 PARAMETER Experiment Name: At_Far-red-induction_P Parameter: Organism Value: A. thaliana
  misc_feature: MA Experiment 20001248 PARAMETER Experiment Name: At_Far-red-induction_P Parameter: Plant Line Value: Columbia
  misc_feature: MA Experiment 20001248 PARAMETER Experiment Name: At_Far-red-induction_P Parameter: Timepoint (hr) Value: 4
  misc_feature: MA Experiment 20001248 PARAMETER Experiment Name: At_Far-red-induction_P Parameter: Tissue Value: Whole Plant
  misc_feature: MA Experiment ID: 20001450 Result: Down-regulated in Transcription
  misc_feature: MA Experiment 20001450 PARAMETER Experiment Name: At_Far-red-induction_P Parameter: Age (day) Value: 7
  misc_feature: MA Experiment 20001450 PARAMETER Experiment Name: At_Far-red-induction_P Parameter: Light Value: Far-red vs. White
  misc_feature: MA Experiment 20001450 PARAMETER Experiment Name: At_Far-red-induction_P Parameter: Organism Value: A. thaliana
  misc_feature: MA Experiment 20001450 PARAMETER Experiment Name: At_Far-red-induction_P Parameter: Plant Line Value: Columbia
  misc_feature: MA Experiment 20001450 PARAMETER Experiment Name: At_Far-red-induction_P Parameter: Timepoint (hr) Value: 8
  misc_feature: MA Experiment 20001450 PARAMETER Experiment Name: At_Far-red-induction_P Parameter: Tissue Value: Whole Plant
  misc_feature: MA Experiment ID: 20001451 Result: Down-regulated in Transcription
  misc_feature: MA Experiment 20001451 PARAMETER Experiment Name: At_Far-red-induction_P Parameter: Age (day) Value: 7
  misc_feature: MA Experiment 20001451 PARAMETER Experiment Name: At_Far-red-induction_P Parameter: Light Value: Far-red vs. White
  misc_feature: MA Experiment 20001451 PARAMETER Experiment Name: At_Far-red-induction_P Parameter: Organism Value: A. thaliana
  misc_feature: MA Experiment 20001451 PARAMETER Experiment Name: At_Far-red-induction_P Parameter: Plant Line Value: Columbia
  misc_feature: MA Experiment 20001451 PARAMETER Experiment Name: At_Far-red-induction_P Parameter: Timepoint (hr) Value: 24
  misc_feature: MA Experiment 20001451 PARAMETER Experiment Name: At_Far-red-induction_P Parameter: Tissue Value: Whole Plant
  misc_feature: MA Experiment ID: 20001757 Result: Up-regulated in Transcription
  misc_feature: MA Experiment 20001757 PARAMETER Experiment Name: At_50mM_NH4NO3_L-to-H_P Parameter: Timepoint (hr) Value: 6
  misc_feature: MA Experiment 20001757 PARAMETER Experiment Name: At_50mM_NH4NO3_L-to-H_P Parameter: Tissue Value: Leaf
  misc_feature: MA Experiment 20001757 PARAMETER Experiment Name: At_50mM_NH4NO3_L-to-H_P Parameter: Treatment Value: 50mM NH4NO3 vs 100mM Mannitol
  misc_feature: MA Experiment ID: 20001904 Result: Down-regulated in Transcription
  misc_feature: MA Experiment 20001904 PARAMETER Experiment Name: At_Drought_Reproduction_P Parameter: Age (day) Value: 37
  misc_feature: MA Experiment 20001904 PARAMETER Experiment Name: At_Drought_Reproduction_P Parameter: Organism Value: A. thaliana
  misc_feature: MA Experiment 20001904 PARAMETER Experiment Name: At_Drought_Reproduction_P Parameter: Plant Line Value: WS
  misc_feature: MA Experiment 20001904 PARAMETER Experiment Name: At_Drought_Reproduction_P Parameter: Timepoint (day) Value: 7
  misc_feature: MA Experiment 20001904 PARAMETER Experiment Name: At_Drought_Reproduction_P Parameter: Tissue Value: Rosettes
  misc_feature: MA Experiment 20001904 PARAMETER Experiment Name: At_Drought_Reproduction_P Parameter: Treatment Value: Drought vs. No Drought
  misc_feature: MA Experiment ID: 20001905 Result: Down-regulated in Transcription
  misc_feature: MA Experiment 20001905 PARAMETER Experiment Name: At_Drought_Reproduction_P Parameter: Age (day) Value: 40
  misc_feature: MA Experiment 20001905 PARAMETER Experiment Name: At_Drought_Reproduction_P Parameter: Organism Value: A. thaliana
  misc_feature: MA Experiment 20001905 PARAMETER Experiment Name: At_Drought_Reproduction_P Parameter: Plant Line Value: WS
  misc_feature: MA Experiment 20001905 PARAMETER Experiment Name: At_Drought_Reproduction_P Parameter: Timepoint (day) Value: 10
  misc_feature: MA Experiment 20001905 PARAMETER Experiment Name: At_Drought_Reproduction_P Parameter: Tissue Value: Rosettes
  misc_feature: MA Experiment 20001905 PARAMETER Experiment Name: At_Drought_Reproduction_P Parameter: Treatment Value: Drought vs. No Drought
  misc_feature: MA Experiment ID: 20001906 Result: Down-regulated in Transcription
  misc_feature: MA Experiment 20001906 PARAMETER Experiment Name: At_Drought_Reproduction_P Parameter: Age (day) Value: 35
  misc_feature: MA Experiment 20001906 PARAMETER Experiment Name: At_Drought_Reproduction_P Parameter: Organism Value: A. thaliana
  misc_feature: MA Experiment 20001906 PARAMETER Experiment Name: At_Drought_Reproduction_P Parameter: Plant Line Value: WS
  misc_feature: MA Experiment 20001906 PARAMETER Experiment Name: At_Drought_Reproduction_P Parameter: Timepoint (day) Value: 5
  misc_feature: MA Experiment 20001906 PARAMETER Experiment Name: At_Drought_Reproduction_P Parameter: Tissue Value: Siliques
  misc_feature: MA Experiment 20001906 PARAMETER Experiment Name: At_Drought_Reproduction_P Parameter: Treatment Value: Drought vs. No Drought
  misc_feature: MA Experiment ID: 20001908 Result: Down-regulated in Transcription
  misc_feature: MA Experiment 20001908 PARAMETER Experiment Name: At_Drought_Reproduction_P Parameter: Age (day) Value: 40
  misc_feature: MA Experiment 20001908 PARAMETER Experiment Name: At_Drought_Reproduction_P Parameter: Organism Value: A. thaliana
  misc_feature: MA Experiment 20001908 PARAMETER Experiment Name: At_Drought_Reproduction_P Parameter: Plant Line Value: WS
  misc_feature: MA Experiment 20001908 PARAMETER Experiment Name: At_Drought_Reproduction_P Parameter: Timepoint (day) Value: 10
  misc_feature: MA Experiment 20001908 PARAMETER Experiment Name: At_Drought_Reproduction_P Parameter: Tissue Value: Siliques
  misc_feature: MA Experiment 20001908 PARAMETER Experiment Name: At_Drought_Reproduction_P Parameter: Treatment Value: Drought vs. No Drought
acaatcaaagatgacactagctagacattttcgttttcatctccccacgaatcaaagatggcttttgccattgcttctgctctcacttccacactcacattatccacgagcagagtccaaaatcctacccagagaagaccacatgtagcgtccacatcatccaccggtggaagattaatgagagagcgcttggtggtggttcgtgccggcaaagaagtttctagcgtctgtgaaccacttcctccggaccgtcctttatggttccctggtagctctccacctgaatggctcgatggcagcttacctggtgatttcggtttcgatcctctcggtttagggtctgatccggacaccctcaaatggtttgcacaagctgagcttatacatagccggtgggcaatgctggccgtgaccggtatcataataccagaatgtctcgagcggttaggtttcattgaaaatttctcatggtatgacgcagggtctcgtgagtacttcgcggattccactacgctgtttgtggctcaaatggttttaatgggctgggcagaaggtagaagatgggctgatttgattaaaccggggtctgttgacatagaaccaaagtacccgcataaagtaaatcctaaaccggatgttggttaccctggaggtttgtggttcgattttatgatgtgggggagaggttctcctgaaccggtaatggttttgaggactaaagagattaagaacggacggctcgcgatgcttgctttccttgggttctgtttccaagctacctacactagccaagatccaattgagaatctcatggctcatctggctgatcctggtcattgcaacgtcttttcggcatttacatcacattaatgaggattagcttggggcgaatataatattttttatatatttatggatgttgaacttttgtatagtgtcactcgccgttgttacaacttctgcttacttaattaacatgtaaaatatattttatatatatgtagaagaaagaaacaagaagag

SEQ ID NO: 36594 - protein, 270 aa, Arabidopsis thaliana
  peptide (1)..(270): Ceres Seq. ID no. 12394001
  misc_feature (73)..(241): Pfam Name: Chlorophyll A-B binding protein Pfam Description: Chlorophyll A-B binding protein
  misc_feature (6)..(269): Homolog of NCBI NO: 99486 NR Description: chlorophyll a/b-binding protein (clone pINEab 31)
  misc_feature (1)..(268): Homolog of NCBI NO: 2129879 NR Description: chlorophyll a/b-binding protein type II
  misc_feature (30)..(268): Homolog of NCBI NO: 11277627 NR Description: PS I antenna protein Lhca2 [imported] -
  misc_feature (30)..(268): Homolog of NCBI NO: 15233120 NR Description: light-harvesting chlorophyll a/b binding protein
  misc_feature (5)..(268): Homolog of NCBI NO: 115765 NR Description: Chlorophyll A-B binding protein 7, chloroplast
  misc_feature (5)..(268): Homolog of NCBI NO: 115766 NR Description: Chlorophyll A-B binding protein, chloroplast
  misc_feature (1)..(270): Homolog of NCBI NO: 1084336 NR Description: chlorophyll a/b-binding protein type II -
  misc_feature (1)..(265): Homolog of NCBI NO: 25299032 NR Description: hypothetical protein T29M8.2 - Arabidopsis
  misc_feature (1)..(270): Homolog of NCBI NO: 27754356 NR Description: putative light-harvesting chlorophyll a/b binding
  misc_feature (1)..(270): Homolog of NCBI NO: 15221956 NR Description: light-harvesting chlorophyll a/b binding protein
MAFAIASALTSTLTLSTSRVQNPTQRRPHVASTSSTGGRLMRERLVVVRAGKEVSSVCEPLPPDRPLWFPGSSPPEWLDGSLPGDFGFDPLGLGSDPDTLKWFAQAELIHSRWAMLAVTGIIIPECLERLGFIENFSWYDAGSREYFADSTTLFVAQMVLMGWAEGRRWADLIKPGSVDIEPKYPHKVNPKPDVGYPGGLWFDFMMWGRGSPEPVMVLRTKEIKNGRLAMLAFLGFCFQATYTSQDPIENLMAHLADPGHCNVFSAFTSH

SEQ ID NO: 36595 - protein, 230 aa, Arabidopsis thaliana
  peptide (1)..(230): Ceres Seq. ID no. 12394002
  misc_feature (33)..(201): Pfam Name: Chlorophyll A-B binding protein Pfam Description: Chlorophyll A-B binding protein
  misc_feature (1)..(229): Homolog of NCBI NO: 99486 NR Description: chlorophyll a/b-binding protein (clone pINEab 31)
  misc_feature (1)..(228): Homolog of NCBI NO: 2129879 NR Description: chlorophyll a/b-binding protein type II
  misc_feature (1)..(228): Homolog of NCBI NO: 11277627 NR Description: PS I antenna protein Lhca2 [imported] -
  misc_feature (1)..(228): Homolog of NCBI NO: 15233120 NR Description: light-harvesting chlorophyll a/b binding protein
  misc_feature (1)..(228): Homolog of NCBI NO: 115765 NR Description: Chlorophyll A-B binding protein 7, chloroplast
  misc_feature (1)..(228): Homolog of NCBI NO: 115766 NR Description: Chlorophyll A-B binding protein, chloroplast
  misc_feature (1)..(230): Homolog of NCBI NO: 1084336 NR Description: chlorophyll a/b-binding protein type II -
  misc_feature (1)..(225): Homolog of NCBI NO: 25299032 NR Description: hypothetical protein T29M8.2 - Arabidopsis
  misc_feature (1)..(230): Homolog of NCBI NO: 27754356 NR Description: putative light-harvesting chlorophyll a/b binding
  misc_feature (1)..(230): Homolog of NCBI NO: 15221956 NR Description: light-harvesting chlorophyll a/b binding protein
MRERLVVVRAGKEVSSVCEPLPPDRPLWFPGSSPPEWLDGSLPGDFGFDPLGLGSDPDTLKWFAQAELIHSRWAMLAVTGIIIPECLERLGFIENFSWYDAGSREYFADSTTLFVAQMVLMGWAEGRRWADLIKPGSVDIEPKYPHKVNPKPDVGYPGGLWFDFMMWGRGSPEPVMVLRTKEIKNGRLAMLAFLGFCFQATYTSQDPIENLMAHLADPGHCNVFSAFTSH

SEQ ID NO: 36596 - protein, 156 aa, Arabidopsis thaliana
  peptide (1)..(156): Ceres Seq. ID no. 12394003
  misc_feature (1)..(127): Pfam Name: Chlorophyll A-B binding protein Pfam Description: Chlorophyll A-B binding protein
  misc_feature (1)..(155): Homolog of NCBI NO: 99486 NR Description: chlorophyll a/b-binding protein (clone pINEab 31)
  misc_feature (1)..(154): Homolog of NCBI NO: 2129879 NR Description: chlorophyll a/b-binding protein type II
  misc_feature (1)..(154): Homolog of NCBI NO: 11277627 NR Description: PS I antenna protein Lhca2 [imported] -
  misc_feature (1)..(154): Homolog of NCBI NO: 15233120 NR Description: light-harvesting chlorophyll a/b binding protein
  misc_feature (1)..(154): Homolog of NCBI NO: 115765 NR Description: Chlorophyll A-B binding protein 7, chloroplast
  misc_feature (1)..(154): Homolog of NCBI NO: 115766 NR Description: Chlorophyll A-B binding protein, chloroplast
  misc_feature (1)..(156): Homolog of NCBI NO: 1084336 NR Description: chlorophyll a/b-binding protein type II -
  misc_feature (1)..(151): Homolog of NCBI NO: 25299032 NR Description: hypothetical protein T29M8.2 - Arabidopsis
  misc_feature (1)..(156): Homolog of NCBI NO: 27754356 NR Description: putative light-harvesting chlorophyll a/b binding
  misc_feature (1)..(156): Homolog of NCBI NO: 15221956 NR Description: light-harvesting chlorophyll a/b binding protein
MLAVTGIIIPECLERLGFIENFSWYDAGSREYFADSTTLFVAQMVLMGWAEGRRWADLIKPGSVDIEPKYPHKVNPKPDVGYPGGLWFDFMMWGRGSPEPVMVLRTKEIKNGRLAMLAFLGFCFQATYTSQDPIENLMAHLADPGHCNVFSAFTSH

SEQ ID NO: 36597 - DNA, 1499 bp, Arabidopsis thaliana
  misc_feature (1)..(1499): Ceres Seq. ID no. 12560653
  misc_feature: MA Experiment ID: 20000179 Result: Up-regulated in Transcription
  misc_feature: MA Experiment 20000179 PARAMETER Experiment Name: At_Germinating_Seeds_P Parameter: Age (hr) Value: 6 vs. 0
  misc_feature: MA Experiment 20000179 PARAMETER Experiment Name: At_Germinating_Seeds_P Parameter: Tissue Value: Germinating Seeds
  misc_feature: MA Experiment ID: 20000180 Result: Up-regulated in Transcription
  misc_feature: MA Experiment 20000180 PARAMETER Experiment Name: At_Germinating_Seeds_P Parameter: Age (hr) Value: 24 vs. 0
  misc_feature: MA Experiment 20000180 PARAMETER Experiment Name: At_Germinating_Seeds_P Parameter: Tissue Value: Germinating Seeds
  misc_feature: MA Experiment ID: 20000265 Result: Up-regulated in Transcription
  misc_feature: MA Experiment 20000265 PARAMETER Experiment Name: At_Open_Flower_P Parameter: Age (day) Value: 21
  misc_feature: MA Experiment 20000265 PARAMETER Experiment Name: At_Open_Flower_P Parameter: Plant Line Value: WS
  misc_feature: MA Experiment 20000265 PARAMETER Experiment Name: At_Open_Flower_P Parameter: Tissue Value: Closed Flower vs. Whole Plant
  misc_feature: MA Experiment ID: 20001451 Result: Down-regulated in Transcription
  misc_feature: MA Experiment 20001451 PARAMETER Experiment Name: At_Far-red-induction_P Parameter: Age (day) Value: 7
  misc_feature: MA Experiment 20001451 PARAMETER Experiment Name: At_Far-red-induction_P Parameter: Light Value: Far-red vs. White
  misc_feature: MA Experiment 20001451 PARAMETER Experiment Name: At_Far-red-induction_P Parameter: Organism Value: A. thaliana
  misc_feature: MA Experiment 20001451 PARAMETER Experiment Name: At_Far-red-induction_P Parameter: Plant Line Value: Columbia
  misc_feature: MA Experiment 20001451 PARAMETER Experiment Name: At_Far-red-induction_P Parameter: Timepoint (hr) Value: 24
  misc_feature: MA Experiment 20001451 PARAMETER Experiment Name: At_Far-red-induction_P Parameter: Tissue Value: Whole Plant
tctctctcacttttctgaaaaagttgtacgtccaaaatctccaaacccttttttaagaacaaatctcaatccatggcaatcatcgatcaaaattgagaatcacacaagcttcacaatgtcatcatcatcatcaacgacgacgaacacaacaacagaatcagattcatcatctctacctactcacatcggtagatcaaattccgacggaatcatcgacactacaccatttcttcctcccaccgttacaagaaccataagcgtagatgaagaatccaatccaattcatcgatccgctagacgacaaggtctaagagaagcagcgaggttcctccgtcacgctggtagccggagaatgatgcgtgaaccatcgatgctcgttagagaaaccgctgctgagcaattagaagagagacaaagtgattgggcgtattctaaacctgtggtgtttcttgacattttgtggaatcttgcttttgttgccatcggtgttgctgttctgatacttagccgtgacgagaagcctaatatgccgttgagagtttgggttgttggttatgggattcaatgttggttacatatggcttgtgtttgtgttgagtataggcggaggagacgacgacgtcacccggaggatggtggtggttctgggttgacgaattcttcgtcgcagcaatatgtttcgttagcgcaattggaggatagaggagagactagtaatcctgcgaagcatcttgaatcagccaatacgatgttctcattcatctggtggataattggattctactgggtttctgcaggaggccaaacactatctagtgactctcctcagctctattggctgtgtatcatttttctcggtttcgatgttttctttgttgtgttctgtgttgcattggcttgtgttatcggccttgctgtttgctgttgtcttccatgtataattgcaattctatatgctgttgccgaccaggagggagcatcgaagaacgacatagatcaaatgccgaaattcagatttacaaaaactggcaatgttgaaaagctctcaggcaaagcacggggaataatgacggaatgtggaacagattcacctattgaacgctcgctctctccagaagacgcggaatgctgcatctgtctctgtgaatatgaagatggagttgaacttagagaactcccttgtaaccatcactttcattgcacttgcatcgataaatggcttcatataaactcacgttgcccgctctgcaagtttaacatcttgaagaacgcaaacaacgaagtctagtaaaatctgttctggttctaggatcaatccgaacgaaccatcccagaccagaacgtttcagatatatgtaaactctggttcgtgttttagtgttgtgcagttagaaaatctagtccatatctctttctcctgatcttctattacaatgcgtcaatgcgcctattgatagtatgtaggaataaatcgttggattagtcctactttatttttt

SEQ ID NO: 36598 - protein, 428 aa, Arabidopsis thaliana
  peptide (1)..(428): Ceres Seq. ID no. 12560654
  misc_feature (376)..(416): Pfam Name: Zinc finger, C3HC4 type (RING finger) Pfam Description: Zinc finger, C3HC4 type (RING finger)
  misc_feature (376)..(416): Pfam Name: Zinc finger, C3HC4 type (RING finger) Pfam Description: Zinc finger, C3HC4 type (RING finger)
  misc_feature (280)..(425): Homolog of NCBI NO: 15222059 NR Description: unknown protein; protein id: At1g12760.1
  misc_feature (46)..(260): Homolog of NCBI NO: 15222059 NR Description: unknown protein; protein id: At1g12760.1
  misc_feature (119)..(426): Homolog of NCBI NO: 38344371 NR Description: OSJNBb0032E06.5 [Oryza sativa (japonica
  misc_feature (72)..(423): Homolog of NCBI NO: 33146524 NR Description: putative RES protein [Oryza sativa (japonica
  misc_feature (96)..(424): Homolog of NCBI NO: 16604388 NR Description: At1g63170/F16M19_7 [Arabidopsis thaliana]
  misc_feature (280)..(425): Homolog of NCBI NO: 15222059 NR Description: unknown protein; protein id: At1g12760.1
  misc_feature (119)..(426): Homolog of NCBI NO: 38344371 NR Description: OSJNBb0032E06.5 [Oryza sativa (japonica
  misc_feature (96)..(424): Homolog of NCBI NO: 16604388 NR Description: At1g63170/F16M19_7 [Arabidopsis thaliana]
  misc_feature (39)..(428): Homolog of NCBI NO: 18413629 NR Description: putative protein
  misc_feature (39)..(374): Homolog of NCBI NO: 7487667 NR Description: hypothetical protein T5C23.110 - Arabidopsis
  misc_feature (375)..(428): Homolog of NCBI NO: 7487667 NR Description: hypothetical protein T5C23.110 - Arabidopsis
  misc_feature (96)..(427): Homolog of NCBI NO: 18407748 NR Description: expressed protein
  misc_feature (96)..(427): Homolog of NCBI NO: 21554228 NR Description: unknown [Arabidopsis thaliana]
  misc_feature (72)..(423): Homolog of NCBI NO: 33146524 NR Description: putative RES protein [Oryza sativa (japonica
  misc_feature (46)..(260): Homolog of NCBI NO: 15222059 NR Description: unknown protein; protein id: At1g12760.1
  misc_feature (96)..(427): Homolog of NCBI NO: 21554228 NR Description: unknown [Arabidopsis thaliana]
  misc_feature (96)..(427): Homolog of NCBI NO: 18407748 NR Description: expressed protein
  misc_feature (375)..(428): Homolog of NCBI NO: 7487667 NR Description: hypothetical protein T5C23.110 - Arabidopsis
  misc_feature (39)..(374): Homolog of NCBI NO: 7487667 NR Description: hypothetical protein T5C23.110 - Arabidopsis
  misc_feature (39)..(428): Homolog of NCBI NO: 18413629 NR Description: putative protein
LSHFSEKVVRPKSPNPFLRTNLNPWQSSIKIENHTSFTMSSSSSTTTNTTTESDSSSLPTHIGRSNSDGIIDTTPFLPPTVTRTISVDEESNPIHRSARRQGLREAARFLRHAGSRRMMREPSMLVRETAAEQLEERQSDWAYSKPVVFLDILWNLAFVAIGVAVLILSRDEKPNMPLRVWVVGYGIQCWLHMACVCVEYRRRRRRRHPEDGGGSGLTNSSSQQYVSLAQLEDRGETSNPAKHLESANTMFSFIWWIIGFYWVSAGGQTLSSDSPQLYWLCIIFLGFDVFFVVFCVALACVIGLAVCCCLPCIIAILYAVADQEGASKNDIDQMPKFRFTKTGNVEKLSGKARGIMTECGTDSPIERSLSPEDAECCICLCEYEDGVELRELPCNHHFHCTCIDKWLHINSRCPLCKFNILKNANNEV

SEQ ID NO: 36599 - protein, 390 aa, Arabidopsis thaliana
  peptide (1)..(390): Ceres Seq. ID no. 12560655
  misc_feature (338)..(378): Pfam Name: Zinc finger, C3HC4 type (RING finger) Pfam Description: Zinc finger, C3HC4 type (RING finger)
  misc_feature (338)..(378): Pfam Name: Zinc finger, C3HC4 type (RING finger) Pfam Description: Zinc finger, C3HC4 type (RING finger)
  misc_feature (242)..(387): Homolog of NCBI NO: 15222059 NR Description: unknown protein; protein id: At1g12760.1
  misc_feature (8)..(222): Homolog of NCBI NO: 15222059 NR Description: unknown protein; protein id: At1g12760.1
  misc_feature (81)..(388): Homolog of NCBI NO: 38344371 NR Description: OSJNBb0032E06.5 [Oryza sativa (japonica
  misc_feature (34)..(385): Homolog of NCBI NO: 33146524 NR Description: putative RES protein [Oryza sativa (japonica
  misc_feature (58)..(386): Homolog of NCBI NO: 16604388 NR Description: At1g63170/F16M19_7 [Arabidopsis thaliana]
  misc_feature (242)..(387): Homolog of NCBI NO: 15222059 NR Description: unknown protein; protein id: At1g12760.1
  misc_feature (81)..(388): Homolog of NCBI NO: 38344371 NR Description: OSJNBb0032E06.5 [Oryza sativa (japonica
  misc_feature (58)..(386): Homolog of NCBI NO: 16604388 NR Description: At1g63170/F16M19_7 [Arabidopsis thaliana]
  misc_feature (1)..(390): Homolog of NCBI NO: 18413629 NR Description: putative protein
  misc_feature (1)..(336): Homolog of NCBI NO: 7487667 NR Description: hypothetical protein T5C23.110 - Arabidopsis
  misc_feature (337)..(390): Homolog of NCBI NO: 7487667 NR Description: hypothetical protein T5C23.110 - Arabidopsis
  misc_feature (58)..(389): Homolog of NCBI NO: 18407748 NR Description: expressed protein
  misc_feature (58)..(389): Homolog of NCBI NO: 21554228 NR Description: unknown [Arabidopsis thaliana]
  misc_feature (34)..(385): Homolog of NCBI NO: 33146524 NR Description: putative RES protein [Oryza sativa (japonica
  misc_feature (8)..(222): Homolog of NCBI NO: 15222059 NR Description: unknown protein; protein id: At1g12760.1
  misc_feature (58)..(389): Homolog of NCBI NO: 21554228 NR Description: unknown [Arabidopsis thaliana]
  misc_feature (58)..(389): Homolog of NCBI NO: 18407748 NR Description: expressed protein
  misc_feature (337)..(390): Homolog of NCBI NO: 7487667 NR Description: hypothetical protein T5C23.110 - Arabidopsis
  misc_feature (1)..(336): Homolog of NCBI NO: 7487667 NR Description: hypothetical protein T5C23.110 - Arabidopsis
  misc_feature (1)..(390): Homolog of NCBI NO: 18413629 NR Description: putative protein
MSSSSSTTTNTTTESDSSSLPTHIGRSNSDGIIDTTPFLPPTVTRTISVDEESNPIHRSARRQGLREAARFLRHAGSRRMMREPSMLVRETAAEQLEERQSDWAYSKPVVFLDILWNLAFVAIGVAVLILSRDEKPNMPLRVWVVGYGIQCWLHMACVCVEYRRRRRRRHPEDGGGSGLTNSSSQQYVSLAQLEDRGETSNPAKHLESANTMFSFIWWIIGFYWVSAGGQTLSSDSPQLYWLCIIFLGFDVFFVVFCVALACVIGLAVCCCLPCIIAILYAVADQEGASKNDIDQMPKFRFTKTGNVEKLSGKARGIMTECGTDSPIERSLSPEDAECCICLCEYEDGVELRELPCNHHFHCTCIDKWLHINSRCPLCKFNILKNANNEV

SEQ ID NO: 36600 - protein, 311 aa, Arabidopsis thaliana
  peptide (1)..(311): Ceres Seq. ID no. 12560656
  misc_feature (259)..(299): Pfam Name: Zinc finger, C3HC4 type (RING finger) Pfam Description: Zinc finger, C3HC4 type (RING finger)
  misc_feature (259)..(299): Pfam Name: Zinc finger, C3HC4 type (RING finger) Pfam Description: Zinc finger, C3HC4 type (RING finger)
  misc_feature (163)..(308): Homolog of NCBI NO: 15222059 NR Description: unknown protein; protein id: At1g12760.1
  misc_feature (1)..(143): Homolog of NCBI NO: 15222059 NR Description: unknown protein; protein id: At1g12760.1
  misc_feature (2)..(309): Homolog of NCBI NO: 38344371 NR Description: OSJNBb0032E06.5 [Oryza sativa (japonica
  misc_feature (1)..(306): Homolog of NCBI NO: 33146524 NR Description: putative RES protein [Oryza sativa (japonica
  misc_feature (1)..(307): Homolog of NCBI NO: 16604388 NR Description: At1g63170/F16M19_7 [Arabidopsis thaliana]
  misc_feature (163)..(308): Homolog of NCBI NO: 15222059 NR Description: unknown protein; protein id: At1g12760.1
  misc_feature (2)..(309): Homolog of NCBI NO: 38344371 NR Description: OSJNBb0032E06.5 [Oryza sativa (japonica
  misc_feature (1)..(307): Homolog of NCBI NO: 16604388 NR Description: At1g63170/F16M19_7 [Arabidopsis thaliana]
  misc_feature (1)..(311): Homolog of NCBI NO: 18413629 NR Description: putative protein
  misc_feature (1)..(257): Homolog of NCBI NO: 7487667 NR Description: hypothetical protein T5C23.110 - Arabidopsis
  misc_feature (258)..(311): Homolog of NCBI NO: 7487667 NR Description: hypothetical protein T5C23.110 - Arabidopsis
  misc_feature (1)..(310): Homolog of NCBI NO: 18407748 NR Description: expressed protein
  misc_feature (1)..(310): Homolog of NCBI NO: 21554228 NR Description: unknown [Arabidopsis thaliana]
  misc_feature (1)..(306): Homolog of NCBI NO: 33146524 NR Description: putative RES protein [Oryza sativa (japonica
  misc_feature (1)..(143): Homolog of NCBI NO: 15222059 NR Description: unknown protein; protein id: At1g12760.1
  misc_feature (1)..(310): Homolog of NCBI NO: 21554228 NR Description: unknown [Arabidopsis thaliana]
  misc_feature (1)..(310): Homolog of NCBI NO: 18407748 NR Description: expressed protein
  misc_feature (258)..(311): Homolog of NCBI NO: 7487667 NR Description: hypothetical protein T5C23.110 - Arabidopsis
  misc_feature (1)..(257): Homolog of NCBI NO: 7487667 NR Description: hypothetical protein T5C23.110 - Arabidopsis
  misc_feature (1)..(311): Homolog of NCBI NO: 18413629 NR Description: putative protein
MMREPSMLVRETAAEQLEERQSDWAYSKPVVFLDILWNLAFVAIGVAVLILSRDEKPNMPLRVWVVGYGIQCWLHMACVCVEYRRRRRRRHPEDGGGSGLTNSSSQQYVSLAQLEDRGETSNPAKHLESANTMFSFIWWIIGFYWVSAGGQTLSSDSPQLYWLCIIFLGFDVFFVVFCVALACVIGLAVCCCLPCIIAILYAVADQEGASKNDIDQMPKFRFTKTGNVEKLSGKARGIMTECGTDSPIERSLSPEDAECCICLCEYEDGVELRELPCNHHFHCTCIDKWLHINSRCPLCKFNILKNANNEV

SEQ ID NO: 36601 - DNA, 2263 bp, Arabidopsis thaliana
  misc_feature (1)..(2263): Ceres Seq. ID no. 13591438
  misc_feature: MA Experiment ID: 20000171 Result: Down-regulated in Transcription
  misc_feature: MA Experiment 20000171 PARAMETER Experiment Name: At_42deg_Heat_P Parameter: Age (day) Value: 14
  misc_feature: MA Experiment 20000171 PARAMETER Experiment Name: At_42deg_Heat_P Parameter: Organism Value: A. thaliana
  misc_feature: MA Experiment 20000171 PARAMETER Experiment Name: At_42deg_Heat_P Parameter: Plant Line Value: WS
  misc_feature: MA Experiment 20000171 PARAMETER Experiment Name: At_42deg_Heat_P Parameter: Temperature (deg C) Value: 42 vs. 22
  misc_feature: MA Experiment 20000171 PARAMETER Experiment Name: At_42deg_Heat_P Parameter: Timepoint (hr) Value: 1
  misc_feature: MA Experiment 20000171 PARAMETER Experiment Name: At_42deg_Heat_P Parameter: Tissue Value: Aerial
  misc_feature: MA Experiment ID: 20000179 Result: Up-regulated in Transcription
  misc_feature: MA Experiment 20000179 PARAMETER Experiment Name: At_Germinating_Seeds_P Parameter: Age (hr) Value: 6 vs. 0
  misc_feature: MA Experiment 20000179 PARAMETER Experiment Name: At_Germinating_Seeds_P Parameter: Tissue Value: Germinating Seeds
  misc_feature: MA Experiment ID: 20000180 Result: Up-regulated in Transcription
  misc_feature: MA Experiment 20000180 PARAMETER Experiment Name: At_Germinating_Seeds_P Parameter: Age (hr) Value: 24 vs. 0
  misc_feature: MA Experiment 20000180 PARAMETER Experiment Name: At_Germinating_Seeds_P Parameter: Tissue Value: Germinating Seeds
accatcttcttcttcaatggaaactccggattaaatgacacttctgtaacttcctatatttactaaaatgccatctcgcctctctccgccagatattccgccgctgcaaccgacgcctacggttagtgacggccatcatcgtttccagactcttccacttatcatagccggttctctgactttaaccggagttttactcatcctcgtcactttacttatttaccgaagactctaccgaaaccgtacggctccttcagatcttatctccaactccaagtctcctcaacactaccaatgtcgacgcttctcttactctcagctccgccgcgctacaaactctttctccgagtcgactcacctcggtcacggcggattcggctctgtttacaaagctgatttcccgagtggcggcgattcactcgccgtcaaagtcatggatacctccgctggttctttacaaggcgaacgtgagtttcacaacgagctttctctctcttctcacttaattggctctcctcatgtcgtctctctccttggattctcctccgatcgtcgtggtcggaagcttatcctcgtctacgaacttatggctaatcgtagtttacaagacgcgcttttggatcgcaaatgtgtggagcttatggattggaacaaaaggtttgagattgccacggatatagcaaaaggcatcgagtttcttcaccattgttgtgatccaattataatccatggagatattaaacctagtaacatccttctcgattctgatttcaaagccaaaatcggagatttcggtctcgcgagagtaaagtcggaggatttcgatactaggattctgattgaggaagaagataagagcaaggatgttgttgaagataatgggtcgattcttgaggagactgaaagcgtgattactgtgtttgaagaaggtaataatgttgtcaatctctcgccggagacttgtgggattagtgtcttgacagagacggtggcctctccgggtgaaaaatctggactttcgccagagaattgtgcagtgagcattttgacggtggaggtgggagcagcatctccggcgatggcatcgataccgtcaccggagacttgtgcgattagcgttttgacggatactggattgtcaccggaaagtagcaagcttaaagtgggatcgaagagagattggtggtggaaacaggacaacaatggtggaagcagaggagggattgaatcagggagtgtgaaggattacgtgatggaatggattgggagtgagattaagaaagagagacctagcaacaataaggaatggatcaacaatggtgatgggtcatcatcagtctctaagaagaagaagaaagagaagaagagaaagcctagagagtggtggaaggaagagttttgtgaagagctgactagaaagaagaggaaaaagaagaagaagaagaaaagagggttaagctcaatctcaagcattgactcttggtttcatagagacgatggtgcttcctctgttcatgaccacaatcttaatcctaccaagaggaagaagaggaatagtatagattggtgggtagatgggttaagtggggagctgaagtcagtcatgggtaaaaaaaacagtcaagattctggtttgtggtgtgatgtgaatgttcagaagagtggtggagtcagcagcacaccgagtatgagaggtacggtgtgttacattgcaccagaatgtggaggaggaggtgtgttgtctgagaaatgcgatgtttatagttttggggttctgcttttggttcttgtctcaggaagacggccattgcaggtgactgcttcgccgatgtcggagtttgagagggctaacttgatttcatgggctaagcaattagcttgcaatggtaaattgttggagttagttgataaatctatacactctttggagaaagagcaagcggttctttgtattactattgcattgctttgtctgcaaagatctccggttaagagaccaacgatgaaggagattgttgagatgctttcgggtgtgtctgagccaccgcatttgccgtttgagttctcaccctcgccgcctatgggttttccgtttaagtcaaggaagaaagcacggtgaaattcgggtttggttatgacttatgagctcagtcatcaagtgtaggatttttccggtccaaagctaaaccaattgcgagttgtaggaactatttgattccgtaagattagctttttgcaaatatttatgaatatttagttgctt

SEQ ID NO: 36602 - protein, 683 aa, Arabidopsis thaliana
  peptide (1)..(683): Ceres Seq. ID no. 13591439
  misc_feature (1)..(251): Homolog of NCBI NO: 22328878 NR Description: expressed protein [Arabidopsis thaliana]
  misc_feature (1)..(499): Homolog of NCBI NO: 15242183 NR Description: protein kinase family [Arabidopsis thaliana]
  misc_feature (1)..(514): Homolog of NCBI NO: 15235063 NR Description: protein kinase family [Arabidopsis thaliana]
  misc_feature (647)..(680): Homolog of NCBI NO: 30686865 NR Description: protein kinase family [Arabidopsis thaliana]
  misc_feature (1)..(457): Homolog of NCBI NO: 30686865 NR Description: protein kinase family [Arabidopsis thaliana]
  misc_feature (292)..(680): Homolog of NCBI NO: 15235063 NR Description: protein kinase family [Arabidopsis thaliana]
  misc_feature (254)..(681): Homolog of NCBI NO: 15242183 NR Description: protein kinase family [Arabidopsis thaliana]
  misc_feature (12)..(250): Homolog of NCBI NO: 15220862 NR Description: protein kinase family [Arabidopsis thaliana]
  misc_feature (427)..(683): Homolog of NCBI NO: 15220862 NR Description: protein kinase family [Arabidopsis thaliana]
  misc_feature (1)..(683): Homolog of NCBI NO: 37531832 NR Description: putative protein kinase [Oryza sativa (japonica
  misc_feature (1)..(251): Homolog of NCBI NO: 22328878 NR Description: expressed protein [Arabidopsis thaliana]
  misc_feature (1)..(499): Homolog of NCBI NO: 15242183 NR Description: protein kinase family [Arabidopsis thaliana]
  misc_feature (1)..(514): Homolog of NCBI NO: 15235063 NR Description: protein kinase family [Arabidopsis thaliana]
  misc_feature (647)..(680): Homolog of NCBI NO: 30686865 NR Description: protein kinase family [Arabidopsis thaliana]
  misc_feature (1)..(457): Homolog of NCBI NO: 30686865 NR Description: protein kinase family [Arabidopsis thaliana]
  misc_feature (292)..(680): Homolog of NCBI NO: 15235063 NR Description: protein kinase family [Arabidopsis thaliana]
  misc_feature (254)..(681): Homolog of NCBI NO: 15242183 NR Description: protein kinase family [Arabidopsis thaliana]
  misc_feature (12)..(250): Homolog of NCBI NO: 15220862 NR Description: protein kinase family [Arabidopsis thaliana]
  misc_feature (427)..(683): Homolog of NCBI NO: 15220862 NR Description: protein kinase family [Arabidopsis thaliana]
  misc_feature (1)..(683): Homolog of NCBI NO: 37531832 NR Description: putative protein kinase [Oryza sativa (japonica
MPSRLSPPDIPPLQPTPTVSDGHHRFQTLPLIIAGSLTLTGVLLILVTLLIYRRLYRNRTAPSDLISNSKSPQHYQCRRFSYSQLRRATNSFSESTHLGHGGFGSVYKADFPSGGDSLAVKVMDTSAGSLQGEREFHNELSLSSHLIGSPHVVSLLGFSSDRRGRKLILVYELMANRSLQDALLDRKCVELMDWNKRFEIATDIAKGIEFLHHCCDPIIIHGDIKPSNILLDSDFKAKIGDFGLARVKSEDFDTRILIEEEDKSKDVVEDNGSILEETESVITVFEEGNNVVNLSPETCGISVLTETVASPGEKSGLSPENCAVSILTVEVGAASPAMASIPSPETCAISVLTDTGLSPESSKLKVGSKRDWWWKQDNNGGSRGGIESGSVKDYVMEWIGSEIKKERPSNNKEWINNGDGSSSVSKKKKKEKKRKPREWWKEEFCEELTRKKRKKKKKKKRGLSSISSIDSWFHRDDGASSVHDHNLNPTKRKKRNSIDWWVDGLSGELKSVMGKKNSQDSGLWCDVNVQKSGGVSSTPSMRGTVCYIAPECGGGGVLSEKCDVYSFGVLLLVLVSGRRPLQVTASPMSEFERANLISWAKQLACNGKLLELVDKSIHSLEKEQAVLCITIALLCLQRSPVKRPTMKEIVEMLSGVSEPPHLPFEFSPSPPMGFPFKSRKKAR

SEQ ID NO: 36603 - protein, 561 aa, Arabidopsis thaliana
  peptide (1)..(561): Ceres Seq. ID no. 13591440
  misc_feature (1)..(129): Homolog of NCBI NO: 22328878 NR Description: expressed protein [Arabidopsis thaliana]
  misc_feature (1)..(377): Homolog of NCBI NO: 15242183 NR Description: protein kinase family [Arabidopsis thaliana]
  misc_feature (1)..(392): Homolog of NCBI NO: 15235063 NR Description: protein kinase family [Arabidopsis thaliana]
  misc_feature (525)..(558): Homolog of NCBI NO: 30686865 NR Description: protein kinase family [Arabidopsis thaliana]
  misc_feature (1)..(335): Homolog of NCBI NO: 30686865 NR Description: protein kinase family [Arabidopsis thaliana]
  misc_feature (170)..(558): Homolog of NCBI NO: 15235063 NR Description: protein kinase family [Arabidopsis thaliana]
  misc_feature (132)..(559): Homolog of NCBI NO: 15242183 NR Description: protein kinase family [Arabidopsis thaliana]
  misc_feature (1)..(128): Homolog of NCBI NO: 15220862 NR Description: protein kinase family [Arabidopsis thaliana]
  misc_feature (305)..(561): Homolog of NCBI NO: 15220862 NR Description: protein kinase family [Arabidopsis thaliana]
  misc_feature (1)..(561): Homolog of NCBI NO: 37531832 NR Description: putative protein kinase [Oryza sativa (japonica
  misc_feature (1)..(129): Homolog of NCBI NO: 22328878 NR Description: expressed protein [Arabidopsis thaliana]
  misc_feature (1)..(377): Homolog of NCBI NO: 15242183 NR Description: protein kinase family [Arabidopsis thaliana]
  misc_feature (1)..(392): Homolog of NCBI NO: 15235063 NR Description: protein kinase family [Arabidopsis thaliana]
  misc_feature (525)..(558): Homolog of NCBI NO: 30686865 NR Description: protein kinase family [Arabidopsis thaliana]
  misc_feature (1)..(335): Homolog of NCBI NO: 30686865 NR Description: protein kinase family [Arabidopsis thaliana]
  misc_feature (170)..(558): Homolog of NCBI NO: 15235063 NR Description: protein kinase family [Arabidopsis thaliana]
  misc_feature (132)..(559): Homolog of NCBI NO: 15242183 NR Description: protein kinase family [Arabidopsis thaliana]
  misc_feature (1)..(128): Homolog of NCBI NO: 15220862 NR Description: protein kinase family [Arabidopsis thaliana]
  misc_feature (305)..(561): Homolog of NCBI NO: 15220862 NR Description: protein kinase family [Arabidopsis thaliana]
  misc_feature (1)..(561): Homolog of NCBI NO: 37531832 NR Description: putative protein kinase [Oryza sativa (japonica
MDTSAGSLQGEREFHNELSLSSHLIGSPHVVSLLGFSSDRRGRKLILVYELMANRSLQDALLDRKCVELMDWNKRFEIATDIAKGIEFLHHCCDPIIIHGDIKPSNILLDSDFKAKIGDFGLARVKSEDFDTRILIEEEDKSKDVVEDNGSILEETESVITVFEEGNNVVNLSPETCGISVLTETVASPGEKSGLSPENCAVSILTVEVGAASPAMASIPSPETCAISVLTDTGLSPESSKLKVGSKRDWWWKQDNNGGSRGGIESGSVKDYVMEWIGSEIKKERPSNNKEWINNGDGSSSVSKKKKKEKKRKPREWWKEEFCEELTRKKRKKKKKKKRGLSSISSIDSWFHRDDGASSVHDHNLNPTKRKKRNSIDWWVDGLSGELKSVMGKKNSQDSGLWCDVNVQKSGGVSSTPSMRGTVCYIAPECGGGGVLSEKCDVYSFGVLLLVLVSGRRPLQVTASPMSEFERANLISWAKQLACNGKLLELVDKSIHSLEKEQAVLCITIALLCLQRSPVKRPTMKEIVEMLSGVSEPPHLPFEFSPSPPMGFPFKSRKKAR

SEQ ID NO: 36604 - protein, 510 aa, Arabidopsis thaliana
  peptide (1)..(510): Ceres Seq. ID no. 13591441
  misc_feature (1)..(78): Homolog of NCBI NO: 22328878 NR Description: expressed protein [Arabidopsis thaliana]
  misc_feature (1)..(326): Homolog of NCBI NO: 15242183 NR Description: protein kinase family [Arabidopsis thaliana]
  misc_feature (1)..(341): Homolog of NCBI NO: 15235063 NR Description: protein kinase family [Arabidopsis thaliana]
  misc_feature (474)..(507): Homolog of NCBI NO: 30686865 NR Description: protein kinase family [Arabidopsis thaliana]
  misc_feature (1)..(284): Homolog of NCBI NO: 30686865 NR Description: protein kinase family [Arabidopsis thaliana]
  misc_feature (119)..(507): Homolog of NCBI NO: 15235063 NR Description: protein kinase family [Arabidopsis thaliana]
  misc_feature (81)..(508): Homolog of NCBI NO: 15242183 NR Description: protein kinase family [Arabidopsis thaliana]
  misc_feature (1)..(77): Homolog of NCBI NO: 15220862 NR Description: protein kinase family [Arabidopsis thaliana]
  misc_feature (254)..(510): Homolog of NCBI NO: 15220862 NR Description: protein kinase family [Arabidopsis thaliana]
  misc_feature (1)..(510): Homolog of NCBI NO: 37531832 NR Description: putative protein kinase [Oryza sativa (japonica
  misc_feature (1)..(78): Homolog of NCBI NO: 22328878 NR Description: expressed protein [Arabidopsis thaliana]
  misc_feature (1)..(326): Homolog of NCBI NO: 15242183 NR Description: protein kinase family [Arabidopsis thaliana]
  misc_feature (1)..(341): Homolog of NCBI NO: 15235063 NR Description: protein kinase family [Arabidopsis thaliana]
  misc_feature (474)..(507): Homolog of NCBI NO: 30686865 NR Description: protein kinase family [Arabidopsis thaliana]
  misc_feature (1)..(284): Homolog of NCBI NO: 30686865 NR Description: protein kinase family [Arabidopsis thaliana]
  misc_feature (119)..(507): Homolog of NCBI NO: 15235063 NR Description: protein kinase family [Arabidopsis thaliana]
  misc_feature (81)..(508): Homolog of NCBI NO: 15242183 NR Description: protein kinase family [Arabidopsis thaliana]
  misc_feature (1)..(77): Homolog of NCBI NO: 15220862 NR Description: protein kinase family [Arabidopsis thaliana]
  misc_feature (254)..(510): Homolog of NCBI NO: 15220862 NR Description: protein kinase family [Arabidopsis thaliana]
  misc_feature (1)..(510): Homolog of NCBI NO: 37531832 NR Description: putative protein kinase [Oryza sativa (japonica
MANRSLQDALLDRKCVELMDWNKRFEIATDIAKGIEFLHHCCDPIIIHGDIKPSNILLDSDFKAKIGDFGLARVKSEDFDTRILIEEEDKSKDVVEDNGSILEETESVITVFEEGNNVVNLSPETCGISVLTETVASPGEKSGLSPENCAVSILTVEVGAASPAMASIPSPETCAISVLTDTGLSPESSKLKVGSKRDWWWKQDNNGGSRGGIESGSVKDYVMEWIGSEIKKERPSNNKEWINNGDGSSSVSKKKKKEKKRKPREWWKEEFCEELTRKKRKKKKKKKRGLSSISSIDSWFHRDDGASSVHDHNLNPTKRKKRNSIDWWVDGLSGELKSVMGKKNSQDSGLWCDVNVQKSGGVSSTPSMRGTVCYIAPECGGGGVLSEKCDVYSFGVLLLVLVSGRRPLQVTASPMSEFERANLISWAKQLACNGKLLELVDKSIHSLEKEQAVLCITIALLCLQRSPVKRPTMKEIVEMLSGVSEPPHLPFEFSPSPPMGFPFKSRKKAR

SEQ ID NO: 36605 - DNA, 875 bp, Arabidopsis thaliana
  misc_feature (1)..(875): Ceres Seq. ID no. 12439596
  misc_feature: MA Experiment ID: 108462 Result: Up-regulated in Transcription
  misc_feature: MA Experiment 108462 PARAMETER Experiment Name: At_Germinating_Seeds_cDNA_P Parameter: Age (day) Value: 2 vs. 0
  misc_feature: MA Experiment 108462 PARAMETER Experiment Name: At_Germinating_Seeds_cDNA_P Parameter: Tissue Value: Germinating Seeds
  misc_feature: MA Experiment ID: 108463 Result: Up-regulated in Transcription
  misc_feature: MA Experiment 108463 PARAMETER Experiment Name: At_Germinating_Seeds_cDNA_P Parameter: Age (day) Value: 3 vs. 0
  misc_feature: MA Experiment 108463 PARAMETER Experiment Name: At_Germinating_Seeds_cDNA_P Parameter: Tissue Value: Germinating Seeds
  misc_feature: MA Experiment ID: 108464 Result: Up-regulated in Transcription
  misc_feature: MA Experiment 108464 PARAMETER Experiment Name: At_Germinating_Seeds_cDNA_P Parameter: Age (day) Value: 4 vs. 0
  misc_feature: MA Experiment 108464 PARAMETER Experiment Name: At_Germinating_Seeds_cDNA_P Parameter: Tissue Value: Germinating Seeds
  misc_feature: MA Experiment ID: 108469 Result: Up-regulated in Transcription
  misc_feature: MA Experiment ID: 108576 Result: Up-regulated in Transcription
  misc_feature: MA Experiment 108576 PARAMETER Experiment Name: At_42deg_Heat_cDNA_P Parameter: Temperature (deg C) Value: 42 vs. 22
  misc_feature: MA Experiment 108576 PARAMETER Experiment Name: At_42deg_Heat_cDNA_P Parameter: Timepoint (hr) Value: 1
  misc_feature: MA Experiment 108576 PARAMETER Experiment Name: At_42deg_Heat_cDNA_P Parameter: Tissue Value: Aerial
  misc_feature: MA Experiment ID: 108577 Result: Up-regulated in Transcription
  misc_feature: MA Experiment 108577 PARAMETER Experiment Name: At_42deg_Heat_cDNA_P Parameter: Temperature (deg C) Value: 42 vs. 22
  misc_feature: MA Experiment 108577 PARAMETER Experiment Name: At_42deg_Heat_cDNA_P Parameter: Timepoint (hr) Value: 6
  misc_feature: MA Experiment 108577 PARAMETER Experiment Name: At_42deg_Heat_cDNA_P Parameter: Tissue Value: Aerial
  misc_feature: MA Experiment ID: 108585 Result: Up-regulated in Transcription
  misc_feature: MA Experiment 108585 PARAMETER Experiment Name: At_5mM_NaNP_cDNA_P Parameter: Timepoint (hr) Value: 6
  misc_feature: MA Experiment 108585 PARAMETER Experiment Name: At_5mM_NaNP_cDNA_P Parameter: Tissue Value: Aerial
  misc_feature: MA Experiment 108585 PARAMETER Experiment Name: At_5mM_NaNP_cDNA_P Parameter: Treatment Value: null
  misc_feature: MA Experiment ID: 108594 Result: Down-regulated in Transcription
  misc_feature: MA Experiment 108594 PARAMETER Experiment Name: At_Ler-rhl_Root_cDNA_P Parameter: Plant Line Value: null
  misc_feature: MA Experiment ID: 108667 Result: Up-regulated in Transcription
  misc_feature: MA Experiment 108667 PARAMETER Experiment Name: At_2mM_SA_cDNA_P Parameter: Plant Line Value: WS
  misc_feature: MA Experiment 108667 PARAMETER Experiment Name: At_2mM_SA_cDNA_P Parameter: Timepoint (hr) Value: 1
  misc_feature: MA Experiment 108667 PARAMETER Experiment Name: At_2mM_SA_cDNA_P Parameter: Treatment Value: 2mM SA vs. No Treatment
  misc_feature: MA Experiment ID: 20000072 Result: Up-regulated in Transcription
  misc_feature: MA Experiment 20000072 PARAMETER Experiment Name: At_100uM_ABA_Mutants_cDNA_P Parameter: Plant Line Value: CS8105
  misc_feature: MA Experiment 20000072 PARAMETER Experiment Name: At_100uM_ABA_Mutants_cDNA_P Parameter: Timepoint (hr) Value: 6
  misc_feature: MA Experiment 20000072 PARAMETER Experiment Name: At_100uM_ABA_Mutants_cDNA_P Parameter: Tissue Value: Aerial
  misc_feature: MA Experiment 20000072 PARAMETER Experiment Name: At_100uM_ABA_Mutants_cDNA_P Parameter: Treatment Value: 100uM ABA vs. No Treatment
  misc_feature: MA Experiment ID: 20000086 Result: Up-regulated in Transcription
  misc_feature: MA Experiment 20000086 PARAMETER Experiment Name: At_100uM_ABA_Mutants_cDNA_P Parameter: Plant Line Value: CS22
  misc_feature: MA Experiment 20000086 PARAMETER Experiment Name: At_100uM_ABA_Mutants_cDNA_P Parameter: Timepoint (hr) Value: 6
  misc_feature: MA Experiment 20000086 PARAMETER Experiment Name: At_100uM_ABA_Mutants_cDNA_P Parameter: Tissue Value: Aerial
  misc_feature: MA Experiment 20000086 PARAMETER Experiment Name: At_100uM_ABA_Mutants_cDNA_P Parameter: Treatment Value: 100uM ABA vs. No Treatment
  misc_feature: MA Experiment ID: 20000088 Result: Up-regulated in Transcription
  misc_feature: MA Experiment 20000088 PARAMETER Experiment Name: At_100uM_ABA_Mutants_cDNA_P Parameter: Plant Line Value: Landsberg
  misc_feature: MA Experiment 20000088 PARAMETER Experiment Name: At_100uM_ABA_Mutants_cDNA_P Parameter: Timepoint (hr) Value: 6
  misc_feature: MA Experiment 20000088 PARAMETER Experiment Name: At_100uM_ABA_Mutants_cDNA_P Parameter: Tissue Value: Aerial
  misc_feature: MA Experiment 20000088 PARAMETER Experiment Name: At_100uM_ABA_Mutants_cDNA_P Parameter: Treatment Value: 100uM ABA vs. No Treatment
  misc_feature: MA Experiment ID: 20000090 Result: Up-regulated in Transcription
  misc_feature: MA Experiment ID: 20000093 Result: Up-regulated in Transcription
  misc_feature: MA Experiment 20000093 PARAMETER Experiment Name: At_42deg_Heat_cDNA_P Parameter: Temperature (deg C) Value: 42 vs. 22
  misc_feature: MA Experiment 20000093 PARAMETER Experiment Name: At_42deg_Heat_cDNA_P Parameter: Timepoint (hr) Value: 0.5
  misc_feature: MA Experiment 20000093 PARAMETER Experiment Name: At_42deg_Heat_cDNA_P Parameter: Tissue Value: Aerial
  misc_feature: MA Experiment ID: 20000111 Result: Up-regulated in Transcription
  misc_feature: MA Experiment 20000111 PARAMETER Experiment Name: At_42deg_Heat_cDNA_P Parameter: Temperature (deg C) Value: 42 vs. 22
  misc_feature: MA Experiment 20000111 PARAMETER Experiment Name: At_42deg_Heat_cDNA_P Parameter: Timepoint (hr) Value: 6
  misc_feature: MA Experiment 20000111 PARAMETER Experiment Name: At_42deg_Heat_cDNA_P Parameter: Tissue Value: Aerial
  misc_feature: MA Experiment ID: 20000112 Result: Up-regulated in Transcription
  misc_feature: MA Experiment 20000112 PARAMETER Experiment Name: At_42deg_Heat_cDNA_P Parameter: Temperature (deg C) Value: 42 vs. 22
  misc_feature: MA Experiment 20000112 PARAMETER Experiment Name: At_42deg_Heat_cDNA_P Parameter: Timepoint (hr) Value: 2
  misc_feature: MA Experiment 20000112 PARAMETER Experiment Name: At_42deg_Heat_cDNA_P Parameter: Tissue Value: Aerial
  misc_feature: MA Experiment ID: 20000113 Result: Up-regulated in Transcription
  misc_feature: MA Experiment 20000113 PARAMETER Experiment Name: At_42deg_Heat_cDNA_P Parameter: Temperature (deg C) Value: 42 vs. 22
  misc_feature: MA Experiment 20000113 PARAMETER Experiment Name: At_42deg_Heat_cDNA_P Parameter: Timepoint (hr) Value: 8
  misc_feature: MA Experiment 20000113 PARAMETER Experiment Name: At_42deg_Heat_cDNA_P Parameter: Tissue Value: Aerial
  misc_feature: MA Experiment ID: 20000144 Result: Up-regulated in Transcription
  misc_feature: MA Experiment 20000144 PARAMETER Experiment Name: At_42deg_Heat_cDNA_P Parameter: Temperature (deg C) Value: 42 vs. 22
  misc_feature: MA Experiment 20000144 PARAMETER Experiment Name: At_42deg_Heat_cDNA_P Parameter: Timepoint (hr) Value: 1
  misc_feature: MA Experiment 20000144 PARAMETER Experiment Name: At_42deg_Heat_cDNA_P Parameter: Tissue Value: Aerial
  misc_feature: MA Experiment ID: 20000179 Result: Down-regulated in Transcription
  misc_feature: MA Experiment 20000179 PARAMETER Experiment Name: At_Germinating_Seeds_P Parameter: Age (hr) Value: 6 vs. 0
  misc_feature: MA Experiment 20000179 PARAMETER Experiment Name: At_Germinating_Seeds_P Parameter: Tissue Value: Germinating Seeds
  misc_feature: MA Experiment ID: 20000180 Result: Down-regulated in Transcription
  misc_feature: MA Experiment 20000180 PARAMETER Experiment Name: At_Germinating_Seeds_P Parameter: Age (hr) Value: 24 vs. 0
  misc_feature: MA Experiment 20000180 PARAMETER Experiment Name: At_Germinating_Seeds_P Parameter: Tissue Value: Germinating Seeds
  misc_feature: MA Experiment ID: 20000182 Result: Up-regulated in Transcription
  misc_feature: MA Experiment 20000182 PARAMETER Experiment Name: At_2mM_SA_P Parameter: Age (day) Value: 14
  misc_feature: MA Experiment 20000182 PARAMETER Experiment Name: At_2mM_SA_P Parameter: Organism Value: A. thaliana
  misc_feature: MA Experiment 20000182 PARAMETER Experiment Name: At_2mM_SA_P Parameter: Plant Line Value: WS
  misc_feature: MA Experiment 20000182 PARAMETER Experiment Name: At_2mM_SA_P Parameter: Timepoint (hr) Value: 6
  misc_feature: MA Experiment 20000182 PARAMETER Experiment Name: At_2mM_SA_P Parameter: Tissue Value: Aerial
  misc_feature: MA Experiment 20000182 PARAMETER Experiment Name: At_2mM_SA_P Parameter: Treatment Value: 2mM SA vs. No Treatment
  misc_feature: MA Experiment ID: 20000184 Result: Up-regulated in Transcription
  misc_feature: MA Experiment 20000184 PARAMETER Experiment Name: At_Shoots__P Parameter: Age (day) Value: 7
  misc_feature: MA Experiment 20000184 PARAMETER Experiment Name: At_Shoots__P Parameter: Tissue Value: Shoots vs. Whole Plant
  misc_feature: MA Experiment ID: 20000185 Result: Up-regulated in Transcription
  misc_feature: MA Experiment 20000185 PARAMETER Experiment Name: At_Roots__P Parameter: Age (day) Value: 7 vs. 21
  misc_feature: MA Experiment 20000185 PARAMETER Experiment Name: At_Roots__P Parameter: Organism Value: A. thaliana
  misc_feature: MA Experiment 20000185 PARAMETER Experiment Name: At_Roots__P Parameter: Tissue Value: Roots vs. Whole Plant
  misc_feature: MA Experiment ID: 20000439 Result: Up-regulated in Transcription
  misc_feature: MA Experiment 20000439 PARAMETER Experiment Name: At_Roots__P Parameter: Age (day) Value: 14 vs. 21
  misc_feature: MA Experiment 20000439 PARAMETER Experiment Name: At_Roots__P Parameter: Organism Value: A. thaliana
  misc_feature: MA Experiment 20000439 PARAMETER Experiment Name: At_Roots__P Parameter: Tissue Value: Roots vs. Whole Plant
  misc_feature: MA Experiment ID: 20000452 Result: Up-regulated in Transcription
  misc_feature: MA Experiment 20000452 PARAMETER Experiment Name: At_CS6879_Shoots-Roots_P Parameter: Age (day) Value: 14
  misc_feature: MA Experiment 20000452 PARAMETER Experiment Name: At_CS6879_Shoots-Roots_P Parameter: Organism Value: A. thaliana
  misc_feature: MA Experiment 20000452 PARAMETER Experiment Name: At_CS6879_Shoots-Roots_P Parameter: Plant Line Value: CS6879 vs. WS
  misc_feature: MA Experiment 20000452 PARAMETER Experiment Name: At_CS6879_Shoots-Roots_P Parameter: Tissue Value: Shoots
  misc_feature: MA Experiment ID: 20000456 Result: Up-regulated in Transcription
  misc_feature: MA Experiment 20000456 PARAMETER Experiment Name: At_100uM_BA_P Parameter: Age (day) Value: 14
  misc_feature: MA Experiment 20000456 PARAMETER Experiment Name: At_100uM_BA_P Parameter: Organism Value: A. thaliana
  misc_feature: MA Experiment 20000456 PARAMETER Experiment Name: At_100uM_BA_P Parameter: Plant Line Value: WS
  misc_feature: MA Experiment 20000456 PARAMETER Experiment Name: At_100uM_BA_P Parameter: Timepoint (hr) Value: 6
  misc_feature: MA Experiment 20000456 PARAMETER Experiment Name: At_100uM_BA_P Parameter: Tissue Value: Aerial
  misc_feature: MA Experiment 20000456 PARAMETER Experiment Name: At_100uM_BA_P Parameter: Treatment Value: 100uM BA vs. No Treatment
  misc_feature: MA Experiment ID: 20000527 Result: Down-regulated in Transcription
  misc_feature: MA Experiment 20000527 PARAMETER Experiment Name: At_10percent_PEG_P Parameter: Age (day) Value: 20
  misc_feature: MA Experiment 20000527 PARAMETER Experiment Name: At_10percent_PEG_P Parameter: Organism Value: A. thaliana
  misc_feature: MA Experiment 20000527 PARAMETER Experiment Name: At_10percent_PEG_P Parameter: Plant Line Value: WS
  misc_feature: MA Experiment 20000527 PARAMETER Experiment Name: At_10percent_PEG_P Parameter: Timepoint (day) Value: 20
  misc_feature: MA Experiment 20000527 PARAMETER Experiment Name: At_10percent_PEG_P Parameter: Tissue Value: Whole Plant
  misc_feature: MA Experiment 20000527 PARAMETER Experiment Name: At_10percent_PEG_P Parameter: Treatment Value: 10percent PEG vs. No Treatment
  misc_feature: MA Experiment ID: 20000709 Result: Up-regulated in Transcription
  misc_feature: MA Experiment 20000709 PARAMETER Experiment Name: At_15mM_NH4NO3_L-to-H_P Parameter: Age (hr) Value: 14
  misc_feature: MA Experiment 20000709 PARAMETER Experiment Name: At_15mM_NH4NO3_L-to-H_P Parameter: Organism Value: A. thaliana
  misc_feature: MA Experiment 20000709 PARAMETER Experiment Name: At_15mM_NH4NO3_L-to-H_P Parameter: Plant Line Value: WS
  misc_feature: MA Experiment 20000709 PARAMETER Experiment Name: At_15mM_NH4NO3_L-to-H_P Parameter: Timepoint (hr) Value: 4
  misc_feature: MA Experiment 20000709 PARAMETER Experiment Name: At_15mM_NH4NO3_L-to-H_P Parameter: Tissue Value: Aerial
  misc_feature: MA Experiment 20000709 PARAMETER Experiment Name: At_15mM_NH4NO3_L-to-H_P Parameter: Treatment Value: 15mM NH4NO3 vs. 30mM Mannitol
  misc_feature: MA Experiment ID: 20001451 Result: Up-regulated in Transcription
  misc_feature: MA Experiment 20001451 PARAMETER Experiment Name: At_Far-red-induction_P Parameter: Age (day) Value: 7
  misc_feature: MA Experiment 20001451 PARAMETER Experiment Name: At_Far-red-induction_P Parameter: Light Value: Far-red vs. White
  misc_feature: MA Experiment 20001451 PARAMETER Experiment Name: At_Far-red-induction_P Parameter: Organism Value: A. thaliana
  misc_feature: MA Experiment 20001451 PARAMETER Experiment Name: At_Far-red-induction_P Parameter: Plant Line Value: Columbia
  misc_feature: MA Experiment 20001451 PARAMETER Experiment Name: At_Far-red-induction_P Parameter: Timepoint (hr) Value: 24
  misc_feature: MA Experiment 20001451 PARAMETER Experiment Name: At_Far-red-induction_P Parameter: Tissue Value: Whole Plant
atcagcgattggagtatagaaaaggtttaagcaaaatccatcaaagaagagttccttttcacaataatggcggatgaagtgatacttttggatttttggccgagtccattcggagtaagagcgagaatcgcgctgagagagaaaggagttgagtttgagtacagagaagagaatctgagagacaagagccctttgcttctccagatgaatccggttcacaagaagattccggttctcatccacaatggtaaaccggtttgtgaatccatgaacgttgttcagtacatcgacgaggtttggtccgacaaaaacccaatccttccttctgatccttaccagagagctcaagccagattttgggttgatttcgtggacaccaagctgtttgagccagcggataagatttggcaaacgaaaggagaggaacaagagacagccaagaaagagtatatagaagcactcaagattcttgaaactgagcttggagacaaaccttactttggtggagataccttcgggttcgtagacattgccatgactggatattacagctggttcgaagcatcagagaaactagctaacttcagcatcgaaccagagtgtcccacactgatggcttcggctaagaggtgtttgcagagagaaagcgtggttcagtcccttcatgattctgagaaaatccttgcgtttgcctataagattaggaagatatactgtgtctaaaagtcttattgattctttgaacgaaaaaaaaagtcttagaatttcatctcacgttacgtttctatgttcactgatttctatatgattttgttgtacctttctttctattttcaccaaataatatttgtttcttgtcactcaagaatatttgt

SEQ ID NO: 36606 - protein, 218 aa, Arabidopsis thaliana
  peptide (1)..(218): Ceres Seq. ID no. 12439597
  misc_feature (85)..(193): Pfam Name: Glutathione S-transferase, C-terminal domain Pfam Description: Glutathione S-transferase, C-terminal domain
  misc_feature (1)..(214): Homolog of NCBI NO: 21592644 NR Description: glutathione transferase, putative [Arabidopsis
  misc_feature (1)..(214): Homolog of NCBI NO: 18411929 NR Description: glutathione transferase, putative
  misc_feature (1)..(216): Homolog of NCBI NO: 8052535 NR Description: F3F9.13 [Arabidopsis thaliana]
  misc_feature (1)..(218): Homolog of NCBI NO: 21554364 NR Description: glutathione transferase, putative [Arabidopsis
  misc_feature (1)..(218): Homolog of NCBI NO: 15218304 NR Description: glutathione transferase, putative
MADEVILLDFWPSPFGVRARIALREKGVEFEYREENLRDKSPLLLQMNPVHKKIPVLIHNGKPVCESMNVVQYIDEVWSDKNPILPSDPYQRAQARFWVDFVDTKLFEPADKIWQTKGEEQETAKKEYIEALKILETELGDKPYFGGDTFGFVDIAMTGYYSWFEASEKLANFSIEPECPTLMASAKRCLQRESVVQSLHDSEKILAFAYKIRKIYCV

SEQ ID NO: 36607 - protein, 172 aa, Arabidopsis thaliana
  peptide (1)..(172): Ceres Seq. ID no. 12439598
  misc_feature (39)..(147): Pfam Name: Glutathione S-transferase, C-terminal domain Pfam Description: Glutathione S-transferase, C-terminal domain
  misc_feature (1)..(168): Homolog of NCBI NO: 21592644 NR Description: glutathione transferase, putative [Arabidopsis
  misc_feature (1)..(168): Homolog of NCBI NO: 18411929 NR Description: glutathione transferase, putative
  misc_feature (1)..(170): Homolog of NCBI NO: 8052535 NR Description: F3F9.13 [Arabidopsis thaliana]
  misc_feature (1)..(172): Homolog of NCBI NO: 21554364 NR Description: glutathione transferase, putative [Arabidopsis
  misc_feature (1)..(172): Homolog of NCBI NO: 15218304 NR Description: glutathione transferase, putative
MNPVHKKIPVLIHNGKPVCESMNVVQYIDEVWSDKNPILPSDPYQRAQARFWVDFVDTKLFEPADKIWQTKGEEQETAKKEYIEALKILETELGDKPYFGGDTFGFVDIAMTGYYSWFEASEKLANFSIEPECPTLMASAKRCLQRESVVQSLHDSEKILAFAYKIRKIYCV

SEQ ID NO: 36608 - protein, 151 aa, Arabidopsis thaliana
  peptide (1)..(151): Ceres Seq. ID no. 12439599
  misc_feature (18)..(126): Pfam Name: Glutathione S-transferase, C-terminal domain Pfam Description: Glutathione S-transferase, C-terminal domain
  misc_feature (1)..(147): Homolog of NCBI NO: 21592644 NR Description: glutathione transferase, putative [Arabidopsis
  misc_feature (1)..(147): Homolog of NCBI NO: 18411929 NR Description: glutathione transferase, putative
  misc_feature (1)..(149): Homolog of NCBI NO: 8052535 NR Description: F3F9.13 [Arabidopsis thaliana]
  misc_feature (1)..(151): Homolog of NCBI NO: 21554364 NR Description: glutathione transferase, putative [Arabidopsis
  misc_feature (1)..(151): Homolog of NCBI NO: 15218304 NR Description: glutathione transferase, putative
MNVVQYIDEVWSDKNPILPSDPYQRAQARFWVDFVDTKLFEPADKIWQTKGEEQETAKKEYIEALKILETELGDKPYFGGDTFGFVDIAMTGYYSWFEASEKLANFSIEPECPTLMASAKRCLQRESVVQSLHDSEKILAFAYKIRKIYCV

SEQ ID NO: 36609 - DNA, 769 bp, Arabidopsis thaliana
  misc_feature (1)..(769): Ceres Seq. ID no. 13489059
  misc_feature: MA Experiment ID: 20000182 Result: Up-regulated in Transcription
  misc_feature: MA Experiment 20000182 PARAMETER Experiment Name: At_2mM_SA_P Parameter: Age (day) Value: 14
  misc_feature: MA Experiment 20000182 PARAMETER Experiment Name: At_2mM_SA_P Parameter: Organism Value: A. thaliana
  misc_feature: MA Experiment 20000182 PARAMETER Experiment Name: At_2mM_SA_P Parameter: Plant Line Value: WS
  misc_feature: MA Experiment 20000182 PARAMETER Experiment Name: At_2mM_SA_P Parameter: Timepoint (hr) Value: 6
  misc_feature: MA Experiment 20000182 PARAMETER Experiment Name: At_2mM_SA_P Parameter: Tissue Value: Aerial
  misc_feature: MA Experiment 20000182 PARAMETER Experiment Name: At_2mM_SA_P Parameter: Treatment Value: 2mM SA vs. No Treatment
  misc_feature: MA Experiment ID: 20000184 Result: Down-regulated in Transcription
  misc_feature: MA Experiment 20000184 PARAMETER Experiment Name: At_Shoots__P Parameter: Age (day) Value: 7
  misc_feature: MA Experiment 20000184 PARAMETER Experiment Name: At_Shoots__P Parameter: Tissue Value: Shoots vs. Whole Plant
  misc_feature: MA Experiment ID: 20000227 Result: Down-regulated in Transcription
  misc_feature: MA Experiment 20000227 PARAMETER Experiment Name: At_Root-Tips-vs-Tops_P Parameter: Tissue Value: Root Tips vs. Root Tops
  misc_feature: MA Experiment ID: 20000234 Result: Down-regulated in Transcription
  misc_feature: MA Experiment 20000234 PARAMETER Experiment Name: At_Siliques_P Parameter: Age (day) Value: 21
  misc_feature: MA Experiment 20000234 PARAMETER Experiment Name: At_Siliques_P Parameter: Organism Value: A. thaliana
  misc_feature: MA Experiment 20000234 PARAMETER Experiment Name: At_Siliques_P Parameter: Plant Line Value: WS
  misc_feature: MA Experiment 20000234 PARAMETER Experiment Name: At_Siliques_P Parameter: Tissue Value: Less Than 5mm Siliques vs. Whole Plant
  misc_feature: MA Experiment ID: 20000235 Result: Down-regulated in Transcription
  misc_feature: MA Experiment 20000235 PARAMETER Experiment Name: At_Siliques_P Parameter: Age (day) Value: 21
  misc_feature: MA Experiment 20000235 PARAMETER Experiment Name: At_Siliques_P Parameter: Organism Value: A. thaliana
  misc_feature: MA Experiment 20000235 PARAMETER Experiment Name: At_Siliques_P Parameter: Plant Line Value: WS
  misc_feature: MA Experiment 20000235 PARAMETER Experiment Name: At_Siliques_P Parameter: Tissue Value: 5-10mm Siliques vs. Whole Plant
  misc_feature: MA Experiment ID: 20000264 Result: Up-regulated in Transcription
  misc_feature: MA Experiment 20000264 PARAMETER Experiment Name: At_Open_Flower_P Parameter: Age (day) Value: 21
  misc_feature: MA Experiment 20000264 PARAMETER Experiment Name: At_Open_Flower_P Parameter: Plant Line Value: WS
  misc_feature: MA Experiment 20000264 PARAMETER Experiment Name: At_Open_Flower_P Parameter: Tissue Value: Open Flower vs. Whole Plant
  misc_feature: MA Experiment ID: 20000265 Result: Down-regulated in Transcription
  misc_feature: MA Experiment 20000265 PARAMETER Experiment Name: At_Open_Flower_P Parameter: Age (day) Value: 21
  misc_feature: MA Experiment 20000265 PARAMETER Experiment Name: At_Open_Flower_P Parameter: Plant Line Value: WS
  misc_feature: MA Experiment 20000265 PARAMETER Experiment Name: At_Open_Flower_P Parameter: Tissue Value: Closed Flower vs. Whole Plant
  misc_feature: MA Experiment ID: 20000438 Result: Down-regulated in Transcription
  misc_feature: MA Experiment 20000438 PARAMETER Experiment Name: At_Shoots__P Parameter: Age (day) Value: 14
  misc_feature: MA Experiment 20000438 PARAMETER Experiment Name: At_Shoots__P Parameter: Tissue Value: Shoots vs. Whole Plant
  misc_feature: MA Experiment ID: 20000495 Result: Down-regulated in Transcription
  misc_feature: MA Experiment 20000495 PARAMETER Experiment Name: At_Guard_Cells_P Parameter: Harvest Date Value: 8/2/2002
  misc_feature: MA Experiment 20000495 PARAMETER Experiment Name: At_Guard_Cells_P Parameter: Organism Value: A. thaliana
  misc_feature: MA Experiment 20000495 PARAMETER Experiment Name: At_Guard_Cells_P Parameter: Tissue Value: Guard Cells vs. Leaves
  misc_feature: MA Experiment ID: 20000794 Result: Up-regulated in Transcription
  misc_feature: MA Experiment 20000794 PARAMETER Experiment Name: At_Petals_P Parameter: Age (day) Value: 23-25 days
  misc_feature: MA Experiment 20000794 PARAMETER Experiment Name: At_Petals_P Parameter: Plant Line Value: WS
  misc_feature: MA Experiment 20000794 PARAMETER Experiment Name: At_Petals_P Parameter: Tissue Value: Petals vs. Whole plant
  misc_feature: MA Experiment ID: 20001248 Result: Up-regulated in Transcription
  misc_feature: MA Experiment 20001248 PARAMETER Experiment Name: At_Far-red-induction_P Parameter: Age (day) Value: 7
  misc_feature: MA Experiment 20001248 PARAMETER Experiment Name: At_Far-red-induction_P Parameter: Light Value: Far-red vs. White
  misc_feature: MA Experiment 20001248 PARAMETER Experiment Name: At_Far-red-induction_P Parameter: Organism Value: A. thaliana
  misc_feature: MA Experiment 20001248 PARAMETER Experiment Name: At_Far-red-induction_P Parameter: Plant Line Value: Columbia
  misc_feature: MA Experiment 20001248 PARAMETER Experiment Name: At_Far-red-induction_P Parameter: Timepoint (hr) Value: 4
  misc_feature: MA Experiment 20001248 PARAMETER Experiment Name: At_Far-red-induction_P Parameter: Tissue Value: Whole Plant
  misc_feature: MA Experiment ID: 20001451 Result: Up-regulated in Transcription
  misc_feature: MA Experiment 20001451 PARAMETER Experiment Name: At_Far-red-induction_P Parameter: Age (day) Value: 7
  misc_feature: MA Experiment 20001451 PARAMETER Experiment Name: At_Far-red-induction_P Parameter: Light Value: Far-red vs. White
  misc_feature: MA Experiment 20001451 PARAMETER Experiment Name: At_Far-red-induction_P Parameter: Organism Value: A. thaliana
  misc_feature: MA Experiment 20001451 PARAMETER Experiment Name: At_Far-red-induction_P Parameter: Plant Line Value: Columbia
  misc_feature: MA Experiment 20001451 PARAMETER Experiment Name: At_Far-red-induction_P Parameter: Timepoint (hr) Value: 24
  misc_feature: MA Experiment 20001451 PARAMETER Experiment Name: At_Far-red-induction_P Parameter: Tissue Value: Whole Plant
  misc_feature: MA Experiment ID: 20001556 Result: Down-regulated in Transcription
  misc_feature: MA Experiment 20001556 PARAMETER Experiment Name: At_Drought_Soil_Dry_P Parameter: Age (day) Value: 26
  misc_feature: MA Experiment 20001556 PARAMETER Experiment Name: At_Drought_Soil_Dry_P Parameter: Organism Value: A. thaliana
  misc_feature: MA Experiment 20001556 PARAMETER Experiment Name: At_Drought_Soil_Dry_P Parameter: Plant Line Value: WS
  misc_feature: MA Experiment 20001556 PARAMETER Experiment Name: At_Drought_Soil_Dry_P Parameter: Post Timepoint (hr) Value: None
  misc_feature: MA Experiment 20001556 PARAMETER Experiment Name: At_Drought_Soil_Dry_P Parameter: Post-Treatment Value: None
  misc_feature: MA Experiment 20001556 PARAMETER Experiment Name: At_Drought_Soil_Dry_P Parameter: Timepoint (day) Value: 12
  misc_feature: MA Experiment 20001556 PARAMETER Experiment Name: At_Drought_Soil_Dry_P Parameter: Treatment Value: Drought vs. No Drought
  misc_feature: MA Experiment ID: 20001904 Result: Down-regulated in Transcription
  misc_feature: MA Experiment 20001904 PARAMETER Experiment Name: At_Drought_Reproduction_P Parameter: Age (day) Value: 37
  misc_feature: MA Experiment 20001904 PARAMETER Experiment Name: At_Drought_Reproduction_P Parameter: Organism Value: A. thaliana
  misc_feature: MA Experiment 20001904 PARAMETER Experiment Name: At_Drought_Reproduction_P Parameter: Plant Line Value: WS
  misc_feature: MA Experiment 20001904 PARAMETER Experiment Name: At_Drought_Reproduction_P Parameter: Timepoint (day) Value: 7
  misc_feature: MA Experiment 20001904 PARAMETER Experiment Name: At_Drought_Reproduction_P Parameter: Tissue Value: Rosettes
  misc_feature: MA Experiment 20001904 PARAMETER Experiment Name: At_Drought_Reproduction_P Parameter: Treatment Value: Drought vs. No Drought
atggcggaggaatcgtacgacgaagagtgcgactacctattcaaggcggtgctgataggagactccgccgtcggaaaatcaaacctcctttcgaggttctcgagagatgagtttcggttagactctaaaccgaccatcggagtagactttgcttaccggaatgttcgcgtgggcgataagactataaaggctcagatatgggacaccgccggccaagaaagatttagagcaataacgagttcgtattaccgtggagccttgggagctttactaatctacgacatcacaagacgaatcactttcaaaaacattgagaaatggttgtcggagctcagaggcttctccagtcccgagactgtcgttgttctcgtcggtaacaaatccgatctcgggcagtctagagaagttgaagaagaagagggtaagactctagcagaatcagaaggtctctattttctcgaaacatcggctttagagaaccaaaacgttgaagaagcgtttctaagcatgatcggacggatacatgaggttttgactcagaaaatcgttttagacaatagactcaacggtgacggtaacaacgaaagtaacggtgctgtcgttccgcccggtaaagagattgtgaatattcatgaagttaccgccactcgaccgttgagtacttctttgtccaattgttgctacaagtaaataaactgatgatcatctatttttatattgttatatgatatattcgataatgtagagttttataattgttgctacaagt

SEQ ID NO: 36610 - protein, 229 aa, Arabidopsis thaliana
  peptide (1)..(229): Ceres Seq. ID no. 13489060
  misc_feature (15)..(176): Pfam Name: Ras family Pfam Description: Ras family
  misc_feature (1)..(207): Homolog of NCBI NO: 21536533 NR Description: Rab-type small GTP-binding protein-like
  misc_feature (1)..(227): Homolog of NCBI NO: 15219955 NR Description: GTP binding protein, putative [Arabidopsis
  misc_feature (7)..(227): Homolog of NCBI NO: 29294722 NR Description: Unknown (protein for MGC:55760) [Danio rerio]
  misc_feature (1)..(207): Homolog of NCBI NO: 15242483 NR Description: GTP-binding protein, putative [Arabidopsis
  misc_feature (1)..(227): Homolog of NCBI NO: 1370152 NR Description: RAB11F [Lotus japonicus]
  misc_feature (1)..(229): Homolog of NCBI NO: 15219515 NR Description: Ras family GTP-binding protein [Arabidopsis
  misc_feature (1)..(74): Homolog of NCBI NO: 8671779 NR Description: T10O22.18 [Arabidopsis thaliana]
  misc_feature (72)..(207): Homolog of NCBI NO: 8671779 NR Description: T10O22.18 [Arabidopsis thaliana]
  misc_feature (1)..(207): Homolog of NCBI NO: 15221005 NR Description: Ras family GTP-binding protein [Arabidopsis
  misc_feature (1)..(207): Homolog of NCBI NO: 9719734 NR Description: Contains similarity to ras-related GTP binding from Oryza sativa gb|D13758 and is a member of the Ras PF|00071
MAEESYDEECDYLFKAVLIGDSAVGKSNLLSRFSRDEFRLDSKPTIGVDFAYRNVRVGDKTIKAQIWDTAGQERFRAITSSYYRGALGALLIYDITRRITFKNIEKWLSELRGFSSPETVVVLVGNKSDLGQSREVEEEEGKTLAESEGLYFLETSALENQNVEEAFLSMIGRIHEVLTQKIVLDNRLNGDGNNESNGAVVPPGKEIVNIHEVTATRPLSTSLSNCCYK

SEQ ID NO: 36611 - DNA, 609 bp, Arabidopsis thaliana
  misc_feature (1)..(609): Ceres Seq. ID no. 13576687
  misc_feature: MA Experiment ID: 20000180 Result: Up-regulated in Transcription
  misc_feature: MA Experiment 20000180 PARAMETER Experiment Name: At_Germinating_Seeds_P Parameter: Age (hr) Value: 24 vs. 0
  misc_feature: MA Experiment 20000180 PARAMETER Experiment Name: At_Germinating_Seeds_P Parameter: Tissue Value: Germinating Seeds
  misc_feature: MA Experiment ID: 20000185 Result: Down-regulated in Transcription
  misc_feature: MA Experiment 20000185 PARAMETER Experiment Name: At_Roots__P Parameter: Age (day) Value: 7 vs. 21
  misc_feature: MA Experiment 20000185 PARAMETER Experiment Name: At_Roots__P Parameter: Organism Value: A. thaliana
  misc_feature: MA Experiment 20000185 PARAMETER Experiment Name: At_Roots__P Parameter: Tissue Value: Roots vs. Whole Plant
  misc_feature: MA Experiment ID: 20000264 Result: Down-regulated in Transcription
  misc_feature: MA Experiment 20000264 PARAMETER Experiment Name: At_Open_Flower_P Parameter: Age (day) Value: 21
  misc_feature: MA Experiment 20000264 PARAMETER Experiment Name: At_Open_Flower_P Parameter: Plant Line Value: WS
  misc_feature: MA Experiment 20000264 PARAMETER Experiment Name: At_Open_Flower_P Parameter: Tissue Value: Open Flower vs. Whole Plant
  misc_feature: MA Experiment ID: 20000438 Result: Up-regulated in Transcription
  misc_feature: MA Experiment 20000438 PARAMETER Experiment Name: At_Shoots__P Parameter: Age (day) Value: 14
  misc_feature: MA Experiment 20000438 PARAMETER Experiment Name: At_Shoots__P Parameter: Tissue Value: Shoots vs. Whole Plant
  misc_feature: MA Experiment ID: 20000439 Result: Down-regulated in Transcription
  misc_feature: MA Experiment 20000439 PARAMETER Experiment Name: At_Roots__P Parameter: Age (day) Value: 14 vs. 21
  misc_feature: MA Experiment 20000439 PARAMETER Experiment Name: At_Roots__P Parameter: Organism Value: A. thaliana
  misc_feature: MA Experiment 20000439 PARAMETER Experiment Name: At_Roots__P Parameter: Tissue Value: Roots vs. Whole Plant
  misc_feature: MA Experiment ID: 20000794 Result: Down-regulated in Transcription
  misc_feature: MA Experiment 20000794 PARAMETER Experiment Name: At_Petals_P Parameter: Age (day) Value: 23-25 days
  misc_feature: MA Experiment 20000794 PARAMETER Experiment Name: At_Petals_P Parameter: Plant Line Value: WS
  misc_feature: MA Experiment 20000794 PARAMETER Experiment Name: At_Petals_P Parameter: Tissue Value: Petals vs. Whole plant
  misc_feature: MA Experiment ID: 20001248 Result: Down-regulated in Transcription
  misc_feature: MA Experiment 20001248 PARAMETER Experiment Name: At_Far-red-induction_P Parameter: Age (day) Value: 7
  misc_feature: MA Experiment 20001248 PARAMETER Experiment Name: At_Far-red-induction_P Parameter: Light Value: Far-red vs. White
  misc_feature: MA Experiment 20001248 PARAMETER Experiment Name: At_Far-red-induction_P Parameter: Organism Value: A. thaliana
  misc_feature: MA Experiment 20001248 PARAMETER Experiment Name: At_Far-red-induction_P Parameter: Plant Line Value: Columbia
  misc_feature: MA Experiment 20001248 PARAMETER Experiment Name: At_Far-red-induction_P Parameter: Timepoint (hr) Value: 4
  misc_feature: MA Experiment 20001248 PARAMETER Experiment Name: At_Far-red-induction_P Parameter: Tissue Value: Whole Plant
  misc_feature: MA Experiment ID: 20001450 Result: Down-regulated in Transcription
  misc_feature: MA Experiment 20001450 PARAMETER Experiment Name: At_Far-red-induction_P Parameter: Age (day) Value: 7
  misc_feature: MA Experiment 20001450 PARAMETER Experiment Name: At_Far-red-induction_P Parameter: Light Value: Far-red vs. White
  misc_feature: MA Experiment 20001450 PARAMETER Experiment Name: At_Far-red-induction_P Parameter: Organism Value: A. thaliana
  misc_feature: MA Experiment 20001450 PARAMETER Experiment Name: At_Far-red-induction_P Parameter: Plant Line Value: Columbia
  misc_feature: MA Experiment 20001450 PARAMETER Experiment Name: At_Far-red-induction_P Parameter: Timepoint (hr) Value: 8
  misc_feature: MA Experiment 20001450 PARAMETER Experiment Name: At_Far-red-induction_P Parameter: Tissue Value: Whole Plant
  misc_feature: MA Experiment ID: 20001451 Result: Down-regulated in Transcription
  misc_feature: MA Experiment 20001451 PARAMETER Experiment Name: At_Far-red-induction_P Parameter: Age (day) Value: 7
  misc_feature: MA Experiment 20001451 PARAMETER Experiment Name: At_Far-red-induction_P Parameter: Light Value: Far-red vs. White
  misc_feature: MA Experiment 20001451 PARAMETER Experiment Name: At_Far-red-induction_P Parameter: Organism Value: A. thaliana
  misc_feature: MA Experiment 20001451 PARAMETER Experiment Name: At_Far-red-induction_P Parameter: Plant Line Value: Columbia
  misc_feature: MA Experiment 20001451 PARAMETER Experiment Name: At_Far-red-induction_P Parameter: Timepoint (hr) Value: 24
  misc_feature: MA Experiment 20001451 PARAMETER Experiment Name: At_Far-red-induction_P Parameter: Tissue Value: Whole Plant
  misc_feature: MA Experiment ID: 20001557 Result: Down-regulated in Transcription
  misc_feature: MA Experiment 20001557 PARAMETER Experiment Name: At_Drought_Soil_Dry_P Parameter: Age (day) Value: 27
  misc_feature: MA Experiment 20001557 PARAMETER Experiment Name: At_Drought_Soil_Dry_P Parameter: Organism Value: A. thaliana
  misc_feature: MA Experiment 20001557 PARAMETER Experiment Name: At_Drought_Soil_Dry_P Parameter: Plant Line Value: WS
  misc_feature: MA Experiment 20001557 PARAMETER Experiment Name: At_Drought_Soil_Dry_P Parameter: Post Timepoint (hr) Value: 3
  misc_feature: MA Experiment 20001557 PARAMETER Experiment Name: At_Drought_Soil_Dry_P Parameter: Post-Treatment Value: Re-Water vs. No Drought
  misc_feature: MA Experiment 20001557 PARAMETER Experiment Name: At_Drought_Soil_Dry_P Parameter: Timepoint (day) Value: 13
  misc_feature: MA Experiment 20001557 PARAMETER Experiment Name: At_Drought_Soil_Dry_P Parameter: Treatment Value: Drought vs. No Drought
  misc_feature: MA Experiment ID: 20001904 Result: Down-regulated in Transcription
  misc_feature: MA Experiment 20001904 PARAMETER Experiment Name: At_Drought_Reproduction_P Parameter: Age (day) Value: 37
  misc_feature: MA Experiment 20001904 PARAMETER Experiment Name: At_Drought_Reproduction_P Parameter: Organism Value: A. thaliana
  misc_feature: MA Experiment 20001904 PARAMETER Experiment Name: At_Drought_Reproduction_P Parameter: Plant Line Value: WS
  misc_feature: MA Experiment 20001904 PARAMETER Experiment Name: At_Drought_Reproduction_P Parameter: Timepoint (day) Value: 7
  misc_feature: MA Experiment 20001904 PARAMETER Experiment Name: At_Drought_Reproduction_P Parameter: Tissue Value: Rosettes
  misc_feature: MA Experiment 20001904 PARAMETER Experiment Name: At_Drought_Reproduction_P Parameter: Treatment Value: Drought vs. No Drought
  misc_feature: MA Experiment ID: 20001905 Result: Down-regulated in Transcription
  misc_feature: MA Experiment 20001905 PARAMETER Experiment Name: At_Drought_Reproduction_P Parameter: Age (day) Value: 40
  misc_feature: MA Experiment 20001905 PARAMETER Experiment Name: At_Drought_Reproduction_P Parameter: Organism Value: A. thaliana
  misc_feature: MA Experiment 20001905 PARAMETER Experiment Name: At_Drought_Reproduction_P Parameter: Plant Line Value: WS
  misc_feature: MA Experiment 20001905 PARAMETER Experiment Name: At_Drought_Reproduction_P Parameter: Timepoint (day) Value: 10
  misc_feature: MA Experiment 20001905 PARAMETER Experiment Name: At_Drought_Reproduction_P Parameter: Tissue Value: Rosettes
  misc_feature: MA Experiment 20001905 PARAMETER Experiment Name: At_Drought_Reproduction_P Parameter: Treatment Value: Drought vs. No Drought
  misc_feature: MA Experiment ID: 20001906 Result: Down-regulated in Transcription
  misc_feature: MA Experiment 20001906 PARAMETER Experiment Name: At_Drought_Reproduction_P Parameter: Age (day) Value: 35
  misc_feature: MA Experiment 20001906 PARAMETER Experiment Name: At_Drought_Reproduction_P Parameter: Organism Value: A. thaliana
  misc_feature: MA Experiment 20001906 PARAMETER Experiment Name: At_Drought_Reproduction_P Parameter: Plant Line Value: WS
  misc_feature: MA Experiment 20001906 PARAMETER Experiment Name: At_Drought_Reproduction_P Parameter: Timepoint (day) Value: 5
  misc_feature: MA Experiment 20001906 PARAMETER Experiment Name: At_Drought_Reproduction_P Parameter: Tissue Value: Siliques
  misc_feature: MA Experiment 20001906 PARAMETER Experiment Name: At_Drought_Reproduction_P Parameter: Treatment Value: Drought vs. No Drought
  misc_feature: MA Experiment ID: 20001908 Result: Down-regulated in Transcription
  misc_feature: MA Experiment 20001908 PARAMETER Experiment Name: At_Drought_Reproduction_P Parameter: Age (day) Value: 40
  misc_feature: MA Experiment 20001908 PARAMETER Experiment Name: At_Drought_Reproduction_P Parameter: Organism Value: A. thaliana
  misc_feature: MA Experiment 20001908 PARAMETER Experiment Name: At_Drought_Reproduction_P Parameter: Plant Line Value: WS
  misc_feature: MA Experiment 20001908 PARAMETER Experiment Name: At_Drought_Reproduction_P Parameter: Timepoint (day) Value: 10
  misc_feature: MA Experiment 20001908 PARAMETER Experiment Name: At_Drought_Reproduction_P Parameter: Tissue Value: Siliques
  misc_feature: MA Experiment 20001908 PARAMETER Experiment Name: At_Drought_Reproduction_P Parameter: Treatment Value: Drought vs. No Drought
acaaccaaaaacaagaacaacagacacatagagatgagccggtgcggctctcttgggctctatgccccaaatgctttgccatctctctccttgaagccacgcagtgtcaaatctcctttctgtattacatctcacaccaaacccaacgacactcttcttcataatgttaacaagatgagagcaaaggcctgtgatatacttggagcaaagaagacaatcttggcagctcaactcggggcagttcttgccacgattgaccatccagccttagcaataacaggagttaacaaccagcaggaattgagcagtgttgtgctcgatatcgggatcatatccgtttggtacttcctagtaatgccaccaatcatcatgaactggctaagagtaagatggtacagaaggaagttcttcgagatgtatttacagttcatgttcgtcttcatgttcttccccgggctactgttatgggcaccatttctcaacttcaggaagttcccaagagatcctaatatgaagaatccttgggacaaaccaacagacccagactctataaagaacgtttacctcaaatacccatatgcgacgccagaagattacgatctcgattaa

SEQ ID NO: 36612 - protein, 202 aa, Arabidopsis thaliana
  peptide (1)..(202): Ceres Seq. ID no. 13576688
  misc_feature (115)..(167): Homolog of NCBI NO: 1085867 NR Description: hypothetical 8.6K protein - Cyanobacterium
  misc_feature (115)..(163): Homolog of NCBI NO: 33862740 NR Description: hypothetical [Prochlorococcus marinus str. MIT
  misc_feature (115)..(167): Homolog of NCBI NO: 17232301 NR Description: inorganic carbon transport [Nostoc sp. PCC 7120]
  misc_feature (111)..(167): Homolog of NCBI NO: 22652012 NR Description: NADH dehydrogenase subunit L [Synechococcus sp.
  misc_feature (99)..(163): Homolog of NCBI NO: 33866055 NR Description: possible inorganic carbon transport protein
  misc_feature (96)..(163): Homolog of NCBI NO: 33861127 NR Description: NADH dehydrogenase subunit NdhL (ndhL)
  misc_feature (104)..(170): Homolog of NCBI NO: 22298248 NR Description: NADH dehydrogenase subunit [Thermosynechococcus
  misc_feature (12)..(152): Homolog of NCBI NO: 25373317 NR Description: hypothetical protein F15H11.1 [imported] -
  misc_feature (12)..(202): Homolog of NCBI NO: 15223241 NR Description: expressed protein [Arabidopsis thaliana]
TTKNKNNRHIEMSRCGSLGLYAPNALPSLSLKPRSVKSPFCITSHTKPNDTLLHNVNKMRAKACDILGAKKTILAAQLGAVLATIDHPALAITGVNNQQELSSVVLDIGIISVWYFLVMPPIIMNWLRVRWYRRKFFEMYLQFMFVFMFFPGLLLWAPFLNFRKFPRDPNMKNPWDKPTDPDSIKNVYLKYPYATPEDYDLD

SEQ ID NO: 36613 - protein, 191 aa, Arabidopsis thaliana
  peptide (1)..(191): Ceres Seq. ID no. 13576689
  misc_feature (104)..(156): Homolog of NCBI NO: 1085867 NR Description: hypothetical 8.6K protein - Cyanobacterium
  misc_feature (104)..(152): Homolog of NCBI NO: 33862740 NR Description: hypothetical [Prochlorococcus marinus str. MIT
  misc_feature (104)..(156): Homolog of NCBI NO: 17232301 NR Description: inorganic carbon transport [Nostoc sp. PCC 7120]
  misc_feature (100)..(156): Homolog of NCBI NO: 22652012 NR Description: NADH dehydrogenase subunit L [Synechococcus sp.
  misc_feature (88)..(152): Homolog of NCBI NO: 33866055 NR Description: possible inorganic carbon transport protein
  misc_feature (85)..(152): Homolog of NCBI NO: 33861127 NR Description: NADH dehydrogenase subunit NdhL (ndhL)
  misc_feature (93)..(159): Homolog of NCBI NO: 22298248 NR Description: NADH dehydrogenase subunit [Thermosynechococcus
  misc_feature (1)..(141): Homolog of NCBI NO: 25373317 NR Description: hypothetical protein F15H11.1 [imported] -
  misc_feature (1)..(191): Homolog of NCBI NO: 15223241 NR Description: expressed protein [Arabidopsis thaliana]
MSRCGSLGLYAPNALPSLSLKPRSVKSPFCITSHTKPNDTLLHNVNKMRAKACDILGAKKTILAAQLGAVLATIDHPALAITGVNNQQELSSVVLDIGIISVWYFLVMPPIIMNWLRVRWYRRKFFEMYLQFMFVFMFFPGLLLWAPFLNFRKFPRDPNMKNPWDKPTDPDSIKNVYLKYPYATPEDYDLD

SEQ ID NO: 36614 - protein, 144 aa, Arabidopsis thaliana
  peptide (1)..(144): Ceres Seq. ID no. 13576690
  misc_feature (57)..(109): Homolog of NCBI NO: 1085867 NR Description: hypothetical 8.6K protein - Cyanobacterium
  misc_feature (57)..(105): Homolog of NCBI NO: 33862740 NR Description: hypothetical [Prochlorococcus marinus str. MIT
  misc_feature (57)..(109): Homolog of NCBI NO: 17232301 NR Description: inorganic carbon transport [Nostoc sp. PCC 7120]
  misc_feature (53)..(109): Homolog of NCBI NO: 22652012 NR Description: NADH dehydrogenase subunit L [Synechococcus sp.
  misc_feature (41)..(105): Homolog of NCBI NO: 33866055 NR Description: possible inorganic carbon transport protein
  misc_feature (38)..(105): Homolog of NCBI NO: 33861127 NR Description: NADH dehydrogenase subunit NdhL (ndhL)
  misc_feature (46)..(112): Homolog of NCBI NO: 22298248 NR Description: NADH dehydrogenase subunit [Thermosynechococcus
  misc_feature (1)..(94): Homolog of NCBI NO: 25373317 NR Description: hypothetical protein F15H11.1 [imported] -
  misc_feature (1)..(144): Homolog of NCBI NO: 15223241 NR Description: expressed protein [Arabidopsis thaliana]
MRAKACDILGAKKTILAAQLGAVLATIDHPALAITGVNNQQELSSVVLDIGIISVWYFLVMPPIIMNWLRVRWYRRKFFEMYLQFMFVFMFFPGLLLWAPFLNFRKFPRDPNMKNPWDKPTDPDSIKNVYLKYPYATPEDYDLD

SEQ ID NO: 36615 - DNA, 1482 bp, Arabidopsis thaliana
  misc_feature (1)..(1482): Ceres Seq. ID no. 12348643
  misc_feature: MA Experiment ID: 108573 Result: Up-regulated in Transcription
  misc_feature: MA Experiment 108573 PARAMETER Experiment Name: At_Drought_cDNA_P Parameter: Timepoint (hr) Value: 6
  misc_feature: MA Experiment 108573 PARAMETER Experiment Name: At_Drought_cDNA_P Parameter: Tissue Value: Aerial
  misc_feature: MA Experiment 108573 PARAMETER Experiment Name: At_Drought_cDNA_P Parameter: Treatment Value: Drought vs. No Drought
  misc_feature: MA Experiment ID: 108579 Result: Down-regulated in Transcription
  misc_feature: MA Experiment 108579 PARAMETER Experiment Name: At_4deg_Cold_cDNA_P Parameter: Temperature (deg C) Value: 4 vs. 22
  misc_feature: MA Experiment 108579 PARAMETER Experiment Name: At_4deg_Cold_cDNA_P Parameter: Timepoint (hr) Value: 6
  misc_feature: MA Experiment 108579 PARAMETER Experiment Name: At_4deg_Cold_cDNA_P Parameter: Tissue Value: Aerial
  misc_feature: MA Experiment ID: 20001905 Result: Down-regulated in Transcription
  misc_feature: MA Experiment 20001905 PARAMETER Experiment Name: At_Drought_Reproduction_P Parameter: Age (day) Value: 40
  misc_feature: MA Experiment 20001905 PARAMETER Experiment Name: At_Drought_Reproduction_P Parameter: Organism Value: A. thaliana
  misc_feature: MA Experiment 20001905 PARAMETER Experiment Name: At_Drought_Reproduction_P Parameter: Plant Line Value: WS
  misc_feature: MA Experiment 20001905 PARAMETER Experiment Name: At_Drought_Reproduction_P Parameter: Timepoint (day) Value: 10
  misc_feature: MA Experiment 20001905 PARAMETER Experiment Name: At_Drought_Reproduction_P Parameter: Tissue Value: Rosettes
  misc_feature: MA Experiment 20001905 PARAMETER Experiment Name: At_Drought_Reproduction_P Parameter: Treatment Value: Drought vs. No Drought
aaatggatagtgaaggagcttcaagcgagtcttcttcttctggagatcagctcgagaagtggacagagtagtttcacatttgatttcagtttcattccgcacaatcaaatcggttgatgatttgtttgacttctttcagagagcaggatgagctgaagaagaaactgatcgcgtacgatgacttcacatggaagttatcttcatcaacggaactgtctcagggatcggagatacttaagtatgttggaggtgtagacatgagcttttgcaaagaagattcttccgtcgcatgcgcttgtctcgtcgttcttgagcttccttctctccgtgtagtccaccatgacttctctcttctccgcctccatgttccttatgtccctggatttcttgcctttcgtgaggctccggttcttttgcagattctgcagaagatgagagatgagaagcatccattctatcctcaggtactgatggtggatggaaatggaatacttcatccacgaggtataaacacacaactttacctttgttttgtagttgcatttcaagctctgtaattatggtgttagatgtaattgtcttctataggatttggcttggcgtgtcatttaggtgttcttgctcacctaccaaccattggggtcggaaagaatctgcatcatgtggatggtctgaatcaatctgaggttaaacagtcgcttcagctccaaataaacgagcatgagcaaactatcactttggtaggaaactctggaattacatggggagtagtaagtgactttgactgaacatctactgtagttgttgtgtctctttggtaataccgcgttatattagtagtgaattatcagttttagcaacgaaacttctccatagttgtggttttgataatcttgtgtaagatagtgaatttaatgatcaagttttacatattacgttcaacagggatttaggccaactctgagttctctaaagcccatatatgtatcggttggccatcgcatatcactggactctgccgttgaagttgtcaagataacctgcaagtaccgtgttccagaacctattagacaggcagatattagatcaagagcatatctccagaagcatcaaactgagtcttttaaagaactggcagtgcgaccaccggatcagactgaaccttaatccctcaagcaaccaagaacactattccacattacatagaaactctccaaagtctttaccaaagattgttaaatggacagattcaggcactgaagatccgccccaattatctccttcatttatctcactgacttgaagattgcaagctaaccaaggtaatcatgttatatccgatacattggaatttcctttccatacataccttaaacaagtgtaaatagaaaggctaggcaactggtaatttggttgtttgggcactgtatattgggagattttggggttctcgacaaacaattctatagctttgggtttggt

SEQ ID NO: 36616 - protein, 146 aa, Arabidopsis thaliana
  peptide (1)..(146): Ceres Seq. ID no. 12348644
  misc_feature (11)..(137): Homolog of NCBI NO: 19115244 NR Description: putative endonuclease [Schizosaccharomyces pombe]
  misc_feature (46)..(130): Homolog of NCBI NO: 15606007 NR Description: hypothetical protein [Aquifex aeolicus]
  misc_feature (79)..(137): Homolog of NCBI NO: 28893575 NR Description: RIKEN cDNA A730011L01 gene [Mus musculus]
  misc_feature (8)..(73): Homolog of NCBI NO: 40555767 NR Description: Unknown (protein for MGC:74455) [Homo sapiens]
  misc_feature (9)..(73): Homolog of NCBI NO: 21751158 NR Description: unnamed protein product [Homo sapiens]
  misc_feature (8)..(137): Homolog of NCBI NO: 34875599 NR Description: similar to chromosome 17 open reading frame 27
  misc_feature (8)..(137): Homolog of NCBI NO: 31542775 NR Description: hypothetical protein FLJ35220 [Homo sapiens]
  misc_feature (10)..(137): Homolog of NCBI NO: 28828773 NR Description: similar to Arabidopsis thaliana (Mouse-ear
  misc_feature (9)..(146): Homolog of NCBI NO: 7486498 NR Description: hypothetical protein F6E21.70 - Arabidopsis
  misc_feature (9)..(137): Homolog of NCBI NO: 18417747 NR Description: putative protein
MICLTSFREQDELKKKLIAYDDFTWKLSSSTELSQGSEILKYVGGVDMSFCKEDSSVACACLVVLELPSLRVVHHDFSLLRLHVPYVPGFLAFREAPVLLQILQKMRDEKHPFYPQVLMVDGNGILHPRGINTQLYLCFVVAFQAL

SEQ ID NO: 36617 - protein, 99 aa, Arabidopsis thaliana
  peptide (1)..(99): Ceres Seq. ID no. 12348645
  misc_feature (1)..(90): Homolog of NCBI NO: 19115244 NR Description: putative endonuclease [Schizosaccharomyces pombe]
  misc_feature (1)..(83): Homolog of NCBI NO: 15606007 NR Description: hypothetical protein [Aquifex aeolicus]
  misc_feature (32)..(90): Homolog of NCBI NO: 28893575 NR Description: RIKEN cDNA A730011L01 gene [Mus musculus]
  misc_feature (1)..(26): Homolog of NCBI NO: 40555767 NR Description: Unknown (protein for MGC:74455) [Homo sapiens]
  misc_feature (1)..(26): Homolog of NCBI NO: 21751158 NR Description: unnamed protein product [Homo sapiens]
  misc_feature (1)..(90): Homolog of NCBI NO: 34875599 NR Description: similar to chromosome 17 open reading frame 27
  misc_feature (1)..(90): Homolog of NCBI NO: 31542775 NR Description: hypothetical protein FLJ35220 [Homo sapiens]
  misc_feature (1)..(90): Homolog of NCBI NO: 28828773 NR Description: similar to Arabidopsis thaliana (Mouse-ear
  misc_feature (1)..(99): Homolog of NCBI NO: 7486498 NR Description: hypothetical protein F6E21.70 - Arabidopsis
  misc_feature (1)..(90): Homolog of NCBI NO: 18417747 NR Description: putative protein
MSFCKEDSSVACACLVVLELPSLRVVHHDFSLLRLHVPYVPGFLAFREAPVLLQILQKMRDEKHPFYPQVLMVDGNGILHPRGINTQLYLCFVVAFQAL

SEQ ID NO: 36618 - DNA, 1205 bp, Arabidopsis thaliana
  misc_feature (1)..(1205): Ceres Seq. ID no. 13504812
  misc_feature: MA Experiment ID: 20000185 Result: Down-regulated in Transcription
  misc_feature: MA Experiment 20000185 PARAMETER Experiment Name: At_Roots__P Parameter: Age (day) Value: 7 vs. 21
  misc_feature: MA Experiment 20000185 PARAMETER Experiment Name: At_Roots__P Parameter: Organism Value: A. thaliana
  misc_feature: MA Experiment 20000185 PARAMETER Experiment Name: At_Roots__P Parameter: Tissue Value: Roots vs. Whole Plant
  misc_feature: MA Experiment ID: 20000234 Result: Down-regulated in Transcription
  misc_feature: MA Experiment 20000234 PARAMETER Experiment Name: At_Siliques_P Parameter: Age (day) Value: 21
  misc_feature: MA Experiment 20000234 PARAMETER Experiment Name: At_Siliques_P Parameter: Organism Value: A. thaliana
  misc_feature: MA Experiment 20000234 PARAMETER Experiment Name: At_Siliques_P Parameter: Plant Line Value: WS
  misc_feature: MA Experiment 20000234 PARAMETER Experiment Name: At_Siliques_P Parameter: Tissue Value: Less Than 5mm Siliques vs. Whole Plant
  misc_feature: MA Experiment ID: 20000235 Result: Down-regulated in Transcription
  misc_feature: MA Experiment 20000235 PARAMETER Experiment Name: At_Siliques_P Parameter: Age (day) Value: 21
  misc_feature: MA Experiment 20000235 PARAMETER Experiment Name: At_Siliques_P Parameter: Organism Value: A. thaliana
  misc_feature: MA Experiment 20000235 PARAMETER Experiment Name: At_Siliques_P Parameter: Plant Line Value: WS
  misc_feature: MA Experiment 20000235 PARAMETER Experiment Name: At_Siliques_P Parameter: Tissue Value: 5-10mm Siliques vs. Whole Plant
  misc_feature: MA Experiment ID: 20000264 Result: Down-regulated in Transcription
  misc_feature: MA Experiment 20000264 PARAMETER Experiment Name: At_Open_Flower_P Parameter: Age (day) Value: 21
  misc_feature: MA Experiment 20000264 PARAMETER Experiment Name: At_Open_Flower_P Parameter: Plant Line Value: WS
  misc_feature: MA Experiment 20000264 PARAMETER Experiment Name: At_Open_Flower_P Parameter: Tissue Value: Open Flower vs. Whole Plant
  misc_feature: MA Experiment ID: 20001560 Result: Down-regulated in Transcription
  misc_feature: MA Experiment 20001560 PARAMETER Experiment Name: At_Drought_Soil_Dry_P Parameter: Age (day) Value: 28
  misc_feature: MA Experiment 20001560 PARAMETER Experiment Name: At_Drought_Soil_Dry_P Parameter: Organism Value: A. thaliana
  misc_feature: MA Experiment 20001560 PARAMETER Experiment Name: At_Drought_Soil_Dry_P Parameter: Plant Line Value: WS
  misc_feature: MA Experiment 20001560 PARAMETER Experiment Name: At_Drought_Soil_Dry_P Parameter: Post Timepoint (hr) Value: None
  misc_feature: MA Experiment 20001560 PARAMETER Experiment Name: At_Drought_Soil_Dry_P Parameter: Post-Treatment Value: None
  misc_feature: MA Experiment 20001560 PARAMETER Experiment Name: At_Drought_Soil_Dry_P Parameter: Timepoint (day) Value: 14
  misc_feature: MA Experiment 20001560 PARAMETER Experiment Name: At_Drought_Soil_Dry_P Parameter: Treatment Value: Drought vs. No Drought
aattgaaaaactttaactcttttttttttcgtttttgggatttgccaacttcgatttctttggttgggatttgtttatacgtttccttcgatttcgctcgagcttcgatctgaaaagcttcgagcttttagacaaatccatggattcttcgccagtttctgctcgattcgatatattcgagatttatcgtagattctgtgctattcgatcaggacaacaattgtgtaataagaaaccctgtgatggcgaagaatctcaaagatttaacttgtctaaagaagcaataactcagctcttatatctagtagagaataagtttcaagctaggaactcgatttttgatgaattgtttaagttgatgtcacggctagacttaatggtggactttacggagtttacttgcttttacgattttgttttctttatgtgccgcgagaatgggcaaaagaatataactataagtagagctattactgcatggaaacttgttttggctgggagatttaggttacttaaccgctggtgtgactttatcgagaaaaatcaacggcacaatatttcagaagatacttggcaacaagtcttggcgtttagtcgttgtgtacatgagaatctagaaggatatgactctgaaggtgcatggcctgtcctaatagatgactttgtcgagcatatgtacagtattttaggaccgaataaggacactagcttgttctgcaaatgtggtgacacagaatctgaatcatgcctctatcaagaagatgagcatcacaaagattatcgccgcccacacacgggtttaagaaacattccaggtttaaagagaaaaacatcgaagaagaatgacgaagaagaagaagatgaagatgaagaagtgttagaaacccaaaactcttcttctttgctaaacttcaaacgaatcaaaaccagcaacagtccaaggtgttcatcaaagtccccttgttcaatcgagcgaagtctttcacaaggttttgcgagtcttttatcgactggagataaaccatgaaacactggaacatcgtcgcacatatatatagattatacaaagcaaaagaattctcaaggtgttgtctcattttttcctacctaaatacctcacttctttaaatgacagttgagttcttctttgttgtaagctatagaataatttgttccttcaatcattcataatttgatcttattcc

SEQ ID NO: 36619 - protein, 295 aa, Arabidopsis thaliana
  peptide (1)..(295): Ceres Seq. ID no. 13504813
  misc_feature (145)..(265): Pfam Name: Domain of unknown function (DUF298) Pfam Description: Domain of unknown function (DUF298)
  misc_feature (86)..(191): Homolog of NCBI NO: 18700658 NR Description: leucine zipper protein [Homo sapiens]
  misc_feature (68)..(191): Homolog of NCBI NO: 34784120 NR Description: Unknown (protein for MGC:66414) [Danio rerio]
  misc_feature (68)..(180): Homolog of NCBI NO: 18399737 NR Description: expressed protein [Arabidopsis thaliana]
  misc_feature (68)..(180): Homolog of NCBI NO: 15292985 NR Description: unknown protein [Arabidopsis thaliana]
  misc_feature (68)..(192): Homolog of NCBI NO: 34784818 NR Description: RP42 homolog [Homo sapiens]
  misc_feature (68)..(192): Homolog of NCBI NO: 7019967 NR Description: unnamed protein product [Homo sapiens]
  misc_feature (68)..(177): Homolog of NCBI NO: 24664675 NR Description: CG7427-PA [Drosophila melanogaster]
  misc_feature (45)..(180): Homolog of NCBI NO: 34913252 NR Description: P0011H09.36 [Oryza sativa (japonica
  misc_feature (45)..(243): Homolog of NCBI NO: 33146550 NR Description: leucine zipper protein-like
  misc_feature (1)..(295): Homolog of NCBI NO: 15228555 NR Description: expressed protein [Arabidopsis thaliana]
MDSSPVSARFDIFEIYRRFCAIRSGQQLCNKKPCDGEESQRFNLSKEAITQLLYLVENKFQARNSIFDELFKLMSRLDLMVDFTEFTCFYDFVFFMCRENGQKNITISRAITAWKLVLAGRFRLLNRWCDFIEKNQRHNISEDTWQQVLAFSRCVHENLEGYDSEGAWPVLIDDFVEHMYSILGPNKDTSLFCKCGDTESESCLYQEDEHHKDYRRPHTGLRNIPGLKRKTSKKNDEEEEDEDEEVLETQNSSSLLNFKRIKTSNSPRCSSKSPCSIERSLSQGFASLLSTGDKP

SEQ ID NO: 36620 - protein, 222 aa, Arabidopsis thaliana
  peptide (1)..(222): Ceres Seq. ID no. 13504814
  misc_feature (72)..(192): Pfam Name: Domain of unknown function (DUF298) Pfam Description: Domain of unknown function (DUF298)
  misc_feature (13)..(118): Homolog of NCBI NO: 18700658 NR Description: leucine zipper protein [Homo sapiens]
  misc_feature (1)..(118): Homolog of NCBI NO: 34784120 NR Description: Unknown (protein for MGC:66414) [Danio rerio]
  misc_feature (1)..(107): Homolog of NCBI NO: 18399737 NR Description: expressed protein [Arabidopsis thaliana]
  misc_feature (1)..(107): Homolog of NCBI NO: 15292985 NR Description: unknown protein [Arabidopsis thaliana]
  misc_feature (1)..(119): Homolog of NCBI NO: 34784818 NR Description: RP42 homolog [Homo sapiens]
  misc_feature (1)..(119): Homolog of NCBI NO: 7019967 NR Description: unnamed protein product [Homo sapiens]
  misc_feature (1)..(104): Homolog of NCBI NO: 24664675 NR Description: CG7427-PA [Drosophila melanogaster]
  misc_feature (1)..(107): Homolog of NCBI NO: 34913252 NR Description: P0011H09.36 [Oryza sativa (japonica
  misc_feature (1)..(170): Homolog of NCBI NO: 33146550 NR Description: leucine zipper protein-like
  misc_feature (1)..(222): Homolog of NCBI NO: 15228555 NR Description: expressed protein [Arabidopsis thaliana]
MSRLDLMVDFTEFTCFYDFVFFMCRENGQKNITISRAITAWKLVLAGRFRLLNRWCDFIEKNQRHNISEDTWQQVLAFSRCVHENLEGYDSEGAWPVLIDDFVEHMYSILGPNKDTSLFCKCGDTESESCLYQEDEHHKDYRRPHTGLRNIPGLKRKTSKKNDEEEEDEDEEVLETQNSSSLLNFKRIKTSNSPRCSSKSPCSIERSLSQGFASLLSTGDKP

SEQ ID NO: 36621 - protein, 216 aa, Arabidopsis thaliana
  peptide (1)..(216): Ceres Seq. ID no. 13504815
  misc_feature (66)..(186): Pfam Name: Domain of unknown function (DUF298) Pfam Description: Domain of unknown function (DUF298)
  misc_feature (7)..(112): Homolog of NCBI NO: 18700658 NR Description: leucine zipper protein [Homo sapiens]
  misc_feature (1)..(112): Homolog of NCBI NO: 34784120 NR Description: Unknown (protein for MGC:66414) [Danio rerio]
  misc_feature (1)..(101): Homolog of NCBI NO: 18399737 NR Description: expressed protein [Arabidopsis thaliana]
  misc_feature (1)..(101): Homolog of NCBI NO: 15292985 NR Description: unknown protein [Arabidopsis thaliana]
  misc_feature (1)..(113): Homolog of NCBI NO: 34784818 NR Description: RP42 homolog [Homo sapiens]
  misc_feature (1)..(113): Homolog of NCBI NO: 7019967 NR Description: unnamed protein product [Homo sapiens]
  misc_feature (1)..(98): Homolog of NCBI NO: 24664675 NR Description: CG7427-PA [Drosophila melanogaster]
  misc_feature (1)..(101): Homolog of NCBI NO: 34913252 NR Description: P0011H09.36 [Oryza sativa (japonica
  misc_feature (1)..(164): Homolog of NCBI NO: 33146550 NR Description: leucine zipper protein-like
  misc_feature (1)..(216): Homolog of NCBI NO: 15228555 NR Description: expressed protein [Arabidopsis thaliana]
MVDFTEFTCFYDFVFFMCRENGQKNITISRAITAWKLVLAGRFRLLNRWCDFIEKNQRHNISEDTWQQVLAFSRCVHENLEGYDSEGAWPVLIDDFVEHMYSILGPNKDTSLFCKCGDTESESCLYQEDEHHKDYRRPHTGLRNIPGLKRKTSKKNDEEEEDEDEEVLETQNSSSLLNFKRIKTSNSPRCSSKSPCSIERSLSQGFASLLSTGDKP

SEQ ID NO: 36622 - DNA, 1670 bp, Arabidopsis thaliana
  misc_feature (1)..(1670): Ceres Seq. ID no. 12562683
  misc_feature: MA Experiment ID: 20000185 Result: Up-regulated in Transcription
  misc_feature: MA Experiment 20000185 PARAMETER Experiment Name: At_Roots__P Parameter: Age (day) Value: 7 vs. 21
  misc_feature: MA Experiment 20000185 PARAMETER Experiment Name: At_Roots__P Parameter: Organism Value: A. thaliana
  misc_feature: MA Experiment 20000185 PARAMETER Experiment Name: At_Roots__P Parameter: Tissue Value: Roots vs. Whole Plant
  misc_feature: MA Experiment ID: 20000234 Result: Up-regulated in Transcription
  misc_feature: MA Experiment 20000234 PARAMETER Experiment Name: At_Siliques_P Parameter: Age (day) Value: 21
  misc_feature: MA Experiment 20000234 PARAMETER Experiment Name: At_Siliques_P Parameter: Organism Value: A. thaliana
  misc_feature: MA Experiment 20000234 PARAMETER Experiment Name: At_Siliques_P Parameter: Plant Line Value: WS
  misc_feature: MA Experiment 20000234 PARAMETER Experiment Name: At_Siliques_P Parameter: Tissue Value: Less Than 5mm Siliques vs. Whole Plant
  misc_feature: MA Experiment ID: 20000235 Result: Up-regulated in Transcription
  misc_feature: MA Experiment 20000235 PARAMETER Experiment Name: At_Siliques_P Parameter: Age (day) Value: 21
  misc_feature: MA Experiment 20000235 PARAMETER Experiment Name: At_Siliques_P Parameter: Organism Value: A. thaliana
  misc_feature: MA Experiment 20000235 PARAMETER Experiment Name: At_Siliques_P Parameter: Plant Line Value: WS
  misc_feature: MA Experiment 20000235 PARAMETER Experiment Name: At_Siliques_P Parameter: Tissue Value: 5-10mm Siliques vs. Whole Plant
  misc_feature: MA Experiment ID: 20000264 Result: Up-regulated in Transcription
  misc_feature: MA Experiment 20000264 PARAMETER Experiment Name: At_Open_Flower_P Parameter: Age (day) Value: 21
  misc_feature: MA Experiment 20000264 PARAMETER Experiment Name: At_Open_Flower_P Parameter: Plant Line Value: WS
  misc_feature: MA Experiment 20000264 PARAMETER Experiment Name: At_Open_Flower_P Parameter: Tissue Value: Open Flower vs. Whole Plant
  misc_feature: MA Experiment ID: 20000265 Result: Up-regulated in Transcription
  misc_feature: MA Experiment 20000265 PARAMETER Experiment Name: At_Open_Flower_P Parameter: Age (day) Value: 21
  misc_feature: MA Experiment 20000265 PARAMETER Experiment Name: At_Open_Flower_P Parameter: Plant Line Value: WS
  misc_feature: MA Experiment 20000265 PARAMETER Experiment Name: At_Open_Flower_P Parameter: Tissue Value: Closed Flower vs. Whole Plant
  misc_feature: MA Experiment ID: 20000286 Result: Up-regulated in Transcription
  misc_feature: MA Experiment 20000286 PARAMETER Experiment Name: At_Open_Flower_P Parameter: Age (day) Value: 21
  misc_feature: MA Experiment 20000286 PARAMETER Experiment Name: At_Open_Flower_P Parameter: Plant Line Value: WS
  misc_feature: MA Experiment 20000286 PARAMETER Experiment Name: At_Open_Flower_P Parameter: Tissue Value: Half Open vs. Whole Plant
  misc_feature: MA Experiment ID: 20000439 Result: Up-regulated in Transcription
  misc_feature: MA Experiment 20000439 PARAMETER Experiment Name: At_Roots__P Parameter: Age (day) Value: 14 vs. 21
  misc_feature: MA Experiment 20000439 PARAMETER Experiment Name: At_Roots__P Parameter: Organism Value: A. thaliana
  misc_feature: MA Experiment 20000439 PARAMETER Experiment Name: At_Roots__P Parameter: Tissue Value: Roots vs. Whole Plant
  misc_feature: MA Experiment ID: 20000794 Result: Up-regulated in Transcription
  misc_feature: MA Experiment 20000794 PARAMETER Experiment Name: At_Petals_P Parameter: Age (day) Value: 23-25 days
  misc_feature: MA Experiment 20000794 PARAMETER Experiment Name: At_Petals_P Parameter: Plant Line Value: WS
  misc_feature: MA Experiment 20000794 PARAMETER Experiment Name: At_Petals_P Parameter: Tissue Value: Petals vs. Whole plant
tctctctctctctttagctcttttttttttgttttcattaaagtttttattttattttctaccaaccaaaagcttttctctttggtttctcttatttagcttctaaccttgaggagaatcataccagaggattgaagtttgaaccttcaaagatcaaaatcaagaaaccaaaaaaaaacaaaaaaaatgtgggatctaaacgacgcaccacaccaaacacaaagagaagaagaatctgaagagttttgttattcttcaccaagtaaacgggttggatctttctctaattcaagctcttcagctgttgttatcgaagatggatccgatgacgatgaacttaaccgggtcagacccaataacccacttgtcacccatcagttcttccctgagatggattctaacggcggtggtgttgcttctggctttcctcgggctcactggtttggtgttaagttttgtcagtcggatctagccaccggatcgtccgcgggtaaagctaccaacgttgccgctgccgtagtggagccggcacagccgttgaaaaagagtcggcgtggaccaagatcaagaagttctcagtatagaggtgttacgttttaccggcgtaccggaagatgggaatctcatatttgggactgtgggaaacaagtttacttaggtggatttgacactgctcatgcagcagctcgagcatatgatagagctgctattaaattccgtggagtagaagcggatatcaatttcaacatcgacgattatgatgatgacttgaaacagatgactaatttaaccaaggaagagttcgtacacgtacttcgccgacaaagcacaggcttccctcgaggaagttcgaagtatagaggtgtcactttgcataagtgtggtcgttgggaagctcgaatgggtcaattcttaggcaaaaagtatgtttatttgggtttgttcgacaccgaggtcgaagctgctagagcttacgataaagctgcaatcaaatgtaacggcaaagacgccgtgaccaactttgatccgagtatttacgatgaggaactcaatgccgagtcatcagggaatcctactactccacaagatcacaacctcgatttgagcttgggaaattcggctaattcgaagcataaaagtcaagatatgcggctcaggatgaaccaacaacaacaagattctctccactctaatgaagttcttggattaggtcaaaccggaatgcttaaccatactcccaattcaaaccaccaatttccgggcagcagcaacattggtagcggaggcggattctcactgtttccggcggctgagaaccaccggtttgatggtcgggcctcgacgaaccaagtgttgacaaatgctgcagcatcatcaggattctctcctcatcatcacaatcagatttttaattctacttctactcctcatcaaaattggctgcagacaaatggcttccaacctcctctcatgagaccttcttgaatcttttatatttttaaggtttattattatataagaaaaacaaaaatgaacctttgaaatccccacatgttcttggtcatttcattaatcatcggcttatattttgcttattttcccctaaatcctcttgttaacttaggcgaacaaaaaaaattaatggaaatctttttccctccatcggttac

SEQ ID NO: 36623 - protein, 432 aa, Arabidopsis thaliana
  peptide (1)..(432): Ceres Seq. ID no. 12562684
  misc_feature (129)..(192): Pfam Name: AP2 domain Pfam Description: AP2 domain
  misc_feature (61)..(374): Homolog of NCBI NO: 15240234 NR Description: apetala2 family protein (RAP2)
  misc_feature (61)..(311): Homolog of NCBI NO: 11181610 NR Description: APETALA2-related transcription factor 1 [Picea
  misc_feature (24)..(320): Homolog of NCBI NO: 38345500 NR Description: OSJNBa0010D21.13 [Oryza sativa (japonica
  misc_feature (11)..(338): Homolog of NCBI NO: 21717332 NR Description: transcription factor AHAP2 [Malus x domestica]
  misc_feature (61)..(319): Homolog of NCBI NO: 5081555 NR Description: PHAP2A protein [Petunia x hybrida]
  misc_feature (239)..(432): Homolog of NCBI NO: 22135898 NR Description: APETALA2 protein [Arabidopsis thaliana]
  misc_feature (14)..(427): Homolog of NCBI NO: 13173164 NR Description: APETAL2-like protein [Pisum sativum]
  misc_feature (1)..(407): Homolog of NCBI NO: 28894445 NR Description: LIPLESS2 [Antirrhinum majus]
  misc_feature (1)..(420): Homolog of NCBI NO: 28894443 NR Description: LIPLESS1 [Antirrhinum majus]
  misc_feature (1)..(432): Homolog of NCBI NO: 15234566 NR Description: apetala2 protein; protein id: At4g36920.1
MWDLNDAPHQTQREEESEEFCYSSPSKRVGSFSNSSSSAVVIEDGSDDDELNRVRPNNPLVTHQFFPEMDSNGGGVASGFPRAHWFGVKFCQSDLATGSSAGKATNVAAAVVEPAQPLKKSRRGPRSRSSQYRGVTFYRRTGRWESHIWDCGKQVYLGGFDTAHAAARAYDRAAIKFRGVEADINFNIDDYDDDLKQMTNLTKEEFVHVLRRQSTGFPRGSSKYRGVTLHKCGRWEARMGQFLGKKYVYLGLFDTEVEAARAYDKAAIKCNGKDAVTNFDPSIYDEELNAESSGNPTTPQDHNLDLSLGNSANSKHKSQDMRLRMNQQQQDSLHSNEVLGLGQTGMLNHTPNSNHQFPGSSNIGSGGGFSLFPAAENHRFDGRASTNQVLTNAAASSGFSPHHHNQIFNSTSTPHQNWLQTNGFQPPLMRPS

SEQ ID NO: 36624 - protein, 364 aa, Arabidopsis thaliana
  peptide (1)..(364): Ceres Seq. ID no. 12562685
  misc_feature (61)..(124): Pfam Name: AP2 domain Pfam Description: AP2 domain
  misc_feature (1)..(306): Homolog of NCBI NO: 15240234 NR Description: apetala2 family protein (RAP2)
  misc_feature (1)..(243): Homolog of NCBI NO: 11181610 NR Description: APETALA2-related transcription factor 1 [Picea
  misc_feature (1)..(252): Homolog of NCBI NO: 38345500 NR Description: OSJNBa0010D21.13 [Oryza sativa (japonica
  misc_feature (1)..(270): Homolog of NCBI NO: 21717332 NR Description: transcription factor AHAP2 [Malus x domestica]
  misc_feature (1)..(251): Homolog of NCBI NO: 5081555 NR Description: PHAP2A protein [Petunia x hybrida]
  misc_feature (171)..(364): Homolog of NCBI NO: 22135898 NR Description: APETALA2 protein [Arabidopsis thaliana]
  misc_feature (1)..(359): Homolog of NCBI NO: 13173164 NR Description: APETAL2-like protein [Pisum sativum]
  misc_feature (1)..(339): Homolog of NCBI NO: 28894445 NR Description: LIPLESS2 [Antirrhinum majus]
  misc_feature (1)..(352): Homolog of NCBI NO: 28894443 NR Description: LIPLESS1 [Antirrhinum majus]
  misc_feature (1)..(364): Homolog of NCBI NO: 15234566 NR Description: apetala2 protein; protein id: At4g36920.1
MDSNGGGVASGFPRAHWFGVKFCQSDLATGSSAGKATNVAAAVVEPAQPLKKSRRGPRSRSSQYRGVTFYRRTGRWESHIWDCGKQVYLGGFDTAHAAARAYDRAAIKFRGVEADINFNIDDYDDDLKQMTNLTKEEFVHVLRRQSTGFPRGSSKYRGVTLHKCGRWEARMGQFLGKKYVYLGLFDTEVEAARAYDKAAIKCNGKDAVTNFDPSIYDEELNAESSGNPTTPQDHNLDLSLGNSANSKHKSQDMRLRMNQQQQDSLHSNEVLGLGQTGMLNHTPNSNHQFPGSSNIGSGGGFSLFPAAENHRFDGRASTNQVLTNAAASSGFSPHHHNQIFNSTSTPHQNWLQTNGFQPPLMRPS

SEQ ID NO: 36625 - protein, 235 aa, Arabidopsis thaliana
  peptide (1)..(235): Ceres Seq. ID no. 12562686
  misc_feature (24)..(88): Pfam Name: AP2 domain Pfam Description: AP2 domain
  misc_feature (1)..(177): Homolog of NCBI NO: 15240234 NR Description: apetala2 family protein (RAP2)
  misc_feature (1)..(114): Homolog of NCBI NO: 11181610 NR Description: APETALA2-related transcription factor 1 [Picea
  misc_feature (1)..(123): Homolog of NCBI NO: 38345500 NR Description: OSJNBa0010D21.13 [Oryza sativa (japonica
  misc_feature (1)..(141): Homolog of NCBI NO: 21717332 NR Description: transcription factor AHAP2 [Malus x domestica]
  misc_feature (1)..(122): Homolog of NCBI NO: 5081555 NR Description: PHAP2A protein [Petunia x hybrida]
  misc_feature (42)..(235): Homolog of NCBI NO: 22135898 NR Description: APETALA2 protein [Arabidopsis thaliana]
  misc_feature (1)..(230): Homolog of NCBI NO: 13173164 NR Description: APETAL2-like protein [Pisum sativum]
  misc_feature (1)..(210): Homolog of NCBI NO: 28894445 NR Description: LIPLESS2 [Antirrhinum majus]
  misc_feature (1)..(223): Homolog of NCBI NO: 28894443 NR Description: LIPLESS1 [Antirrhinum majus]
  misc_feature (1)..(235): Homolog of NCBI NO: 15234566 NR Description: apetala2 protein; protein id: At4g36920.1
MTNLTKEEFVHVLRRQSTGFPRGSSKYRGVTLHKCGRWEARMGQFLGKKYVYLGLFDTEVEAARAYDKAAIKCNGKDAVTNFDPSIYDEELNAESSGNPTTPQDHNLDLSLGNSANSKHKSQDMRLRMNQQQQDSLHSNEVLGLGQTGMLNHTPNSNHQFPGSSNIGSGGGFSLFPAAENHRFDGRASTNQVLTNAAASSGFSPHHHNQIFNSTSTPHQNWLQTNGFQPPLMRPS

SEQ ID NO: 36626 - DNA, 1394 bp, Arabidopsis thaliana
  misc_feature (1)..(1394): Ceres Seq. ID no. 13491017
  misc_feature: MA Experiment ID: 108573 Result: Up-regulated in Transcription
  misc_feature: MA Experiment 108573 PARAMETER Experiment Name: At_Drought_cDNA_P Parameter: Timepoint (hr) Value: 6
  misc_feature: MA Experiment 108573 PARAMETER Experiment Name: At_Drought_cDNA_P Parameter: Tissue Value: Aerial
  misc_feature: MA Experiment 108573 PARAMETER Experiment Name: At_Drought_cDNA_P Parameter: Treatment Value: Drought vs. No Drought
  misc_feature: MA Experiment ID: 108579 Result: Up-regulated in Transcription
  misc_feature: MA Experiment 108579 PARAMETER Experiment Name: At_4deg_Cold_cDNA_P Parameter: Temperature (deg C) Value: 4 vs. 22
  misc_feature: MA Experiment 108579 PARAMETER Experiment Name: At_4deg_Cold_cDNA_P Parameter: Timepoint (hr) Value: 6
  misc_feature: MA Experiment 108579 PARAMETER Experiment Name: At_4deg_Cold_cDNA_P Parameter: Tissue Value: Aerial
  misc_feature: MA Experiment ID: 108585 Result: Up-regulated in Transcription
  misc_feature: MA Experiment 108585 PARAMETER Experiment Name: At_5mM_NaNP_cDNA_P Parameter: Timepoint (hr) Value: 6
  misc_feature: MA Experiment 108585 PARAMETER Experiment Name: At_5mM_NaNP_cDNA_P Parameter: Tissue Value: Aerial
  misc_feature: MA Experiment 108585 PARAMETER Experiment Name: At_5mM_NaNP_cDNA_P Parameter: Treatment Value: null
  misc_feature: MA Experiment ID: 108594 Result: Down-regulated in Transcription
  misc_feature: MA Experiment 108594 PARAMETER Experiment Name: At_Ler-rhl_Root_cDNA_P Parameter: Plant Line Value: null
  misc_feature: MA Experiment ID: 108595 Result: Down-regulated in Transcription
  misc_feature: MA Experiment 108595 PARAMETER Experiment Name: At_Ler-pi_Ovule_cDNA_P Parameter: Plant Line Value: null
  misc_feature: MA Experiment ID: 20000180 Result: Up-regulated in Transcription
  misc_feature: MA Experiment 20000180 PARAMETER Experiment Name: At_Germinating_Seeds_P Parameter: Age (hr) Value: 24 vs. 0
  misc_feature: MA Experiment 20000180 PARAMETER Experiment Name: At_Germinating_Seeds_P Parameter: Tissue Value: Germinating Seeds
  misc_feature: MA Experiment ID: 20000185 Result: Up-regulated in Transcription
  misc_feature: MA Experiment 20000185 PARAMETER Experiment Name: At_Roots__P Parameter: Age (day) Value: 7 vs. 21
  misc_feature: MA Experiment 20000185 PARAMETER Experiment Name: At_Roots__P Parameter: Organism Value: A. thaliana
  misc_feature: MA Experiment 20000185 PARAMETER Experiment Name: At_Roots__P Parameter: Tissue Value: Roots vs. Whole Plant
  misc_feature: MA Experiment ID: 20000234 Result: Down-regulated in Transcription
  misc_feature: MA Experiment 20000234 PARAMETER Experiment Name: At_Siliques_P Parameter: Age (day) Value: 21
  misc_feature: MA Experiment 20000234 PARAMETER Experiment Name: At_Siliques_P Parameter: Organism Value: A. thaliana
  misc_feature: MA Experiment 20000234 PARAMETER Experiment Name: At_Siliques_P Parameter: Plant Line Value: WS
  misc_feature: MA Experiment 20000234 PARAMETER Experiment Name: At_Siliques_P Parameter: Tissue Value: Less Than 5mm Siliques vs. Whole Plant
  misc_feature: MA Experiment ID: 20000439 Result: Up-regulated in Transcription
  misc_feature: MA Experiment 20000439 PARAMETER Experiment Name: At_Roots__P Parameter: Age (day) Value: 14 vs. 21
  misc_feature: MA Experiment 20000439 PARAMETER Experiment Name: At_Roots__P Parameter: Organism Value: A. thaliana
  misc_feature: MA Experiment 20000439 PARAMETER Experiment Name: At_Roots__P Parameter: Tissue Value: Roots vs. Whole Plant
  misc_feature: MA Experiment ID: 20000455 Result: Up-regulated in Transcription
  misc_feature: MA Experiment 20000455 PARAMETER Experiment Name: At_100uM_ABA_P Parameter: Age (day) Value: 16
  misc_feature: MA Experiment 20000455 PARAMETER Experiment Name: At_100uM_ABA_P Parameter: Organism Value: A. thaliana
  misc_feature: MA Experiment 20000455 PARAMETER Experiment Name: At_100uM_ABA_P Parameter: Plant Line Value: WS
  misc_feature: MA Experiment 20000455 PARAMETER Experiment Name: At_100uM_ABA_P Parameter: Timepoint (hr) Value: 48
  misc_feature: MA Experiment 20000455 PARAMETER Experiment Name: At_100uM_ABA_P Parameter: Tissue Value: Aerial
  misc_feature: MA Experiment 20000455 PARAMETER Experiment Name: At_100uM_ABA_P Parameter: Treatment Value: 100uM ABA vs. No Treatment
  misc_feature: MA Experiment ID: 20001451 Result: Down-regulated in Transcription
  misc_feature: MA Experiment 20001451 PARAMETER Experiment Name: At_Far-red-induction_P Parameter: Age (day) Value: 7
  misc_feature: MA Experiment 20001451 PARAMETER Experiment Name: At_Far-red-induction_P Parameter: Light Value: Far-red vs. White
  misc_feature: MA Experiment 20001451 PARAMETER Experiment Name: At_Far-red-induction_P Parameter: Organism Value: A. thaliana
  misc_feature: MA Experiment 20001451 PARAMETER Experiment Name: At_Far-red-induction_P Parameter: Plant Line Value: Columbia
  misc_feature: MA Experiment 20001451 PARAMETER Experiment Name: At_Far-red-induction_P Parameter: Timepoint (hr) Value: 24
  misc_feature: MA Experiment 20001451 PARAMETER Experiment Name: At_Far-red-induction_P Parameter: Tissue Value: Whole Plant
atattttcatataaataaacctctcaacctccacactttctcacccatcacacaatcctcaaaacagagtaacccaaaaaacagagcaatctctaaaaaatctcaagaaacctcactaaaatgggttcaacggcagagacacaattaactccggtgcaagtcaccgacgacgaagctgccctcttcgccatgcaactagccagtgcttccgttcttccgatggctttaaaatccgccttagagcttgaccttcttgagattatggccaagaatggttctcccatgtctcctaccgagatcgcttctaaacttccgaccaaaaatcctgaagctccggtcatgctcgaccgtatcctccgtcttcttacgtcttactccgtcttaacctgctccaaccgtaaactttccggtgatggcgttgaacggatttacgggcttggtccggtttgcaagtatttgaccaagaacgaagatggtgtttccattgctgctctttgtcttatgaaccaagacaaggttctcatggaaagctggtaccatttgaaggatgcaattcttgatggtgggattccattcaacaaggcttatggaatgagcgcgttcgagtaccacgggactgaccctagattcaacaaggtctttaacaatggaatgtctaaccattccacaatcaccatgaagaagattcttgagacctataagggttttgaaggattgacttctttggttgatgttggtggtggcattggtgctacactcaaaatgattgtctccaagtaccctaatcttaaaggcatcaactttgatctcccacatgtcatcgaagatgctccttctcatcctggtattgagcatgttggaggagatatgtttgtaagtgtccctaaaggtgatgccatattcatgaagtggatatgtcatgactggagtgacgaacattgcgtgaaattcttgaagaactgctacgagtcacttccagaggatggaaaagtgatattagcagagtgtatacttccagagacaccagactcaagcctctcaaccaaacaagtagtccatgtcgattgcattatgttggctcacaatcccggaggcaaagaacgaaccgagaaagagtttgaggcattagccaaagcatcaggcttcaagggcatcaaagttgtctgcgacgcttttggtgttaaccttattgagttactcaagaagctctaaaaacaaacaatgttcctatgaagatgatttatatgtaaacattatctcatatctccttccacggttccaaaactatgctgtttaataatggtttttacaagaatttgattatgagtttgtatttttgtttgtttggaacaaaattatgtgattatagggaaaaataaaatgagctattattg

SEQ ID NO: 36627 - protein, 363 aa, Arabidopsis thaliana; identical to SEQ ID NO: 22560
  peptide (1)..(363): Ceres Seq. ID no. 13491018
  misc_feature (97)..(338): Pfam Name: O-methyltransferase Pfam Description: O-methyltransferase
  misc_feature (1)..(358): Homolog of NCBI NO: 7528266 NR Description: caffeic acid O-3-methyltransferase [Populus
  misc_feature (1)..(361): Homolog of NCBI NO: 444327 NR Description: O-methyltransferase
  misc_feature (1)..(362): Homolog of NCBI NO: 29839288 NR Description: Caffeic acid 3-O-methyltransferase 1
  misc_feature (1)..(361): Homolog of NCBI NO: 7332271 NR Description: O-methyltransferase
  misc_feature (1)..(362): Homolog of NCBI NO: 231757 NR Description: Caffeic acid 3-O-methyltransferase 1
  misc_feature (1)..(362): Homolog of NCBI NO: 3913295 NR Description: Caffeic acid 3-O-methyltransferase
  misc_feature (1)..(363): Homolog of NCBI NO: 29839344 NR Description: Caffeic acid 3-O-methyltransferase
  misc_feature (1)..(363): Homolog of NCBI NO: 6760443 NR Description: O-methyltransferase [Fragaria x ananassa]
  misc_feature (1)..(363): Homolog of NCBI NO: 2781394 NR Description: O-methyltransferase 1 [Arabidopsis thaliana]
  misc_feature (1)..(363): Homolog of NCBI NO: 15239571 NR Description: O-methyltransferase 1 [Arabidopsis thaliana]

SEQ ID NO: 36628 - protein, 340 aa, Arabidopsis thaliana; identical to SEQ ID NO: 22561
  peptide (1)..(340): Ceres Seq. ID no. 13491019
  misc_feature (74)..(315): Pfam Name: O-methyltransferase Pfam Description: O-methyltransferase
  misc_feature (1)..(335): Homolog of NCBI NO: 7528266 NR Description: caffeic acid O-3-methyltransferase [Populus
  misc_feature (1)..(338): Homolog of NCBI NO: 444327 NR Description: O-methyltransferase
  misc_feature (1)..(339): Homolog of NCBI NO: 29839288 NR Description: Caffeic acid 3-O-methyltransferase 1
  misc_feature (1)..(338): Homolog of NCBI NO: 7332271 NR Description: O-methyltransferase
  misc_feature (1)..(339): Homolog of NCBI NO: 231757 NR Description: Caffeic acid 3-O-methyltransferase 1
  misc_feature (1)..(339): Homolog of NCBI NO: 3913295 NR Description: Caffeic acid 3-O-methyltransferase
  misc_feature (1)..(340): Homolog of NCBI NO: 29839344 NR Description: Caffeic acid 3-O-methyltransferase
  misc_feature (1)..(340): Homolog of NCBI NO: 6760443 NR Description: O-methyltransferase [Fragaria x ananassa]
  misc_feature (1)..(340): Homolog of NCBI NO: 2781394 NR Description: O-methyltransferase 1 [Arabidopsis thaliana]
  misc_feature (1)..(340): Homolog of NCBI NO: 15239571 NR Description: O-methyltransferase 1 [Arabidopsis thaliana]

SEQ ID NO: 36629 - protein, 330 aa, Arabidopsis thaliana; identical to SEQ ID NO: 22562
  peptide (1)..(330): Ceres Seq. ID no. 13491020
  misc_feature (64)..(305): Pfam Name: O-methyltransferase Pfam Description: O-methyltransferase
  misc_feature (1)..(325): Homolog of NCBI NO: 7528266 NR Description: caffeic acid O-3-methyltransferase [Populus
  misc_feature (1)..(328): Homolog of NCBI NO: 444327 NR Description: O-methyltransferase
  misc_feature (1)..(329): Homolog of NCBI NO: 29839288 NR Description: Caffeic acid 3-O-methyltransferase 1
  misc_feature (1)..(328): Homolog of NCBI NO: 7332271 NR Description: O-methyltransferase
  misc_feature (1)..(329): Homolog of NCBI NO: 231757 NR Description: Caffeic acid 3-O-methyltransferase 1
  misc_feature (1)..(329): Homolog of NCBI NO: 3913295 NR Description: Caffeic acid 3-O-methyltransferase
  misc_feature (1)..(330): Homolog of NCBI NO: 29839344 NR Description: Caffeic acid 3-O-methyltransferase
  misc_feature (1)..(330): Homolog of NCBI NO: 6760443 NR Description: O-methyltransferase [Fragaria x ananassa]
  misc_feature (1)..(330): Homolog of NCBI NO: 2781394 NR Description: O-methyltransferase 1 [Arabidopsis thaliana]
  misc_feature (1)..(330): Homolog of NCBI NO: 15239571 NR Description: O-methyltransferase 1 [Arabidopsis thaliana]

SEQ ID NO: 36630 - DNA, 1853 bp, Arabidopsis thaliana
  misc_feature (1)..(1853): Ceres Seq. ID no. 13575178
  misc_feature: MA Experiment ID: 20000173 Result: Down-regulated in Transcription
  misc_feature: MA Experiment 20000173 PARAMETER Experiment Name: At_42deg_Heat_P Parameter: Age (day) Value: 14
  misc_feature: MA Experiment 20000173 PARAMETER Experiment Name: At_42deg_Heat_P Parameter: Organism Value: A. thaliana
  misc_feature: MA Experiment 20000173 PARAMETER Experiment Name: At_42deg_Heat_P Parameter: Plant Line Value: WS
  misc_feature: MA Experiment 20000173 PARAMETER Experiment Name: At_42deg_Heat_P Parameter: Temperature (deg C) Value: 42 vs. 22
  misc_feature: MA Experiment 20000173 PARAMETER Experiment Name: At_42deg_Heat_P Parameter: Timepoint (hr) Value: 6
  misc_feature: MA Experiment 20000173 PARAMETER Experiment Name: At_42deg_Heat_P Parameter: Tissue Value: Aerial
  misc_feature: MA Experiment ID: 20000184 Result: Down-regulated in Transcription
  misc_feature: MA Experiment 20000184 PARAMETER Experiment Name: At_Shoots__P Parameter: Age (day) Value: 7
  misc_feature: MA Experiment 20000184 PARAMETER Experiment Name: At_Shoots__P Parameter: Tissue Value: Shoots vs. Whole Plant
  misc_feature: MA Experiment ID: 20000794 Result: Up-regulated in Transcription
  misc_feature: MA Experiment 20000794 PARAMETER Experiment Name: At_Petals_P Parameter: Age (day) Value: 23-25 days
  misc_feature: MA Experiment 20000794 PARAMETER Experiment Name: At_Petals_P Parameter: Plant Line Value: WS
  misc_feature: MA Experiment 20000794 PARAMETER Experiment Name: At_Petals_P Parameter: Tissue Value: Petals vs. Whole plant
gttttttctgttttggtcaacaatgcttctgtcttcagccacttagccgataaaaaaaaaaaaaaaaaaatgttacagattcagaaaaaatatcataagcctaactttcttatgatgatatttccggtttatgcttaagaaattctgcttgatactgaaatttcgtaattagccccattggtagcctttgctgctgcaacagttgcagtctcttcttcagtgttacggattcttattcttcagccctaaaaatcatcactttggaatcagaagcttgaatgatggaaggaagaagaatcatagcaaaccctagaccgtgtagcggtagtagaagagttattgctaagaagaggtctcgtcccgatggattcgtcaatagcgttaaaaagcttcaacgccgagaaatctcttctcgtatggatcgagctttctcaatcagcactgctcaagagagattccgcaatatgcgtctcgtggagcaatatgatacgcatgatcctaaaggatactgtttagtatcattacctaacttgttgaaacgaagcaaagttattgagattgttgctgctcgtgacattgtctttgctcttactctatctggtgtctgtgcatcttttagcagagagacgaataaaaaggtttgctttttaaatgttagtcctgatgaagtcattcggagtttgttctacaacaagaacaatgattctctcattactgtttctgtttacgcctctgacaattacagctctttgaaatgcagatccactagaatcgaatatattctgaggggtcaagcagacgcaggatttcctctttttgagtctgagtcactaaagtggccaggttttgttgagtttgatgatgttaatgggaaggtgctgacatattctgcacaggatagtgtttacaaggtgtttgatctgaaaaactatgccttgctatattcgatatcagacaaaaatgtacaagaaattaagatcagtccagggataatgctgttgattttcaagagagctgcgagtcatgttcctttgaagattctatcaatcgaagatggcactcttctgaagtccttccatcatttgcttcaccgaaataagaaagttgatttcattgaacaattcaatgaaaagcttctagttaagcaagagaacgagaatctacaaatacttgacgttcgaaatgctgagctgatagaagttagcagaactgacttcatgacaccatcagcattcatatttttgtatgagaatcagttgtttctaacattcaggaaccgaaatgtttctgtgtggaatttccgcggagagcttgtgacctcgtttgaggatcatcttctttggcatccagactgtaacacaaacaatatctacataacaagcgatcaagatctgatcatctcatattgcaaggcagatactgaagatcagtggatagaaggaaatgcggggtcgattaacataagcaatatcttgactggtaaatgcttagctaagataaaagcaaataatggtcctcctaaggaagaggactgcagcagtagtgatttggggaattcctctcgaaggagaagtgcggttgctgaggctttggaagacataaccgctctcttctacgacgaagaacggaatgaaatatacacaggaaacagacacggcctcctccatgtctggtctaattgaagctactcatcatttgttttgttttttttacattaatacaagagatctctgtatcttgttctgtttctcaattgtgtaatatcatgagatatgtaatttacttgtgtgtttgagtagcaattgtcgttgtaatgaaacagcaaatatttcaaattcgtctctcatttatgt

SEQ ID NO: 36631 - protein, 467 aa, Arabidopsis thaliana
  peptide (1)..(467): Ceres Seq. ID no. 13575179
  misc_feature (170)..(209): Homolog of NCBI NO: 37535068 NR Description: hypothetical protein [Oryza sativa (japonica
  misc_feature (16)..(122): Homolog of NCBI NO: 37535068 NR Description: hypothetical protein [Oryza sativa (japonica
  misc_feature (2)..(467): Homolog of NCBI NO: 34909262 NR Description: B1148D12.19 [Oryza sativa (japonica
  misc_feature (2)..(467): Homolog of NCBI NO: 15128395 NR Description: P0454H12.13 [Oryza sativa (japonica
  misc_feature (2)..(467): Homolog of NCBI NO: 11281174 NR Description: hypothetical protein F24B22.150 - Arabidopsis
  misc_feature (2)..(467): Homolog of NCBI NO: 18410015 NR Description: expressed protein [Arabidopsis thaliana]
  misc_feature (2)..(467): Homolog of NCBI NO: 25344227 NR Description: hypothetical protein At2g38630 [imported] -
  misc_feature (1)..(467): Homolog of NCBI NO: 30687585 NR Description: expressed protein [Arabidopsis thaliana]
MMEGRRIIANPRPCSGSRRVIAKKRSRPDGFVNSVKKLQRREISSRMDRAFSISTAQERFRNMRLVEQYDTHDPKGYCLVSLPNLLKRSKVIEIVAARDIVFALTLSGVCASFSRETNKKVCFLNVSPDEVIRSLFYNKNNDSLITVSVYASDNYSSLKCRSTRIEYILRGQADAGFPLFESESLKWPGFVEFDDVNGKVLTYSAQDSVYKVFDLKNYALLYSISDKNVQEIKISPGIMLLIFKRAASHVPLKILSIEDGTLLKSFHHLLHRNKKVDFIEQFNEKLLVKQENENLQILDVRNAELIEVSRTDFMTPSAFIFLYENQLFLTFRNRNVSVWNFRGELVTSFEDHLLWHPDCNTNNIYITSDQDLIISYCKADTEDQWIEGNAGSINISNILTGKCLAKIKANNGPPKEEDCSSSDLGNSSRRRSAVAEALEDITALFYDEERNEIYTGNRHGLLHVWSN

SEQ ID NO: 36632 - protein, 466 aa, Arabidopsis thaliana
  peptide (1)..(466): Ceres Seq. ID no. 13575180
  misc_feature (169)..(208): Homolog of NCBI NO: 37535068 NR Description: hypothetical protein [Oryza sativa (japonica
  misc_feature (15)..(121): Homolog of NCBI NO: 37535068 NR Description: hypothetical protein [Oryza sativa (japonica
  misc_feature (1)..(466): Homolog of NCBI NO: 34909262 NR Description: B1148D12.19 [Oryza sativa (japonica
  misc_feature (1)..(466): Homolog of NCBI NO: 15128395 NR Description: P0454H12.13 [Oryza sativa (japonica
  misc_feature (1)..(466): Homolog of NCBI NO: 11281174 NR Description: hypothetical protein F24B22.150 - Arabidopsis
  misc_feature (1)..(466): Homolog of NCBI NO: 18410015 NR Description: expressed protein [Arabidopsis thaliana]
  misc_feature (1)..(466): Homolog of NCBI NO: 25344227 NR Description: hypothetical protein At2g38630 [imported] -
  misc_feature (1)..(466): Homolog of NCBI NO: 30687585 NR Description: expressed protein [Arabidopsis thaliana]
MEGRRIIANPRPCSGSRRVIAKKRSRPDGFVNSVKKLQRREISSRMDRAFSISTAQERFRNMRLVEQYDTHDPKGYCLVSLPNLLKRSKVIEIVAARDIVFALTLSGVCASFSRETNKKVCFLNVSPDEVIRSLFYNKNNDSLITVSVYASDNYSSLKCRSTRIEYILRGQADAGFPLFESESLKWPGFVEFDDVNGKVLTYSAQDSVYKVFDLKNYALLYSISDKNVQEIKISPGIMLLIFKRAASHVPLKILSIEDGTLLKSFHHLLHRNKKVDFIEQFNEKLLVKQENENLQILDVRNAELIEVSRTDFMTPSAFIFLYENQLFLTFRNRNVSVWNFRGELVTSFEDHLLWHPDCNTNNIYITSDQDLIISYCKADTEDQWIEGNAGSINISNILTGKCLAKIKANNGPPKEEDCSSSDLGNSSRRRSAVAEALEDITALFYDEERNEIYTGNRHGLLHVWSN

SEQ ID NO: 36633 - protein, 421 aa, Arabidopsis thaliana
  peptide (1)..(421): Ceres Seq. ID no. 13575181
  misc_feature (124)..(163): Homolog of NCBI NO: 37535068 NR Description: hypothetical protein [Oryza sativa (japonica
  misc_feature (1)..(76): Homolog of NCBI NO: 37535068 NR Description: hypothetical protein [Oryza sativa (japonica
  misc_feature (1)..(421): Homolog of NCBI NO: 34909262 NR Description: B1148D12.19 [Oryza sativa (japonica
  misc_feature (1)..(421): Homolog of NCBI NO: 15128395 NR Description: P0454H12.13 [Oryza sativa (japonica
  misc_feature (1)..(421): Homolog of NCBI NO: 11281174 NR Description: hypothetical protein F24B22.150 - Arabidopsis
  misc_feature (1)..(421): Homolog of NCBI NO: 18410015 NR Description: expressed protein [Arabidopsis thaliana]
  misc_feature (1)..(421): Homolog of NCBI NO: 25344227 NR Description: hypothetical protein At2g38630 [imported] -
  misc_feature (1)..(421): Homolog of NCBI NO: 30687585 NR Description: expressed protein [Arabidopsis thaliana]
MDRAFSISTAQERFRNMRLVEQYDTHDPKGYCLVSLPNLLKRSKVIEIVAARDIVFALTLSGVCASFSRETNKKVCFLNVSPDEVIRSLFYNKNNDSLITVSVYASDNYSSLKCRSTRIEYILRGQADAGFPLFESESLKWPGFVEFDDVNGKVLTYSAQDSVYKVFDLKNYALLYSISDKNVQEIKISPGIMLLIFKRAASHVPLKILSIEDGTLLKSFHHLLHRNKKVDFIEQFNEKLLVKQENENLQILDVRNAELIEVSRTDFMTPSAFIFLYENQLFLTFRNRNVSVWNFRGELVTSFEDHLLWHPDCNTNNIYITSDQDLIISYCKADTEDQWIEGNAGSINISNILTGKCLAKIKANNGPPKEEDCSSSDLGNSSRRRSAVAEALEDITALFYDEERNEIYTGNRHGLLHVWSN

SEQ ID NO: 36634 - DNA, 915 bp, Arabidopsis thaliana
  misc_feature (1)..(915): Ceres Seq. ID no. 12422053
  misc_feature: MA Experiment ID: 108462 Result: Up-regulated in Transcription
  misc_feature: MA Experiment 108462 PARAMETER Experiment Name: At_Germinating_Seeds_cDNA_P Parameter: Age (day) Value: 2 vs. 0
  misc_feature: MA Experiment 108462 PARAMETER Experiment Name: At_Germinating_Seeds_cDNA_P Parameter: Tissue Value: Germinating Seeds
  misc_feature: MA Experiment ID: 108463 Result: Up-regulated in Transcription
  misc_feature: MA Experiment 108463 PARAMETER Experiment Name: At_Germinating_Seeds_cDNA_P Parameter: Age (day) Value: 3 vs. 0
  misc_feature: MA Experiment 108463 PARAMETER Experiment Name: At_Germinating_Seeds_cDNA_P Parameter: Tissue Value: Germinating Seeds
  misc_feature: MA Experiment ID: 108488 Result: Down-regulated in Transcription
  misc_feature: MA Experiment ID: 108501 Result: Up-regulated in Transcription
  misc_feature: MA Experiment 108501 PARAMETER Experiment Name: At_ap2_floral_buds_cDNA_P Parameter: Plant Line Value: ap2 (Ler.)
  misc_feature: MA Experiment 108501 PARAMETER Experiment Name: At_ap2_floral_buds_cDNA_P Parameter: Tissue Value: Closed Flower
  misc_feature: MA Experiment ID: 108595 Result: Up-regulated in Transcription
  misc_feature: MA Experiment 108595 PARAMETER Experiment Name: At_Ler-pi_Ovule_cDNA_P Parameter: Plant Line Value: null
  misc_feature: MA Experiment ID: 108667 Result: Down-regulated in Transcription
  misc_feature: MA Experiment 108667 PARAMETER Experiment Name: At_2mM_SA_cDNA_P Parameter: Plant Line Value: WS
  misc_feature: MA Experiment 108667 PARAMETER Experiment Name: At_2mM_SA_cDNA_P Parameter: Timepoint (hr) Value: 1
  misc_feature: MA Experiment 108667 PARAMETER Experiment Name: At_2mM_SA_cDNA_P Parameter: Treatment Value: 2mM SA vs. No Treatment
  misc_feature: MA Experiment ID: 20000069 Result: Down-regulated in Transcription
  misc_feature: MA Experiment 20000069 PARAMETER Experiment Name: At_100uM_ABA_Mutants_cDNA_P Parameter: Plant Line Value: CS23
  misc_feature: MA Experiment 20000069 PARAMETER Experiment Name: At_100uM_ABA_Mutants_cDNA_P Parameter: Timepoint (hr) Value: 6
  misc_feature: MA Experiment 20000069 PARAMETER Experiment Name: At_100uM_ABA_Mutants_cDNA_P Parameter: Tissue Value: Aerial
  misc_feature: MA Experiment 20000069 PARAMETER Experiment Name: At_100uM_ABA_Mutants_cDNA_P Parameter: Treatment Value: 100uM ABA vs. No Treatment
  misc_feature: MA Experiment ID: 20000113 Result: Down-regulated in Transcription
  misc_feature: MA Experiment 20000113 PARAMETER Experiment Name: At_42deg_Heat_cDNA_P Parameter: Temperature (deg C) Value: 42 vs. 22
  misc_feature: MA Experiment 20000113 PARAMETER Experiment Name: At_42deg_Heat_cDNA_P Parameter: Timepoint (hr) Value: 8
  misc_feature: MA Experiment 20000113 PARAMETER Experiment Name: At_42deg_Heat_cDNA_P Parameter: Tissue Value: Aerial
  misc_feature: MA Experiment ID: 20000234 Result: Up-regulated in Transcription
  misc_feature: MA Experiment 20000234 PARAMETER Experiment Name: At_Siliques_P Parameter: Age (day) Value: 21
  misc_feature: MA Experiment 20000234 PARAMETER Experiment Name: At_Siliques_P Parameter: Organism Value: A. thaliana
  misc_feature: MA Experiment 20000234 PARAMETER Experiment Name: At_Siliques_P Parameter: Plant Line Value: WS
  misc_feature: MA Experiment 20000234 PARAMETER Experiment Name: At_Siliques_P Parameter: Tissue Value: Less Than 5mm Siliques vs. Whole Plant
  misc_feature: MA Experiment ID: 20000264 Result: Up-regulated in Transcription
  misc_feature: MA Experiment 20000264 PARAMETER Experiment Name: At_Open_Flower_P Parameter: Age (day) Value: 21
  misc_feature: MA Experiment 20000264 PARAMETER Experiment Name: At_Open_Flower_P Parameter: Plant Line Value: WS
  misc_feature: MA Experiment 20000264 PARAMETER Experiment Name: At_Open_Flower_P Parameter: Tissue Value: Open Flower vs. Whole Plant
  misc_feature: MA Experiment ID: 20000286 Result: Up-regulated in Transcription
  misc_feature: MA Experiment 20000286 PARAMETER Experiment Name: At_Open_Flower_P Parameter: Age (day) Value: 21
  misc_feature: MA Experiment 20000286 PARAMETER Experiment Name: At_Open_Flower_P Parameter: Plant Line Value: WS
  misc_feature: MA Experiment 20000286 PARAMETER Experiment Name: At_Open_Flower_P Parameter: Tissue Value: Half Open vs. Whole Plant
  misc_feature: MA Experiment ID: 20000441 Result: Down-regulated in Transcription
  misc_feature: MA Experiment 20000441 PARAMETER Experiment Name: At_1uM_BR-BRZ__P Parameter: Tissue Value: Shoot Apices
  misc_feature: MA Experiment 20000441 PARAMETER Experiment Name: At_1uM_BR-BRZ__P Parameter: Treatment Value: 1uM BR vs. No Treatment
  misc_feature: MA Experiment ID: 20000443 Result: Down-regulated in Transcription
  misc_feature: MA Experiment 20000443 PARAMETER Experiment Name: At_1uM_BR-BRZ__P Parameter: Tissue Value: Shoot Apices
  misc_feature: MA Experiment 20000443 PARAMETER Experiment Name: At_1uM_BR-BRZ__P Parameter: Treatment Value: 1uM BRZ vs. No Treatment
  misc_feature: MA Experiment ID: 20000451 Result: Up-regulated in Transcription
  misc_feature: MA Experiment 20000451 PARAMETER Experiment Name: At_CS6879_Shoots-Roots_P Parameter: Age (day) Value: 14
  misc_feature: MA Experiment 20000451 PARAMETER Experiment Name: At_CS6879_Shoots-Roots_P Parameter: Organism Value: A. thaliana
  misc_feature: MA Experiment 20000451 PARAMETER Experiment Name: At_CS6879_Shoots-Roots_P Parameter: Plant Line Value: CS6879 vs. WS
  misc_feature: MA Experiment 20000451 PARAMETER Experiment Name: At_CS6879_Shoots-Roots_P Parameter: Tissue Value: Roots
  misc_feature: MA Experiment ID: 20001451 Result: Down-regulated in Transcription
  misc_feature: MA Experiment 20001451 PARAMETER Experiment Name: At_Far-red-induction_P Parameter: Age (day) Value: 7
  misc_feature: MA Experiment 20001451 PARAMETER Experiment Name: At_Far-red-induction_P Parameter: Light Value: Far-red vs. White
  misc_feature: MA Experiment 20001451 PARAMETER Experiment Name: At_Far-red-induction_P Parameter: Organism Value: A. thaliana
  misc_feature: MA Experiment 20001451 PARAMETER Experiment Name: At_Far-red-induction_P Parameter: Plant Line Value: Columbia
  misc_feature: MA Experiment 20001451 PARAMETER Experiment Name: At_Far-red-induction_P Parameter: Timepoint (hr) Value: 24
  misc_feature: MA Experiment 20001451 PARAMETER Experiment Name: At_Far-red-induction_P Parameter: Tissue Value: Whole Plant
  misc_feature: MA Experiment ID: 20001458 Result: Down-regulated in Transcription
  misc_feature: MA Experiment 20001458 PARAMETER Experiment Name: At_50mM_NH4NO3_L-to-H_P Parameter: Age (day) Value: Undefined
  misc_feature: MA Experiment 20001458 PARAMETER Experiment Name: At_50mM_NH4NO3_L-to-H_P Parameter: Organism Value: Undefined
  misc_feature: MA Experiment 20001458 PARAMETER Experiment Name: At_50mM_NH4NO3_L-to-H_P Parameter: Plant Line Value: Undefined
  misc_feature: MA Experiment 20001458 PARAMETER Experiment Name: At_50mM_NH4NO3_L-to-H_P Parameter: Timepoint (hr) Value: 2
  misc_feature: MA Experiment 20001458 PARAMETER Experiment Name: At_50mM_NH4NO3_L-to-H_P Parameter: Tissue Value: Siliques
  misc_feature: MA Experiment 20001458 PARAMETER Experiment Name: At_50mM_NH4NO3_L-to-H_P Parameter: Treatment Value: 50mM NH4NO3 vs. 100mM Manitol
  misc_feature: MA Experiment ID: 20001556 Result: Down-regulated in Transcription
  misc_feature: MA Experiment 20001556 PARAMETER Experiment Name: At_Drought_Soil_Dry_P Parameter: Age (day) Value: 26
  misc_feature: MA Experiment 20001556 PARAMETER Experiment Name: At_Drought_Soil_Dry_P Parameter: Organism Value: A. thaliana
  misc_feature: MA Experiment 20001556 PARAMETER Experiment Name: At_Drought_Soil_Dry_P Parameter: Plant Line Value: WS
  misc_feature: MA Experiment 20001556 PARAMETER Experiment Name: At_Drought_Soil_Dry_P Parameter: Post Timepoint (hr) Value: None
  misc_feature: MA Experiment 20001556 PARAMETER Experiment Name: At_Drought_Soil_Dry_P Parameter: Post-Treatment Value: None
  misc_feature: MA Experiment 20001556 PARAMETER Experiment Name: At_Drought_Soil_Dry_P Parameter: Timepoint (day) Value: 12
  misc_feature: MA Experiment 20001556 PARAMETER Experiment Name: At_Drought_Soil_Dry_P Parameter: Treatment Value: Drought vs. No Drought
  misc_feature: MA Experiment ID: 20001911 Result: Down-regulated in Transcription
  misc_feature: MA Experiment 20001911 PARAMETER Experiment Name: At_Drought_Reproduction_P Parameter: Age (day) Value: 40
  misc_feature: MA Experiment 20001911 PARAMETER Experiment Name: At_Drought_Reproduction_P Parameter: Organism Value: A. thaliana
  misc_feature: MA Experiment 20001911 PARAMETER Experiment Name: At_Drought_Reproduction_P Parameter: Plant Line Value: WS
  misc_feature: MA Experiment 20001911 PARAMETER Experiment Name: At_Drought_Reproduction_P Parameter: Timepoint (day) Value: 10
  misc_feature: MA Experiment 20001911 PARAMETER Experiment Name: At_Drought_Reproduction_P Parameter: Tissue Value: Flowers
  misc_feature: MA Experiment 20001911 PARAMETER Experiment Name: At_Drought_Reproduction_P Parameter: Treatment Value: Drought vs. No Drought
acgaaagaagagaacaaagaagaaattttgaaaatagtgaaaatggtaaccgtaagccaaagtcacacgacgacgtttctcttcttcaccacatttctcttgatattcggatcaatctcagccgtccgtttgcttccacgaccaaacactacaacaaccaacgatctagatttcatccgaacaagctgcaacgctactctatatccagacgtctgcttcacgtcactctccggctacgcctctgccgttcaagacagtccggcgaggctagccaagctcgcaatcggcgtttcactttaacaagccaaatccactgcggcttttctctccaaactctcacgctctgccgctaaatactccggtgatggccaccaaacagcttccgccgtaatccgagactgcgtttcgaacgtcgaagacgcggtggacgagatgagaggatctctccgtcaactacgcgacatgaacggcagaggaggcggcacggcagctcggaggtcggtagaaacgtttaggttccagatgagtaacgtgcagacgtggatgagtgcagcattgacggatgaggacacgtgtacgaatggatttgaagatatggacgaaggaggattgattaagacgaccgtttgtgatcggctcgaggaagtgaagaggctaacgagtaatgctcttgcccttgtcaacacttacgccaacaatggagctccatgaccatgagaccatgagaccatgaggagttttaactttgatttaagtgtctctttatataatttaatacattgtggggtttaagttagagttatgtgtcgatttcatcatgttttacatttgtttttgtatcatccgagtttcttatgtttaaagggttcagagagatgttgtatctttgatttactaatcaaactgcacgatgat

SEQ ID NO: 36635 - protein, 116 aa, Arabidopsis thaliana
  peptide (1)..(116): Ceres Seq. ID no. 12422054
ERREQRRNFENSENGNRKPKSHDDVSLLHHISLDIRINLSRPFASTTKHYNNQRSRFHPNKLQRYSISRRLLHVTLRLRLCRSRQSGEASQARNRRFTLTSQIHCGFSLQTLTLCR

SEQ ID NO: 36636 - protein, 99 aa, Arabidopsis thaliana
  peptide (1)..(99): Ceres Seq. ID no. 12422055
  misc_feature (56)..(99): Homolog of NCBI NO: 15241799 NR Description: ripening-related protein - like
  misc_feature (28)..(99): Homolog of NCBI NO: 8096279 NR Description: DC1.2 homologue [Nicotiana tabacum]
  misc_feature (27)..(99): Homolog of NCBI NO: 15232790 NR Description: putative protein; protein id: At3g47380.1
  misc_feature (30)..(99): Homolog of NCBI NO: 25406069 NR Description: hypothetical protein F5A18.10 [imported] -
  misc_feature (30)..(99): Homolog of NCBI NO: 18409660 NR Description: expressed protein
  misc_feature (30)..(99): Homolog of NCBI NO: 21554277 NR Description: unknown [Arabidopsis thaliana]
  misc_feature (53)..(99): Homolog of NCBI NO: 21555465 NR Description: unknown [Arabidopsis thaliana]
  misc_feature (34)..(99): Homolog of NCBI NO: 15220674 NR Description: Unknown protein
  misc_feature (20)..(99): Homolog of NCBI NO: 18394174 NR Description: expressed protein
  misc_feature (15)..(99): Homolog of NCBI NO: 15226321 NR Description: unknown protein; protein id: At2g01610.1
TKEENKEEILKIVKMVTVSQSHTTTFLFFTTFLLIFGSISAVRLLPRPNTTTTNDLDFIRTSCNATLYPDVCFTSLSGYASAVQDSPARLAKLAIGVSL

SEQ ID NO: 36637 - protein, 92 aa, Arabidopsis thaliana
  peptide (1)..(92): Ceres Seq. ID no. 12422056
  misc_feature (1)..(87): Homolog of NCBI NO: 15241799 NR Description: ripening-related protein - like
  misc_feature (1)..(87): Homolog of NCBI NO: 8096279 NR Description: DC1.2 homologue [Nicotiana tabacum]
  misc_feature (1)..(87): Homolog of NCBI NO: 15232790 NR Description: putative protein; protein id: At3g47380.1
  misc_feature (1)..(88): Homolog of NCBI NO: 25406069 NR Description: hypothetical protein F5A18.10 [imported] -
  misc_feature (1)..(88): Homolog of NCBI NO: 18409660 NR Description: expressed protein
  misc_feature (1)..(88): Homolog of NCBI NO: 21554277 NR Description: unknown [Arabidopsis thaliana]
  misc_feature (1)..(84): Homolog of NCBI NO: 21555465 NR Description: unknown [Arabidopsis thaliana]
  misc_feature (1)..(84): Homolog of NCBI NO: 15220674 NR Description: Unknown protein
  misc_feature (1)..(91): Homolog of NCBI NO: 18394174 NR Description: expressed protein
  misc_feature (1)..(92): Homolog of NCBI NO: 15226321 NR Description: unknown protein; protein id: At2g01610.1
MRGSLRQLRDMNGRGGGTAARRSVETFRFQMSNVQTWMSAALTDEDTCTNGFEDMDEGGLIKTTVCDRLEEVKRLTSNALALVNTYANNGAP

SEQ ID NO: 36638 - protein, 85 aa, Arabidopsis thaliana
  peptide (1)..(85): Ceres Seq. ID no. 12422057
  misc_feature (42)..(85): Homolog of NCBI NO: 15241799 NR Description: ripening-related protein - like
  misc_feature (14)..(85): Homolog of NCBI NO: 8096279 NR Description: DC1.2 homologue [Nicotiana tabacum]
  misc_feature (13)..(85): Homolog of NCBI NO: 15232790 NR Description: putative protein; protein id: At3g47380.1
  misc_feature (16)..(85): Homolog of NCBI NO: 25406069 NR Description: hypothetical protein F5A18.10 [imported] -
  misc_feature (16)..(85): Homolog of NCBI NO: 18409660 NR Description: expressed protein
  misc_feature (16)..(85): Homolog of NCBI NO: 21554277 NR Description: unknown [Arabidopsis thaliana]
  misc_feature (39)..(85): Homolog of NCBI NO: 21555465 NR Description: unknown [Arabidopsis thaliana]
  misc_feature (20)..(85): Homolog of NCBI NO: 15220674 NR Description: Unknown protein
  misc_feature (6)..(85): Homolog of NCBI NO: 18394174 NR Description: expressed protein
  misc_feature (1)..(85): Homolog of NCBI NO: 15226321 NR Description: unknown protein; protein id: At2g01610.1
MVTVSQSHTTTFLFFTTFLLIFGSISAVRLLPRPNTTTTNDLDFIRTSCNATLYPDVCFTSLSGYASAVQDSPARLAKLAIGVSL

SEQ ID NO: 36639 - DNA, 2159 bp, Arabidopsis thaliana; identical to SEQ ID NO: 20733
  misc_feature (1)..(2159): Ceres Seq. ID no. 12336358
  misc_feature: MA Experiment ID: 108561 Result: Up-regulated in Transcription
  misc_feature: MA Experiment 108561 PARAMETER Experiment Name: At_100uM_ABA_cDNA_P Parameter: Timepoint (hr) Value: 6
  misc_feature: MA Experiment 108561 PARAMETER Experiment Name: At_100uM_ABA_cDNA_P Parameter: Tissue Value: Aerial
  misc_feature: MA Experiment 108561 PARAMETER Experiment Name: At_100uM_ABA_cDNA_P Parameter: Treatment Value: 100uM ABA vs. No Treatment
  misc_feature: MA Experiment ID: 108594 Result: Up-regulated in Transcription
  misc_feature: MA Experiment 108594 PARAMETER Experiment Name: At_Ler-rhl_Root_cDNA_P Parameter: Plant Line Value: null
  misc_feature: MA Experiment ID: 20000072 Result: Up-regulated in Transcription
  misc_feature: MA Experiment 20000072 PARAMETER Experiment Name: At_100uM_ABA_Mutants_cDNA_P Parameter: Plant Line Value: CS8105
  misc_feature: MA Experiment 20000072 PARAMETER Experiment Name: At_100uM_ABA_Mutants_cDNA_P Parameter: Timepoint (hr) Value: 6
  misc_feature: MA Experiment 20000072 PARAMETER Experiment Name: At_100uM_ABA_Mutants_cDNA_P Parameter: Tissue Value: Aerial
  misc_feature: MA Experiment 20000072 PARAMETER Experiment Name: At_100uM_ABA_Mutants_cDNA_P Parameter: Treatment Value: 100uM ABA vs. No Treatment
  misc_feature: MA Experiment ID: 20000173 Result: Down-regulated in Transcription
  misc_feature: MA Experiment 20000173 PARAMETER Experiment Name: At_42deg_Heat_P Parameter: Age (day) Value: 14
  misc_feature: MA Experiment 20000173 PARAMETER Experiment Name: At_42deg_Heat_P Parameter: Organism Value: A. thaliana
  misc_feature: MA Experiment 20000173 PARAMETER Experiment Name: At_42deg_Heat_P Parameter: Plant Line Value: WS
  misc_feature: MA Experiment 20000173 PARAMETER Experiment Name: At_42deg_Heat_P Parameter: Temperature (deg C) Value: 42 vs. 22
  misc_feature: MA Experiment 20000173 PARAMETER Experiment Name: At_42deg_Heat_P Parameter: Timepoint (hr) Value: 6
  misc_feature: MA Experiment 20000173 PARAMETER Experiment Name: At_42deg_Heat_P Parameter: Tissue Value: Aerial
  misc_feature: MA Experiment ID: 20000179 Result: Up-regulated in Transcription
  misc_feature: MA Experiment 20000179 PARAMETER Experiment Name: At_Germinating_Seeds_P Parameter: Age (hr) Value: 6 vs. 0
  misc_feature: MA Experiment 20000179 PARAMETER Experiment Name: At_Germinating_Seeds_P Parameter: Tissue Value: Germinating Seeds
  misc_feature: MA Experiment ID: 20000184 Result: Down-regulated in Transcription
  misc_feature: MA Experiment 20000184 PARAMETER Experiment Name: At_Shoots__P Parameter: Age (day) Value: 7
  misc_feature: MA Experiment 20000184 PARAMETER Experiment Name: At_Shoots__P Parameter: Tissue Value: Shoots vs. Whole Plant
  misc_feature: MA Experiment ID: 20000214 Result: Down-regulated in Transcription
  misc_feature: MA Experiment 20000214 PARAMETER Experiment Name: At_4deg_Cold_P Parameter: Timepoint (hr) Value: 6
  misc_feature: MA Experiment ID: 20000264 Result: Up-regulated in Transcription
  misc_feature: MA Experiment 20000264 PARAMETER Experiment Name: At_Open_Flower_P Parameter: Age (day) Value: 21
  misc_feature: MA Experiment 20000264 PARAMETER Experiment Name: At_Open_Flower_P Parameter: Plant Line Value: WS
  misc_feature: MA Experiment 20000264 PARAMETER Experiment Name: At_Open_Flower_P Parameter: Tissue Value: Open Flower vs. Whole Plant
  misc_feature: MA Experiment ID: 20000265 Result: Up-regulated in Transcription
  misc_feature: MA Experiment 20000265 PARAMETER Experiment Name: At_Open_Flower_P Parameter: Age (day) Value: 21
  misc_feature: MA Experiment 20000265 PARAMETER Experiment Name: At_Open_Flower_P Parameter: Plant Line Value: WS
  misc_feature: MA Experiment 20000265 PARAMETER Experiment Name: At_Open_Flower_P Parameter: Tissue Value: Closed Flower vs. Whole Plant
  misc_feature: MA Experiment ID: 20000286 Result: Up-regulated in Transcription
  misc_feature: MA Experiment 20000286 PARAMETER Experiment Name: At_Open_Flower_P Parameter: Age (day) Value: 21
  misc_feature: MA Experiment 20000286 PARAMETER Experiment Name: At_Open_Flower_P Parameter: Plant Line Value: WS
  misc_feature: MA Experiment 20000286 PARAMETER Experiment Name: At_Open_Flower_P Parameter: Tissue Value: Half Open vs. Whole Plant
  misc_feature: MA Experiment ID: 20000437 Result: Up-regulated in Transcription
  misc_feature: MA Experiment 20000437 PARAMETER Experiment Name: At_Drought_P Parameter: Age (day) Value: 8
  misc_feature: MA Experiment 20000437 PARAMETER Experiment Name: At_Drought_P Parameter: Organism Value: A. thaliana
  misc_feature: MA Experiment 20000437 PARAMETER Experiment Name: At_Drought_P Parameter: Plant Line Value: WS
  misc_feature: MA Experiment 20000437 PARAMETER Experiment Name: At_Drought_P Parameter: Timepoint (hr) Value: 24
  misc_feature: MA Experiment 20000437 PARAMETER Experiment Name: At_Drought_P Parameter: Tissue Value: Whole Plant
  misc_feature: MA Experiment 20000437 PARAMETER Experiment Name: At_Drought_P Parameter: Treatment Value: Drought vs. No Drought
  misc_feature: MA Experiment ID: 20000527 Result: Down-regulated in Transcription
  misc_feature: MA Experiment 20000527 PARAMETER Experiment Name: At_10percent_PEG_P Parameter: Age (day) Value: 20
  misc_feature: MA Experiment 20000527 PARAMETER Experiment Name: At_10percent_PEG_P Parameter: Organism Value: A. thaliana
  misc_feature: MA Experiment 20000527 PARAMETER Experiment Name: At_10percent_PEG_P Parameter: Plant Line Value: WS
  misc_feature: MA Experiment 20000527 PARAMETER Experiment Name: At_10percent_PEG_P Parameter: Timepoint (day) Value: 20
  misc_feature: MA Experiment 20000527 PARAMETER Experiment Name: At_10percent_PEG_P Parameter: Tissue Value: Whole Plant
  misc_feature: MA Experiment 20000527 PARAMETER Experiment Name: At_10percent_PEG_P Parameter: Treatment Value: 10percent PEG vs. No Treatment
  misc_feature: MA Experiment ID: 20000794 Result: Up-regulated in Transcription
  misc_feature: MA Experiment 20000794 PARAMETER Experiment Name: At_Petals_P Parameter: Age (day) Value: 23-25 days
  misc_feature: MA Experiment 20000794 PARAMETER Experiment Name: At_Petals_P Parameter: Plant Line Value: WS
  misc_feature: MA Experiment 20000794 PARAMETER Experiment Name: At_Petals_P Parameter: Tissue Value: Petals vs. Whole plant
  misc_feature: MA Experiment ID: 20001247 Result: Up-regulated in Transcription
  misc_feature: MA Experiment 20001247 PARAMETER Experiment Name: At_Far-red-induction_P Parameter: Age (day) Value: 7
  misc_feature: MA Experiment 20001247 PARAMETER Experiment Name: At_Far-red-induction_P Parameter: Light Value: Far-red vs. White
  misc_feature: MA Experiment 20001247 PARAMETER Experiment Name: At_Far-red-induction_P Parameter: Organism Value: A. thaliana
  misc_feature: MA Experiment 20001247 PARAMETER Experiment Name: At_Far-red-induction_P Parameter: Plant Line Value: Columbia
  misc_feature: MA Experiment 20001247 PARAMETER Experiment Name: At_Far-red-induction_P Parameter: Timepoint (hr) Value: 1
  misc_feature: MA Experiment 20001247 PARAMETER Experiment Name: At_Far-red-induction_P Parameter: Tissue Value: Whole Plant
  misc_feature: MA Experiment ID: 20001450 Result: Up-regulated in Transcription
  misc_feature: MA Experiment 20001450 PARAMETER Experiment Name: At_Far-red-induction_P Parameter: Age (day) Value: 7
  misc_feature: MA Experiment 20001450 PARAMETER Experiment Name: At_Far-red-induction_P Parameter: Light Value: Far-red vs. White
  misc_feature: MA Experiment 20001450 PARAMETER Experiment Name: At_Far-red-induction_P Parameter: Organism Value: A. thaliana
  misc_feature: MA Experiment 20001450 PARAMETER Experiment Name: At_Far-red-induction_P Parameter: Plant Line Value: Columbia
  misc_feature: MA Experiment 20001450 PARAMETER Experiment Name: At_Far-red-induction_P Parameter: Timepoint (hr) Value: 8
  misc_feature: MA Experiment 20001450 PARAMETER Experiment Name: At_Far-red-induction_P Parameter: Tissue Value: Whole Plant
  misc_feature: MA Experiment ID: 20001904 Result: Up-regulated in Transcription
  misc_feature: MA Experiment 20001904 PARAMETER Experiment Name: At_Drought_Reproduction_P Parameter: Age (day) Value: 37
  misc_feature: MA Experiment 20001904 PARAMETER Experiment Name: At_Drought_Reproduction_P Parameter: Organism Value: A. thaliana
  misc_feature: MA Experiment 20001904 PARAMETER Experiment Name: At_Drought_Reproduction_P Parameter: Plant Line Value: WS
  misc_feature: MA Experiment 20001904 PARAMETER Experiment Name: At_Drought_Reproduction_P Parameter: Timepoint (day) Value: 7
  misc_feature: MA Experiment 20001904 PARAMETER Experiment Name: At_Drought_Reproduction_P Parameter: Tissue Value: Rosettes
  misc_feature: MA Experiment 20001904 PARAMETER Experiment Name: At_Drought_Reproduction_P Parameter: Treatment Value: Drought vs. No Drought
  misc_feature: MA Experiment ID: 20001905 Result: Up-regulated in Transcription
  misc_feature: MA Experiment 20001905 PARAMETER Experiment Name: At_Drought_Reproduction_P Parameter: Age (day) Value: 40
  misc_feature: MA Experiment 20001905 PARAMETER Experiment Name: At_Drought_Reproduction_P Parameter: Organism Value: A. thaliana
  misc_feature: MA Experiment 20001905 PARAMETER Experiment Name: At_Drought_Reproduction_P Parameter: Plant Line Value: WS
  misc_feature: MA Experiment 20001905 PARAMETER Experiment Name: At_Drought_Reproduction_P Parameter: Timepoint (day) Value: 10
  misc_feature: MA Experiment 20001905 PARAMETER Experiment Name: At_Drought_Reproduction_P Parameter: Tissue Value: Rosettes
  misc_feature: MA Experiment 20001905 PARAMETER Experiment Name: At_Drought_Reproduction_P Parameter: Treatment Value: Drought vs. No Drought

SEQ ID NO: 36640 - protein, 197 aa, Arabidopsis thaliana; identical to SEQ ID NO: 20734
  peptide (1)..(197): Ceres Seq. ID no. 12336359
  misc_feature (147)..(197): Pfam Name: Protein of unknown function, DUF607 Pfam Description: Protein of unknown function, DUF607
  misc_feature (147)..(197): Pfam Name: Protein of unknown function, DUF607 Pfam Description: Protein of unknown function, DUF607
  misc_feature (110)..(197): Homolog of NCBI NO: 37535778 NR Description: unknown protein [Oryza sativa (japonica
  misc_feature (1)..(197): Homolog of NCBI NO: 20330769 NR Description: Hypothetical protein [Oryza sativa (japonica
  misc_feature (96)..(188): Homolog of NCBI NO: 15239011 NR Description: unknown protein; protein id: At5g42610.1
  misc_feature (20)..(188): Homolog of NCBI NO: 15240047 NR Description: putative protein
  misc_feature (110)..(197): Homolog of NCBI NO: 37535778 NR Description: unknown protein [Oryza sativa (japonica
  misc_feature (96)..(188): Homolog of NCBI NO: 15239011 NR Description: unknown protein; protein id: At5g42610.1
  misc_feature (20)..(188): Homolog of NCBI NO: 14596231 NR Description: Unknown protein [Arabidopsis thaliana]
  misc_feature (1)..(197): Homolog of NCBI NO: 15224063 NR Description: hypothetical protein; protein id: At2g23790.1
  misc_feature (3)..(186): Homolog of NCBI NO: 15234535 NR Description: putative protein; protein id: At4g36820.1
  misc_feature (1)..(197): Homolog of NCBI NO: 24496456 NR Description: hypothetical protein [Arabidopsis thaliana]
  misc_feature (20)..(188): Homolog of NCBI NO: 15240047 NR Description: putative protein
  misc_feature (1)..(197): Homolog of NCBI NO: 20330769 NR Description: Hypothetical protein [Oryza sativa (japonica
  misc_feature (20)..(188): Homolog of NCBI NO: 14596231 NR Description: Unknown protein [Arabidopsis thaliana]
  misc_feature (1)..(197): Homolog of NCBI NO: 24496456 NR Description: hypothetical protein [Arabidopsis thaliana]
  misc_feature (1)..(197): Homolog of NCBI NO: 15224063 NR Description: hypothetical protein; protein id: At2g23790.1
  misc_feature (3)..(186): Homolog of NCBI NO: 15234535 NR Description: putative protein; protein id: At4g36820.1

SEQ ID NO: 36641 - protein, 195 aa, Arabidopsis thaliana; identical to SEQ ID NO: 20735
  peptide (1)..(195): Ceres Seq. ID no. 12336360
  misc_feature (145)..(195): Pfam Name: Protein of unknown function, DUF607 Pfam Description: Protein of unknown function, DUF607
  misc_feature (145)..(195): Pfam Name: Protein of unknown function, DUF607 Pfam Description: Protein of unknown function, DUF607
  misc_feature (108)..(195): Homolog of NCBI NO: 37535778 NR Description: unknown protein [Oryza sativa (japonica
  misc_feature (1)..(195): Homolog of NCBI NO: 20330769 NR Description: Hypothetical protein [Oryza sativa (japonica
  misc_feature (94)..(186): Homolog of NCBI NO: 15239011 NR Description: unknown protein; protein id: At5g42610.1
  misc_feature (18)..(186): Homolog of NCBI NO: 15240047 NR Description: putative protein
  misc_feature (1)..(195): Homolog of NCBI NO: 20330769 NR Description: Hypothetical protein [Oryza sativa (japonica
  misc_feature (18)..(186): Homolog of NCBI NO: 15240047 NR Description: putative protein
  misc_feature (1)..(195): Homolog of NCBI NO: 24496456 NR Description: hypothetical protein [Arabidopsis thaliana]
  misc_feature (1)..(184): Homolog of NCBI NO: 15234535 NR Description: putative protein; protein id: At4g36820.1
  misc_feature (1)..(195): Homolog of NCBI NO: 15224063 NR Description: hypothetical protein; protein id: At2g23790.1
  misc_feature (18)..(186): Homolog of NCBI NO: 14596231 NR Description: Unknown protein [Arabidopsis thaliana]
  misc_feature (94)..(186): Homolog of NCBI NO: 15239011 NR Description: unknown protein; protein id: At5g42610.1
  misc_feature (108)..(195): Homolog of NCBI NO: 37535778 NR Description: unknown protein [Oryza sativa (japonica
  misc_feature (18)..(186): Homolog of NCBI NO: 14596231 NR Description: Unknown protein [Arabidopsis thaliana]
  misc_feature (1)..(195): Homolog of NCBI NO: 24496456 NR Description: hypothetical protein [Arabidopsis thaliana]
  misc_feature (1)..(195): Homolog of NCBI NO: 15224063 NR Description: hypothetical protein; protein id: At2g23790.1
  misc_feature (1)..(184): Homolog of NCBI NO: 15234535 NR Description: putative protein; protein id: At4g36820.1

SEQ ID NO: 36642 - protein, 175 aa, Arabidopsis thaliana; identical to SEQ ID NO: 20736
  peptide (1)..(175): Ceres Seq. ID no. 12336361
  misc_feature (125)..(175): Pfam Name: Protein of unknown function, DUF607 Pfam Description: Protein of unknown function, DUF607
  misc_feature (125)..(175): Pfam Name: Protein of unknown function, DUF607 Pfam Description: Protein of unknown function, DUF607
  misc_feature (88)..(175): Homolog of NCBI NO: 37535778 NR Description: unknown protein [Oryza sativa (japonica
  misc_feature (1)..(175): Homolog of NCBI NO: 20330769 NR Description: Hypothetical protein [Oryza sativa (japonica
  misc_feature (74)..(166): Homolog of NCBI NO: 15239011 NR Description: unknown protein; protein id: At5g42610.1
  misc_feature (1)..(166): Homolog of NCBI NO: 15240047 NR Description: putative protein
  misc_feature (88)..(175): Homolog of NCBI NO: 37535778 NR Description: unknown protein [Oryza sativa (japonica
  misc_feature (74)..(166): Homolog of NCBI NO: 15239011 NR Description: unknown protein; protein id: At5g42610.1
  misc_feature (1)..(166): Homolog of NCBI NO: 14596231 NR Description: Unknown protein [Arabidopsis thaliana]
  misc_feature (1)..(175): Homolog of NCBI NO: 15224063 NR Description: hypothetical protein; protein id: At2g23790.1
  misc_feature (1)..(164): Homolog of NCBI NO: 15234535 NR Description: putative protein; protein id: At4g36820.1
  misc_feature (1)..(175): Homolog of NCBI NO: 24496456 NR Description: hypothetical protein [Arabidopsis thaliana]
  misc_feature (1)..(166): Homolog of NCBI NO: 15240047 NR Description: putative protein
  misc_feature (1)..(175): Homolog of NCBI NO: 20330769 NR Description: Hypothetical protein [Oryza sativa (japonica
  misc_feature (1)..(166): Homolog of NCBI NO: 14596231 NR Description: Unknown protein [Arabidopsis thaliana]
  misc_feature (1)..(175): Homolog of NCBI NO: 24496456 NR Description: hypothetical protein [Arabidopsis thaliana]
  misc_feature (1)..(175): Homolog of NCBI NO: 15224063 NR Description: hypothetical protein; protein id: At2g23790.1
  misc_feature (1)..(164): Homolog of NCBI NO: 15234535 NR Description: putative protein; protein id: At4g36820.1

SEQ ID NO: 36643 - DNA, 774 bp, Arabidopsis thaliana
  misc_feature (1)..(774): Ceres Seq. ID no. 12482158
  misc_feature: MA Experiment ID: 20000327 Result: Down-regulated in Transcription
  misc_feature: MA Experiment 20000327 PARAMETER Experiment Name: At_42deg_Heat_Sub_P Parameter: Age (day) Value: 14
  misc_feature: MA Experiment 20000327 PARAMETER Experiment Name: At_42deg_Heat_Sub_P Parameter: Organism Value: A. thaliana
  misc_feature: MA Experiment 20000327 PARAMETER Experiment Name: At_42deg_Heat_Sub_P Parameter: Plant Line Value: WS
  misc_feature: MA Experiment 20000327 PARAMETER Experiment Name: At_42deg_Heat_Sub_P Parameter: Temperature (deg C) Value: 42 vs. 22
  misc_feature: MA Experiment 20000327 PARAMETER Experiment Name: At_42deg_Heat_Sub_P Parameter: Timepoint (hr) Value: 1
  misc_feature: MA Experiment 20000327 PARAMETER Experiment Name: At_42deg_Heat_Sub_P Parameter: Tissue Value: Aerial
atgaggatttatctgattttcctcgtggtggtttccttatttacctccgcgttttccgattcgattctcgagtacccgtcggaaatcgagagtcgacacaagaaagctgccgaagaagatgtcaatttgcattgtacgacctggagattcgcggcggagatgaacaatctcgcgccgtggaaaacaatcccggtggaatgtgccgattacgtgaaggactatgtgatgggtaaaggctacctcaccgatttggagagagtctctgaagaagctttgatcttcgcgagaagcatcgaattctccggcgatggcaaagatatttggattttcgatatcgatgagactctcttatccaatcttccttattacattgatcatggttttgggttggagctttttgatcattcggagtttgataagtgggtagagagaggagtggcaccagccatagcaccaagcttgaagctttaccaaagagtgttagatttgggatacaaagttttcttgcttacagggaggaaagagagtcacaggcttgtcactgttgaaaatctcatcaatgctggtttccagaactgggacaagcttattctcagatctccagaggaacagcacaaaatggcgacactatacaaatctgagaagagagatgagatggtgaaagagggatataggattagaggcaattcaggtgatcaatggagtgatttgttgggtacctccatgtctcaacgatctttcaaactcgcaaatccaatgtattatatcccctga

SEQ ID NO: 36644 - protein, 257 aa, Arabidopsis thaliana
  peptide (1)..(257): Ceres Seq. ID no. 12482159
  misc_feature (29)..(257): Pfam Name: HAD superfamily, subfamily IIIB (Acid phosphatase) Pfam Description: HAD superfamily, subfamily IIIB (Acid
  misc_feature (50)..(223): Homolog of NCBI NO: 7705154 NR Description: acid phosphatase-1(1); Apase-1(1) [Lycopersicon
  misc_feature (6)..(256): Homolog of NCBI NO: 15233526 NR Description: acid phosphatase-like protein
  misc_feature (26)..(257): Homolog of NCBI NO: 15233504 NR Description: acid phosphatase-like protein
  misc_feature (1)..(256): Homolog of NCBI NO: 130718 NR Description: Acid phosphatase precursor 1
  misc_feature (1)..(256): Homolog of NCBI NO: 445113 NR Description: acid phosphatase 1
  misc_feature (1)..(257): Homolog of NCBI NO: 15234949 NR Description: acid phosphatase - like protein
  misc_feature (1)..(257): Homolog of NCBI NO: 15241412 NR Description: acid phosphatase; protein id: At5g51260.1
MRIYLIFLVVVSLFTSAFSDSILEYPSEIESRHKKAAEEDVNLHCTTWRFAAEMNNLAPWKTIPVECADYVKDYVMGKGYLTDLERVSEEALIFARSIEFSGDGKDIWIFDIDETLLSNLPYYIDHGFGLELFDHSEFDKWVERGVAPAIAPSLKLYQRVLDLGYKVFLLTGRKESHRLVTVENLINAGFQNWDKLILRSPEEQHKMATLYKSEKRDEMVKEGYRIRGNSGDQWSDLLGTSMSQRSFKLANPMYYIP

SEQ ID NO: 36645 - protein, 204 aa, Arabidopsis thaliana
  peptide (1)..(204): Ceres Seq. ID no. 12482160
  misc_feature (1)..(204): Pfam Name: HAD superfamily, subfamily IIIB (Acid phosphatase) Pfam Description: HAD superfamily, subfamily IIIB (Acid
  misc_feature (1)..(170): Homolog of NCBI NO: 7705154 NR Description: acid phosphatase-1(1); Apase-1(1) [Lycopersicon
  misc_feature (1)..(203): Homolog of NCBI NO: 15233526 NR Description: acid phosphatase-like protein
  misc_feature (1)..(204): Homolog of NCBI NO: 15233504 NR Description: acid phosphatase-like protein
  misc_feature (1)..(203): Homolog of NCBI NO: 130718 NR Description: Acid phosphatase precursor 1
  misc_feature (1)..(203): Homolog of NCBI NO: 445113 NR Description: acid phosphatase 1
  misc_feature (1)..(204): Homolog of NCBI NO: 15234949 NR Description: acid phosphatase - like protein
  misc_feature (1)..(204): Homolog of NCBI NO: 15241412 NR Description: acid phosphatase; protein id: At5g51260.1
MNNLAPWKTIPVECADYVKDYVMGKGYLTDLERVSEEALIFARSIEFSGDGKDIWIFDIDETLLSNLPYYIDHGFGLELFDHSEFDKWVERGVAPAIAPSLKLYQRVLDLGYKVFLLTGRKESHRLVTVENLINAGFQNWDKLILRSPEEQHKMATLYKSEKRDEMVKEGYRIRGNSGDQWSDLLGTSMSQRSFKLANPMYYIP

SEQ ID NO: 36646 - protein, 182 aa, Arabidopsis thaliana
  peptide (1)..(182): Ceres Seq. ID no. 12482161
  misc_feature (1)..(182): Pfam Name: HAD superfamily, subfamily IIIB (Acid phosphatase) Pfam Description: HAD superfamily, subfamily IIIB (Acid
  misc_feature (1)..(148): Homolog of NCBI NO: 7705154 NR Description: acid phosphatase-1(1); Apase-1(1) [Lycopersicon
  misc_feature (1)..(181): Homolog of NCBI NO: 15233526 NR Description: acid phosphatase-like protein
  misc_feature (1)..(182): Homolog of NCBI NO: 15233504 NR Description: acid phosphatase-like protein
  misc_feature (1)..(181): Homolog of NCBI NO: 130718 NR Description: Acid phosphatase precursor 1
  misc_feature (1)..(181): Homolog of NCBI NO: 445113 NR Description: acid phosphatase 1
  misc_feature (1)..(182): Homolog of NCBI NO: 15234949 NR Description: acid phosphatase - like protein
  misc_feature (1)..(182): Homolog of NCBI NO: 15241412 NR Description: acid phosphatase; protein id: At5g51260.1
MGKGYLTDLERVSEEALIFARSIEFSGDGKDIWIFDIDETLLSNLPYYIDHGFGLELFDHSEFDKWVERGVAPAIAPSLKLYQRVLDLGYKVFLLTGRKESHRLVTVENLINAGFQNWDKLILRSPEEQHKMATLYKSEKRDEMVKEGYRIRGNSGDQWSDLLGTSMSQRSFKLANPMYYIP

SEQ ID NO: 36647 - DNA, 1181 bp, Arabidopsis thaliana
  misc_feature (1)..(1181): Ceres Seq. ID no. 12562314
  misc_feature: MA Experiment ID: 20000166 Result: Up-regulated in Transcription
  misc_feature: MA Experiment 20000166 PARAMETER Experiment Name: At_100uM_ABA_P Parameter: Age (day) Value: 14
  misc_feature: MA Experiment 20000166 PARAMETER Experiment Name: At_100uM_ABA_P Parameter: Organism Value: A. thaliana
  misc_feature: MA Experiment 20000166 PARAMETER Experiment Name: At_100uM_ABA_P Parameter: Plant Line Value: WS
  misc_feature: MA Experiment 20000166 PARAMETER Experiment Name: At_100uM_ABA_P Parameter: Timepoint (hr) Value: 1
  misc_feature: MA Experiment 20000166 PARAMETER Experiment Name: At_100uM_ABA_P Parameter: Tissue Value: Aerial
  misc_feature: MA Experiment 20000166 PARAMETER Experiment Name: At_100uM_ABA_P Parameter: Treatment Value: 100uM ABA vs. No Treatment
  misc_feature: MA Experiment ID: 20000169 Result: Up-regulated in Transcription
  misc_feature: MA Experiment 20000169 PARAMETER Experiment Name: At_100uM_ABA_P Parameter: Age (day) Value: 14
  misc_feature: MA Experiment 20000169 PARAMETER Experiment Name: At_100uM_ABA_P Parameter: Organism Value: A. thaliana
  misc_feature: MA Experiment 20000169 PARAMETER Experiment Name: At_100uM_ABA_P Parameter: Plant Line Value: WS
  misc_feature: MA Experiment 20000169 PARAMETER Experiment Name: At_100uM_ABA_P Parameter: Timepoint (hr) Value: 6
  misc_feature: MA Experiment 20000169 PARAMETER Experiment Name: At_100uM_ABA_P Parameter: Tissue Value: Aerial
  misc_feature: MA Experiment 20000169 PARAMETER Experiment Name: At_100uM_ABA_P Parameter: Treatment Value: 100uM ABA vs. No Treatment
  misc_feature: MA Experiment ID: 20000171 Result: Down-regulated in Transcription
  misc_feature: MA Experiment 20000171 PARAMETER Experiment Name: At_42deg_Heat_P Parameter: Age (day) Value: 14
  misc_feature: MA Experiment 20000171 PARAMETER Experiment Name: At_42deg_Heat_P Parameter: Organism Value: A. thaliana
  misc_feature: MA Experiment 20000171 PARAMETER Experiment Name: At_42deg_Heat_P Parameter: Plant Line Value: WS
  misc_feature: MA Experiment 20000171 PARAMETER Experiment Name: At_42deg_Heat_P Parameter: Temperature (deg C) Value: 42 vs. 22
  misc_feature: MA Experiment 20000171 PARAMETER Experiment Name: At_42deg_Heat_P Parameter: Timepoint (hr) Value: 1
  misc_feature: MA Experiment 20000171 PARAMETER Experiment Name: At_42deg_Heat_P Parameter: Tissue Value: Aerial
  misc_feature: MA Experiment ID: 20000173 Result: Down-regulated in Transcription
  misc_feature: MA Experiment 20000173 PARAMETER Experiment Name: At_42deg_Heat_P Parameter: Age (day) Value: 14
  misc_feature: MA Experiment 20000173 PARAMETER Experiment Name: At_42deg_Heat_P Parameter: Organism Value: A. thaliana
  misc_feature: MA Experiment 20000173 PARAMETER Experiment Name: At_42deg_Heat_P Parameter: Plant Line Value: WS
  misc_feature: MA Experiment 20000173 PARAMETER Experiment Name: At_42deg_Heat_P Parameter: Temperature (deg C) Value: 42 vs. 22
  misc_feature: MA Experiment 20000173 PARAMETER Experiment Name: At_42deg_Heat_P Parameter: Timepoint (hr) Value: 6
  misc_feature: MA Experiment 20000173 PARAMETER Experiment Name: At_42deg_Heat_P Parameter: Tissue Value: Aerial
  misc_feature: MA Experiment ID: 20000182 Result: Up-regulated in Transcription
  misc_feature: MA Experiment 20000182 PARAMETER Experiment Name: At_2mM_SA_P Parameter: Age (day) Value: 14
  misc_feature: MA Experiment 20000182 PARAMETER Experiment Name: At_2mM_SA_P Parameter: Organism Value: A. thaliana
  misc_feature: MA Experiment 20000182 PARAMETER Experiment Name: At_2mM_SA_P Parameter: Plant Line Value: WS
  misc_feature: MA Experiment 20000182 PARAMETER Experiment Name: At_2mM_SA_P Parameter: Timepoint (hr) Value: 6
  misc_feature: MA Experiment 20000182 PARAMETER Experiment Name: At_2mM_SA_P Parameter: Tissue Value: Aerial
  misc_feature: MA Experiment 20000182 PARAMETER Experiment Name: At_2mM_SA_P Parameter: Treatment Value: 2mM SA vs. No Treatment
  misc_feature: MA Experiment ID: 20000184 Result: Down-regulated in Transcription
  misc_feature: MA Experiment 20000184 PARAMETER Experiment Name: At_Shoots__P Parameter: Age (day) Value: 7
  misc_feature: MA Experiment 20000184 PARAMETER Experiment Name: At_Shoots__P Parameter: Tissue Value: Shoots vs. Whole Plant
  misc_feature: MA Experiment ID: 20000227 Result: Down-regulated in Transcription
  misc_feature: MA Experiment 20000227 PARAMETER Experiment Name: At_Root-Tips-vs-Tops_P Parameter: Tissue Value: Root Tips vs. Root Tops
  misc_feature: MA Experiment ID: 20000234 Result: Down-regulated in Transcription
  misc_feature: MA Experiment 20000234 PARAMETER Experiment Name: At_Siliques_P Parameter: Age (day) Value: 21
  misc_feature: MA Experiment 20000234 PARAMETER Experiment Name: At_Siliques_P Parameter: Organism Value: A. thaliana
  misc_feature: MA Experiment 20000234 PARAMETER Experiment Name: At_Siliques_P Parameter: Plant Line Value: WS
  misc_feature: MA Experiment 20000234 PARAMETER Experiment Name: At_Siliques_P Parameter: Tissue Value: Less Than 5mm Siliques vs. Whole Plant
  misc_feature: MA Experiment ID: 20000235 Result: Down-regulated in Transcription
  misc_feature: MA Experiment 20000235 PARAMETER Experiment Name: At_Siliques_P Parameter: Age (day) Value: 21
  misc_feature: MA Experiment 20000235 PARAMETER Experiment Name: At_Siliques_P Parameter: Organism Value: A. thaliana
  misc_feature: MA Experiment 20000235 PARAMETER Experiment Name: At_Siliques_P Parameter: Plant Line Value: WS
  misc_feature: MA Experiment 20000235 PARAMETER Experiment Name: At_Siliques_P Parameter: Tissue Value: 5-10mm Siliques vs. Whole Plant
  misc_feature: MA Experiment ID: 20000264 Result: Up-regulated in Transcription
  misc_feature: MA Experiment 20000264 PARAMETER Experiment Name: At_Open_Flower_P Parameter: Age (day) Value: 21
  misc_feature: MA Experiment 20000264 PARAMETER Experiment Name: At_Open_Flower_P Parameter: Plant Line Value: WS
  misc_feature: MA Experiment 20000264 PARAMETER Experiment Name: At_Open_Flower_P Parameter: Tissue Value: Open Flower vs. Whole Plant
  misc_feature: MA Experiment ID: 20000267 Result: Up-regulated in Transcription
  misc_feature: MA Experiment 20000267 PARAMETER Experiment Name: At_Drought_P Parameter: Age (day) Value: 7
  misc_feature: MA Experiment 20000267 PARAMETER Experiment Name: At_Drought_P Parameter: Organism Value: A. thaliana
  misc_feature: MA Experiment 20000267 PARAMETER Experiment Name: At_Drought_P Parameter: Plant Line Value: WS
  misc_feature: MA Experiment 20000267 PARAMETER Experiment Name: At_Drought_P Parameter: Timepoint (hr) Value: 6
  misc_feature: MA Experiment 20000267 PARAMETER Experiment Name: At_Drought_P Parameter: Tissue Value: Whole Plant
  misc_feature: MA Experiment 20000267 PARAMETER Experiment Name: At_Drought_P Parameter: Treatment Value: Drought vs. No Drought
  misc_feature: MA Experiment ID: 20000268 Result: Up-regulated in Transcription
  misc_feature: MA Experiment 20000268 PARAMETER Experiment Name: At_100mM_NaCl__P Parameter: Age (day) Value: 14
  misc_feature: MA Experiment 20000268 PARAMETER Experiment Name: At_100mM_NaCl__P Parameter: Organism Value: A. thaliana
  misc_feature: MA Experiment 20000268 PARAMETER Experiment Name: At_100mM_NaCl__P Parameter: Plant Line Value: WS
  misc_feature: MA Experiment 20000268 PARAMETER Experiment Name: At_100mM_NaCl__P Parameter: Timepoint (hr) Value: 6
  misc_feature: MA Experiment 20000268 PARAMETER Experiment Name: At_100mM_NaCl__P Parameter: Tissue Value: Whole Plant
  misc_feature: MA Experiment 20000268 PARAMETER Experiment Name: At_100mM_NaCl__P Parameter: Treatment Value: 100mM NaCl vs. No Treatment
  misc_feature: MA Experiment ID: 20000436 Result: Up-regulated in Transcription
  misc_feature: MA Experiment 20000436 PARAMETER Experiment Name: At_Drought_P Parameter: Age (day) Value: 7
  misc_feature: MA Experiment 20000436 PARAMETER Experiment Name: At_Drought_P Parameter: Organism Value: A. thaliana
  misc_feature: MA Experiment 20000436 PARAMETER Experiment Name: At_Drought_P Parameter: Plant Line Value: WS
  misc_feature: MA Experiment 20000436 PARAMETER Experiment Name: At_Drought_P Parameter: Timepoint (hr) Value: 12
  misc_feature: MA Experiment 20000436 PARAMETER Experiment Name: At_Drought_P Parameter: Tissue Value: Whole Plant
  misc_feature: MA Experiment 20000436 PARAMETER Experiment Name: At_Drought_P Parameter: Treatment Value: Drought vs. No Drought
  misc_feature: MA Experiment ID: 20000437 Result: Up-regulated in Transcription
  misc_feature: MA Experiment 20000437 PARAMETER Experiment Name: At_Drought_P Parameter: Age (day) Value: 8
  misc_feature: MA Experiment 20000437 PARAMETER Experiment Name: At_Drought_P Parameter: Organism Value: A. thaliana
  misc_feature: MA Experiment 20000437 PARAMETER Experiment Name: At_Drought_P Parameter: Plant Line Value: WS
  misc_feature: MA Experiment 20000437 PARAMETER Experiment Name: At_Drought_P Parameter: Timepoint (hr) Value: 24
  misc_feature: MA Experiment 20000437 PARAMETER Experiment Name: At_Drought_P Parameter: Tissue Value: Whole Plant
  misc_feature: MA Experiment 20000437 PARAMETER Experiment Name: At_Drought_P Parameter: Treatment Value: Drought vs. No Drought
  misc_feature: MA Experiment ID: 20000438 Result: Down-regulated in Transcription
  misc_feature: MA Experiment 20000438 PARAMETER Experiment Name: At_Shoots__P Parameter: Age (day) Value: 14
  misc_feature: MA Experiment 20000438 PARAMETER Experiment Name: At_Shoots__P Parameter: Tissue Value: Shoots vs. Whole Plant
  misc_feature: MA Experiment ID: 20000453 Result: Up-regulated in Transcription
  misc_feature: MA Experiment 20000453 PARAMETER Experiment Name: At_100uM_ABA_P Parameter: Age (day) Value: 15
  misc_feature: MA Experiment 20000453 PARAMETER Experiment Name: At_100uM_ABA_P Parameter: Organism Value: A. thaliana
  misc_feature: MA Experiment 20000453 PARAMETER Experiment Name: At_100uM_ABA_P Parameter: Plant Line Value: WS
  misc_feature: MA Experiment 20000453 PARAMETER Experiment Name: At_100uM_ABA_P Parameter: Timepoint (hr) Value: 24
  misc_feature: MA Experiment 20000453 PARAMETER Experiment Name: At_100uM_ABA_P Parameter: Tissue Value: Aerial
  misc_feature: MA Experiment 20000453 PARAMETER Experiment Name: At_100uM_ABA_P Parameter: Treatment Value: 100uM ABA vs. No Treatment
  misc_feature: MA Experiment ID: 20000455 Result: Up-regulated in Transcription
  misc_feature: MA Experiment 20000455 PARAMETER Experiment Name: At_100uM_ABA_P Parameter: Age (day) Value: 16
  misc_feature: MA Experiment 20000455 PARAMETER Experiment Name: At_100uM_ABA_P Parameter: Organism Value: A. thaliana
  misc_feature: MA Experiment 20000455 PARAMETER Experiment Name: At_100uM_ABA_P Parameter: Plant Line Value: WS
  misc_feature: MA Experiment 20000455 PARAMETER Experiment Name: At_100uM_ABA_P Parameter: Timepoint (hr) Value: 48
  misc_feature: MA Experiment 20000455 PARAMETER Experiment Name: At_100uM_ABA_P Parameter: Tissue Value: Aerial
  misc_feature: MA Experiment 20000455 PARAMETER Experiment Name: At_100uM_ABA_P Parameter: Treatment Value: 100uM ABA vs. No Treatment
  misc_feature: MA Experiment ID: 20000575 Result: Up-regulated in Transcription
  misc_feature: MA Experiment 20000575 PARAMETER Experiment Name: At_100uM_ABA_Mutants__P Parameter: Organism Value: A. thaliana
  misc_feature: MA Experiment 20000575 PARAMETER Experiment Name: At_100uM_ABA_Mutants__P Parameter: Plant Line Value: CS22
  misc_feature: MA Experiment 20000575 PARAMETER Experiment Name: At_100uM_ABA_Mutants__P Parameter: Timepoint (hr) Value: 6
  misc_feature: MA Experiment 20000575 PARAMETER Experiment Name: At_100uM_ABA_Mutants__P Parameter: Tissue Value: Whole Plant
  misc_feature: MA Experiment 20000575 PARAMETER Experiment Name: At_100uM_ABA_Mutants__P Parameter: Treatment Value: 1uM ABA vs. No Treatment
  misc_feature: MA Experiment ID: 20000576 Result: Up-regulated in Transcription
  misc_feature: MA Experiment 20000576 PARAMETER Experiment Name: At_100uM_ABA_Mutants__P Parameter: Organism Value: A. thaliana
  misc_feature: MA Experiment 20000576 PARAMETER Experiment Name: At_100uM_ABA_Mutants__P Parameter: Plant Line Value: CS23
  misc_feature: MA Experiment 20000576 PARAMETER Experiment Name: At_100uM_ABA_Mutants__P Parameter: Timepoint (hr) Value: 6
  misc_feature: MA Experiment 20000576 PARAMETER Experiment Name: At_100uM_ABA_Mutants__P Parameter: Tissue Value: Whole Plant
  misc_feature: MA Experiment 20000576 PARAMETER Experiment Name: At_100uM_ABA_Mutants__P Parameter: Treatment Value: 1uM ABA vs. No Treatment
  misc_feature: MA Experiment ID: 20000709 Result: Down-regulated in Transcription
  misc_feature: MA Experiment 20000709 PARAMETER Experiment Name: At_15mM_NH4NO3_L-to-H_P Parameter: Age (hr) Value: 14
  misc_feature: MA Experiment 20000709 PARAMETER Experiment Name: At_15mM_NH4NO3_L-to-H_P Parameter: Organism Value: A. thaliana
  misc_feature: MA Experiment 20000709 PARAMETER Experiment Name: At_15mM_NH4NO3_L-to-H_P Parameter: Plant Line Value: WS
  misc_feature: MA Experiment 20000709 PARAMETER Experiment Name: At_15mM_NH4NO3_L-to-H_P Parameter: Timepoint (hr) Value: 4
  misc_feature: MA Experiment 20000709 PARAMETER Experiment Name: At_15mM_NH4NO3_L-to-H_P Parameter: Tissue Value: Aerial
  misc_feature: MA Experiment 20000709 PARAMETER Experiment Name: At_15mM_NH4NO3_L-to-H_P Parameter: Treatment Value: 15mM NH4NO3 vs. 30mM Mannitol
  misc_feature: MA Experiment ID: 20000794 Result: Up-regulated in Transcription
  misc_feature: MA Experiment 20000794 PARAMETER Experiment Name: At_Petals_P Parameter: Age (day) Value: 23-25 days
  misc_feature: MA Experiment 20000794 PARAMETER Experiment Name: At_Petals_P Parameter: Plant Line Value: WS
  misc_feature: MA Experiment 20000794 PARAMETER Experiment Name: At_Petals_P Parameter: Tissue Value: Petals vs. Whole plant
  misc_feature: MA Experiment ID: 20001553 Result: Up-regulated in Transcription
  misc_feature: MA Experiment 20001553 PARAMETER Experiment Name: At_Drought_Soil_Dry_P Parameter: Age (day) Value: 19
  misc_feature: MA Experiment 20001553 PARAMETER Experiment Name: At_Drought_Soil_Dry_P Parameter: Organism Value: A. thaliana
  misc_feature: MA Experiment 20001553 PARAMETER Experiment Name: At_Drought_Soil_Dry_P Parameter: Plant Line Value: WS
  misc_feature: MA Experiment 20001553 PARAMETER Experiment Name: At_Drought_Soil_Dry_P Parameter: Post Timepoint (hr) Value: None
  misc_feature: MA Experiment 20001553 PARAMETER Experiment Name: At_Drought_Soil_Dry_P Parameter: Post-Treatment Value: None
  misc_feature: MA Experiment 20001553 PARAMETER Experiment Name: At_Drought_Soil_Dry_P Parameter: Timepoint (day) Value: 5
  misc_feature: MA Experiment 20001553 PARAMETER Experiment Name: At_Drought_Soil_Dry_P Parameter: Treatment Value: Drought vs. No Drought
  misc_feature: MA Experiment ID: 20001554 Result: Up-regulated in Transcription
  misc_feature: MA Experiment 20001554 PARAMETER Experiment Name: At_Drought_Soil_Dry_P Parameter: Age (day) Value: 21
  misc_feature: MA Experiment 20001554 PARAMETER Experiment Name: At_Drought_Soil_Dry_P Parameter: Organism Value: A. thaliana
  misc_feature: MA Experiment 20001554 PARAMETER Experiment Name: At_Drought_Soil_Dry_P Parameter: Plant Line Value: WS
  misc_feature: MA Experiment 20001554 PARAMETER Experiment Name: At_Drought_Soil_Dry_P Parameter: Post Timepoint (hr) Value: None
  misc_feature: MA Experiment 20001554 PARAMETER Experiment Name: At_Drought_Soil_Dry_P Parameter: Post-Treatment Value: None
  misc_feature: MA Experiment 20001554 PARAMETER Experiment Name: At_Drought_Soil_Dry_P Parameter: Timepoint (day) Value: 7
  misc_feature: MA Experiment 20001554 PARAMETER Experiment Name: At_Drought_Soil_Dry_P Parameter: Treatment Value: Drought vs. No Drought
  misc_feature: MA Experiment ID: 20001555 Result: Up-regulated in Transcription
  misc_feature: MA Experiment 20001555 PARAMETER Experiment Name: At_Drought_Soil_Dry_P Parameter: Age (day) Value: 24
  misc_feature: MA Experiment 20001555 PARAMETER Experiment Name: At_Drought_Soil_Dry_P Parameter: Organism Value: A. thaliana
  misc_feature: MA Experiment 20001555 PARAMETER Experiment Name: At_Drought_Soil_Dry_P Parameter: Plant Line Value: WS
  misc_feature: MA Experiment 20001555 PARAMETER Experiment Name: At_Drought_Soil_Dry_P Parameter: Post Timepoint (hr) Value: None
  misc_feature: MA Experiment 20001555 PARAMETER Experiment Name: At_Drought_Soil_Dry_P Parameter: Post-Treatment Value: None
  misc_feature: MA Experiment 20001555 PARAMETER Experiment Name: At_Drought_Soil_Dry_P Parameter: Timepoint (day) Value: 10
  misc_feature: MA Experiment 20001555 PARAMETER Experiment Name: At_Drought_Soil_Dry_P Parameter: Treatment Value: Drought vs. No Drought
  misc_feature: MA Experiment ID: 20001556 Result: Up-regulated in Transcription
  misc_feature: MA Experiment 20001556 PARAMETER Experiment Name: At_Drought_Soil_Dry_P Parameter: Age (day) Value: 26
  misc_feature: MA Experiment 20001556 PARAMETER Experiment Name: At_Drought_Soil_Dry_P Parameter: Organism Value: A. thaliana
  misc_feature: MA Experiment 20001556 PARAMETER Experiment Name: At_Drought_Soil_Dry_P Parameter: Plant Line Value: WS
  misc_feature: MA Experiment 20001556 PARAMETER Experiment Name: At_Drought_Soil_Dry_P Parameter: Post Timepoint (hr) Value: None
  misc_feature: MA Experiment 20001556 PARAMETER Experiment Name: At_Drought_Soil_Dry_P Parameter: Post-Treatment Value: None
  misc_feature: MA Experiment 20001556 PARAMETER Experiment Name: At_Drought_Soil_Dry_P Parameter: Timepoint (day) Value: 12
  misc_feature: MA Experiment 20001556 PARAMETER Experiment Name: At_Drought_Soil_Dry_P Parameter: Treatment Value: Drought vs. No Drought
  misc_feature: MA Experiment ID: 20001559 Result: Up-regulated in Transcription
  misc_feature: MA Experiment 20001559 PARAMETER Experiment Name: At_Drought_Soil_Dry_P Parameter: Age (day) Value: 28
  misc_feature: MA Experiment 20001559 PARAMETER Experiment Name: At_Drought_Soil_Dry_P Parameter: Organism Value: A. thaliana
  misc_feature: MA Experiment 20001559 PARAMETER Experiment Name: At_Drought_Soil_Dry_P Parameter: Plant Line Value: WS
  misc_feature: MA Experiment 20001559 PARAMETER Experiment Name: At_Drought_Soil_Dry_P Parameter: Post Timepoint (hr) Value: 29
  misc_feature: MA Experiment 20001559 PARAMETER Experiment Name: At_Drought_Soil_Dry_P Parameter: Post-Treatment Value: Re-Water vs. No Drought
  misc_feature: MA Experiment 20001559 PARAMETER Experiment Name: At_Drought_Soil_Dry_P Parameter: Timepoint (day) Value: 14
  misc_feature: MA Experiment 20001559 PARAMETER Experiment Name: At_Drought_Soil_Dry_P Parameter: Treatment Value: Drought vs. No Drought
  misc_feature: MA Experiment ID: 20001771 Result: Up-regulated in Transcription
  misc_feature: MA Experiment 20001771 PARAMETER Experiment Name: At_Far-red-enriched-adult_P Parameter: Age (day) Value: 28
  misc_feature: MA Experiment 20001771 PARAMETER Experiment Name: At_Far-red-enriched-adult_P Parameter: Light Value: Far-red enriched vs. White
  misc_feature: MA Experiment 20001771 PARAMETER Experiment Name: At_Far-red-enriched-adult_P Parameter: Organism Value: A. thaliana
  misc_feature: MA Experiment 20001771 PARAMETER Experiment Name: At_Far-red-enriched-adult_P Parameter: Plant Line Value: Columbia
  misc_feature: MA Experiment 20001771 PARAMETER Experiment Name: At_Far-red-enriched-adult_P Parameter: Timepoint (hr) Value: 16
  misc_feature: MA Experiment 20001771 PARAMETER Experiment Name: At_Far-red-enriched-adult_P Parameter: Tissue Value: Aerial
  misc_feature: MA Experiment ID: 20001904 Result: Up-regulated in Transcription
  misc_feature: MA Experiment 20001904 PARAMETER Experiment Name: At_Drought_Reproduction_P Parameter: Age (day) Value: 37
  misc_feature: MA Experiment 20001904 PARAMETER Experiment Name: At_Drought_Reproduction_P Parameter: Organism Value: A. thaliana
  misc_feature: MA Experiment 20001904 PARAMETER Experiment Name: At_Drought_Reproduction_P Parameter: Plant Line Value: WS
  misc_feature: MA Experiment 20001904 PARAMETER Experiment Name: At_Drought_Reproduction_P Parameter: Timepoint (day) Value: 7
  misc_feature: MA Experiment 20001904 PARAMETER Experiment Name: At_Drought_Reproduction_P Parameter: Tissue Value: Rosettes
  misc_feature: MA Experiment 20001904 PARAMETER Experiment Name: At_Drought_Reproduction_P Parameter: Treatment Value: Drought vs. No Drought
  misc_feature: MA Experiment ID: 20001905 Result: Up-regulated in Transcription
  misc_feature: MA Experiment 20001905 PARAMETER Experiment Name: At_Drought_Reproduction_P Parameter: Age (day) Value: 40
  misc_feature: MA Experiment 20001905 PARAMETER Experiment Name: At_Drought_Reproduction_P Parameter: Organism Value: A. thaliana
  misc_feature: MA Experiment 20001905 PARAMETER Experiment Name: At_Drought_Reproduction_P Parameter: Plant Line Value: WS
  misc_feature: MA Experiment 20001905 PARAMETER Experiment Name: At_Drought_Reproduction_P Parameter: Timepoint (day) Value: 10
  misc_feature: MA Experiment 20001905 PARAMETER Experiment Name: At_Drought_Reproduction_P Parameter: Tissue Value: Rosettes
  misc_feature: MA Experiment 20001905 PARAMETER Experiment Name: At_Drought_Reproduction_P Parameter: Treatment Value: Drought vs. No Drought
  misc_feature: MA Experiment ID: 20001906 Result: Up-regulated in Transcription
  misc_feature: MA Experiment 20001906 PARAMETER Experiment Name: At_Drought_Reproduction_P Parameter: Age (day) Value: 35
  misc_feature: MA Experiment 20001906 PARAMETER Experiment Name: At_Drought_Reproduction_P Parameter: Organism Value: A. thaliana
  misc_feature: MA Experiment 20001906 PARAMETER Experiment Name: At_Drought_Reproduction_P Parameter: Plant Line Value: WS
  misc_feature: MA Experiment 20001906 PARAMETER Experiment Name: At_Drought_Reproduction_P Parameter: Timepoint (day) Value: 5
  misc_feature: MA Experiment 20001906 PARAMETER Experiment Name: At_Drought_Reproduction_P Parameter: Tissue Value: Siliques
  misc_feature: MA Experiment 20001906 PARAMETER Experiment Name: At_Drought_Reproduction_P Parameter: Treatment Value: Drought vs. No Drought
  misc_feature: MA Experiment ID: 20001907 Result: Up-regulated in Transcription
  misc_feature: MA Experiment 20001907 PARAMETER Experiment Name: At_Drought_Reproduction_P Parameter: Age (day) Value: 37
  misc_feature: MA Experiment 20001907 PARAMETER Experiment Name: At_Drought_Reproduction_P Parameter: Organism Value: A. thaliana
  misc_feature: MA Experiment 20001907 PARAMETER Experiment Name: At_Drought_Reproduction_P Parameter: Plant Line Value: WS
  misc_feature: MA Experiment 20001907 PARAMETER Experiment Name: At_Drought_Reproduction_P Parameter: Timepoint (day) Value: 7
  misc_feature: MA Experiment 20001907 PARAMETER Experiment Name: At_Drought_Reproduction_P Parameter: Tissue Value: Siliques
  misc_feature: MA Experiment 20001907 PARAMETER Experiment Name: At_Drought_Reproduction_P Parameter: Treatment Value: Drought vs. No Drought
  misc_feature: MA Experiment ID: 20001908 Result: Up-regulated in Transcription
  misc_feature: MA Experiment 20001908 PARAMETER Experiment Name: At_Drought_Reproduction_P Parameter: Age (day) Value: 40
  misc_feature: MA Experiment 20001908 PARAMETER Experiment Name: At_Drought_Reproduction_P Parameter: Organism Value: A. thaliana
  misc_feature: MA Experiment 20001908 PARAMETER Experiment Name: At_Drought_Reproduction_P Parameter: Plant Line Value: WS
  misc_feature: MA Experiment 20001908 PARAMETER Experiment Name: At_Drought_Reproduction_P Parameter: Timepoint (day) Value: 10
  misc_feature: MA Experiment 20001908 PARAMETER Experiment Name: At_Drought_Reproduction_P Parameter: Tissue Value: Siliques
  misc_feature: MA Experiment 20001908 PARAMETER Experiment Name: At_Drought_Reproduction_P Parameter: Treatment Value: Drought vs. No Drought
  misc_feature: MA Experiment ID: 20001909 Result: Up-regulated in Transcription
  misc_feature: MA Experiment 20001909 PARAMETER Experiment Name: At_Drought_Reproduction_P Parameter: Age (day) Value: 35
  misc_feature: MA Experiment 20001909 PARAMETER Experiment Name: At_Drought_Reproduction_P Parameter: Organism Value: A. thaliana
  misc_feature: MA Experiment 20001909 PARAMETER Experiment Name: At_Drought_Reproduction_P Parameter: Plant Line Value: WS
  misc_feature: MA Experiment 20001909 PARAMETER Experiment Name: At_Drought_Reproduction_P Parameter: Timepoint (day) Value: 5
  misc_feature: MA Experiment 20001909 PARAMETER Experiment Name: At_Drought_Reproduction_P Parameter: Tissue Value: Flowers
  misc_feature: MA Experiment 20001909 PARAMETER Experiment Name: At_Drought_Reproduction_P Parameter: Treatment Value: Drought vs. No Drought
  misc_feature: MA Experiment ID: 20001910 Result: Up-regulated in Transcription
  misc_feature: MA Experiment 20001910 PARAMETER Experiment Name: At_Drought_Reproduction_P Parameter: Age (day) Value: 37
  misc_feature: MA Experiment 20001910 PARAMETER Experiment Name: At_Drought_Reproduction_P Parameter: Organism Value: A. thaliana
  misc_feature: MA Experiment 20001910 PARAMETER Experiment Name: At_Drought_Reproduction_P Parameter: Plant Line Value: WS
  misc_feature: MA Experiment 20001910 PARAMETER Experiment Name: At_Drought_Reproduction_P Parameter: Timepoint (day) Value: 7
  misc_feature: MA Experiment 20001910 PARAMETER Experiment Name: At_Drought_Reproduction_P Parameter: Tissue Value: Flowers
  misc_feature: MA Experiment 20001910 PARAMETER Experiment Name: At_Drought_Reproduction_P Parameter: Treatment Value: Drought vs. No Drought
  misc_feature: MA Experiment ID: 20001911 Result: Up-regulated in Transcription
  misc_feature: MA Experiment 20001911 PARAMETER Experiment Name: At_Drought_Reproduction_P Parameter: Age (day) Value: 40
  misc_feature: MA Experiment 20001911 PARAMETER Experiment Name: At_Drought_Reproduction_P Parameter: Organism Value: A. thaliana
  misc_feature: MA Experiment 20001911 PARAMETER Experiment Name: At_Drought_Reproduction_P Parameter: Plant Line Value: WS
  misc_feature: MA Experiment 20001911 PARAMETER Experiment Name: At_Drought_Reproduction_P Parameter: Timepoint (day) Value: 10
  misc_feature: MA Experiment 20001911 PARAMETER Experiment Name: At_Drought_Reproduction_P Parameter: Tissue Value: Flowers
  misc_feature: MA Experiment 20001911 PARAMETER Experiment Name: At_Drought_Reproduction_P Parameter: Treatment Value: Drought vs. No Drought
atgctaaggagccctcccaaaaaagaacaacaaatcacatttttatataactgttaacataataatctcagcctcatcaacacacatatatagatagccaacatcacacaaacatagagattccaaaaaataaaaataaagaaaacataaatcctctgaggaaaaattccgatgagatgacagaaggtggagaatattctccggcgatgatgtcagcagagccattcttgaccatgaagaagatgaagaagagcaaccacaacaagaacaatcagagaaggtttagcgacgagcagatcaagtcactggagatgatgtttgagtctgagacaaggcttgagccaaggaagaaggttcaattagctagagagctagggttgcagccgaggcaagtggctatatggtttcagaacaagagggctcgttggaaatccaagcagctcgagactgagtacaacattctcagacaaaactacgacaacttggcttctcagttcgagtccttaaagaaagaaaaacaagctttagtctctgagttgcagaggctaaaagaggcgacgcaaaagaagacacaggaggaggaaaggcagtgtagtggagatcaagcggtggttgctctaagcagcacacatcatgaatcagaaaacgaagagaaccggaggcgtaaaccggaagaggttagaccggagatggagatgaaagatgataagggtcatcatggggttatgtgtgatcatcatgattatgaagatgatgataatggttatagtaacaacatcaagagagagtattttggtgggtttgaggaagaaccagatcacttaatgaacattgttgaaccagctgatagttgtttgacatcatctgatgattggagaggtttcaaatcagatactactactctcttggaccaatccagcaacaattacccttggcgggatttttggtcatgaaaacaataaactctaaacaagaagatgaaacagattgagactaaagattggatatatacatattcaaatcgaaatttaccggtctacatcgcatgaaccgagccacggatatagagatattcggtccagcaaatgactcgtttctcagcgagaattttgcaggattttgagctgaaattgtatggttttgtctgtataaatgatgtgtttagaaagacgtatattctc

SEQ ID NO: 36648 - protein, 258 aa, Arabidopsis thaliana
  peptide (1)..(258): Ceres Seq. ID no. 12562315
  misc_feature (30)..(86): Pfam Name: Homeobox domain Pfam Description: Homeobox domain
  misc_feature (12)..(144): Homolog of NCBI NO: 13447045 NR Description: homeobox-leucine zipper protein HAHB-4
  misc_feature (23)..(194): Homolog of NCBI NO: 22651698 NR Description: homeodomain protein Hfi22 [Nicotiana tabacum]
  misc_feature (32)..(131): Homolog of NCBI NO: 37147908 NR Description: HD-ZIP [Capsicum annuum]
  misc_feature (33)..(159): Homolog of NCBI NO: 29367373 NR Description: homeodomain leucine zipper protein-like protein
  misc_feature (31)..(130): Homolog of NCBI NO: 5006857 NR Description: homeodomain leucine zipper protein [Oryza sativa]
  misc_feature (1)..(133): Homolog of NCBI NO: 5031277 NR Description: homeobox leucine zipper protein [Prunus armeniaca]
  misc_feature (1)..(193): Homolog of NCBI NO: 11357332 NR Description: homeobox-leucine zipper protein ATHB-12
  misc_feature (1)..(193): Homolog of NCBI NO: 15228625 NR Description: homeobox-leucine zipper protein ATHB-12
  misc_feature (1)..(258): Homolog of NCBI NO: 629527 NR Description: homeotic protein Athb-7 - Arabidopsis thaliana
  misc_feature (1)..(258): Homolog of NCBI NO: 15226424 NR Description: homeodomain transcription factor  (ATHB-7)
MTEGGEYSPAMMSAEPFLTMKKMKKSNHNKNNQRRFSDEQIKSLEMMFESETRLEPRKKVQLARELGLQPRQVAIWFQNKRARWKSKQLETEYNILRQNYDNLASQFESLKKEKQALVSELQRLKEATQKKTQEEERQCSGDQAVVALSSTHHESENEENRRRKPEEVRPEMEMKDDKGHHGVMCDHHDYEDDDNGYSNNIKREYFGGFEEEPDHLMNIVEPADSCLTSSDDWRGFKSDTTTLLDQSSNNYPWRDFWS

SEQ ID NO: 36649 - protein, 248 aa, Arabidopsis thaliana
  peptide (1)..(248): Ceres Seq. ID no. 12562316
  misc_feature (20)..(76): Pfam Name: Homeobox domain Pfam Description: Homeobox domain
  misc_feature (2)..(134): Homolog of NCBI NO: 13447045 NR Description: homeobox-leucine zipper protein HAHB-4
  misc_feature (13)..(184): Homolog of NCBI NO: 22651698 NR Description: homeodomain protein Hfi22 [Nicotiana tabacum]
  misc_feature (22)..(121): Homolog of NCBI NO: 37147908 NR Description: HD-ZIP [Capsicum annuum]
  misc_feature (23)..(149): Homolog of NCBI NO: 29367373 NR Description: homeodomain leucine zipper protein-like protein
  misc_feature (21)..(120): Homolog of NCBI NO: 5006857 NR Description: homeodomain leucine zipper protein [Oryza sativa]
  misc_feature (1)..(123): Homolog of NCBI NO: 5031277 NR Description: homeobox leucine zipper protein [Prunus armeniaca]
  misc_feature (1)..(183): Homolog of NCBI NO: 11357332 NR Description: homeobox-leucine zipper protein ATHB-12
  misc_feature (1)..(183): Homolog of NCBI NO: 15228625 NR Description: homeobox-leucine zipper protein ATHB-12
  misc_feature (1)..(248): Homolog of NCBI NO: 629527 NR Description: homeotic protein Athb-7 - Arabidopsis thaliana
  misc_feature (1)..(248): Homolog of NCBI NO: 15226424 NR Description: homeodomain transcription factor  (ATHB-7)
MMSAEPFLTMKKMKKSNHNKNNQRRFSDEQIKSLEMMFESETRLEPRKKVQLARELGLQPRQVAIWFQNKRARWKSKQLETEYNILRQNYDNLASQFESLKKEKQALVSELQRLKEATQKKTQEEERQCSGDQAVVALSSTHHESENEENRRRKPEEVRPEMEMKDDKGHHGVMCDHHDYEDDDNGYSNNIKREYFGGFEEEPDHLMNIVEPADSCLTSSDDWRGFKSDTTTLLDQSSNNYPWRDFWS

SEQ ID NO: 36650 - protein, 247 aa, Arabidopsis thaliana
  peptide (1)..(247): Ceres Seq. ID no. 12562317
  misc_feature (19)..(75): Pfam Name: Homeobox domain Pfam Description: Homeobox domain
  misc_feature (1)..(133): Homolog of NCBI NO: 13447045 NR Description: homeobox-leucine zipper protein HAHB-4
  misc_feature (12)..(183): Homolog of NCBI NO: 22651698 NR Description: homeodomain protein Hfi22 [Nicotiana tabacum]
  misc_feature (21)..(120): Homolog of NCBI NO: 37147908 NR Description: HD-ZIP [Capsicum annuum]
  misc_feature (22)..(148): Homolog of NCBI NO: 29367373 NR Description: homeodomain leucine zipper protein-like protein
  misc_feature (20)..(119): Homolog of NCBI NO: 5006857 NR Description: homeodomain leucine zipper protein [Oryza sativa]
  misc_feature (1)..(122): Homolog of NCBI NO: 5031277 NR Description: homeobox leucine zipper protein [Prunus armeniaca]
  misc_feature (1)..(182): Homolog of NCBI NO: 11357332 NR Description: homeobox-leucine zipper protein ATHB-12
  misc_feature (1)..(182): Homolog of NCBI NO: 15228625 NR Description: homeobox-leucine zipper protein ATHB-12
  misc_feature (1)..(247): Homolog of NCBI NO: 629527 NR Description: homeotic protein Athb-7 - Arabidopsis thaliana
  misc_feature (1)..(247): Homolog of NCBI NO: 15226424 NR Description: homeodomain transcription factor  (ATHB-7)
MSAEPFLTMKKMKKSNHNKNNQRRFSDEQIKSLEMMFESETRLEPRKKVQLARELGLQPRQVAIWFQNKRARWKSKQLETEYNILRQNYDNLASQFESLKKEKQALVSELQRLKEATQKKTQEEERQCSGDQAVVALSSTHHESENEENRRRKPEEVRPEMEMKDDKGHHGVMCDHHDYEDDDNGYSNNIKREYFGGFEEEPDHLMNIVEPADSCLTSSDDWRGFKSDTTTLLDQSSNNYPWRDFWS

SEQ ID NO: 36651 - DNA, 1127 bp, Arabidopsis thaliana
  misc_feature (1)..(1127): Ceres Seq. ID no. 13491200
  misc_feature: MA Experiment ID: 108462 Result: Up-regulated in Transcription
  misc_feature: MA Experiment 108462 PARAMETER Experiment Name: At_Germinating_Seeds_cDNA_P Parameter: Age (day) Value: 2 vs. 0
  misc_feature: MA Experiment 108462 PARAMETER Experiment Name: At_Germinating_Seeds_cDNA_P Parameter: Tissue Value: Germinating Seeds
  misc_feature: MA Experiment ID: 108464 Result: Up-regulated in Transcription
  misc_feature: MA Experiment 108464 PARAMETER Experiment Name: At_Germinating_Seeds_cDNA_P Parameter: Age (day) Value: 4 vs. 0
  misc_feature: MA Experiment 108464 PARAMETER Experiment Name: At_Germinating_Seeds_cDNA_P Parameter: Tissue Value: Germinating Seeds
  misc_feature: MA Experiment ID: 108595 Result: Up-regulated in Transcription
  misc_feature: MA Experiment 108595 PARAMETER Experiment Name: At_Ler-pi_Ovule_cDNA_P Parameter: Plant Line Value: null
  misc_feature: MA Experiment ID: 20000227 Result: Down-regulated in Transcription
  misc_feature: MA Experiment 20000227 PARAMETER Experiment Name: At_Root-Tips-vs-Tops_P Parameter: Tissue Value: Root Tips vs. Root Tops
  misc_feature: MA Experiment ID: 20000234 Result: Up-regulated in Transcription
  misc_feature: MA Experiment 20000234 PARAMETER Experiment Name: At_Siliques_P Parameter: Age (day) Value: 21
  misc_feature: MA Experiment 20000234 PARAMETER Experiment Name: At_Siliques_P Parameter: Organism Value: A. thaliana
  misc_feature: MA Experiment 20000234 PARAMETER Experiment Name: At_Siliques_P Parameter: Plant Line Value: WS
  misc_feature: MA Experiment 20000234 PARAMETER Experiment Name: At_Siliques_P Parameter: Tissue Value: Less Than 5mm Siliques vs. Whole Plant
  misc_feature: MA Experiment ID: 20000235 Result: Up-regulated in Transcription
  misc_feature: MA Experiment 20000235 PARAMETER Experiment Name: At_Siliques_P Parameter: Age (day) Value: 21
  misc_feature: MA Experiment 20000235 PARAMETER Experiment Name: At_Siliques_P Parameter: Organism Value: A. thaliana
  misc_feature: MA Experiment 20000235 PARAMETER Experiment Name: At_Siliques_P Parameter: Plant Line Value: WS
  misc_feature: MA Experiment 20000235 PARAMETER Experiment Name: At_Siliques_P Parameter: Tissue Value: 5-10mm Siliques vs. Whole Plant
  misc_feature: MA Experiment ID: 20000264 Result: Up-regulated in Transcription
  misc_feature: MA Experiment 20000264 PARAMETER Experiment Name: At_Open_Flower_P Parameter: Age (day) Value: 21
  misc_feature: MA Experiment 20000264 PARAMETER Experiment Name: At_Open_Flower_P Parameter: Plant Line Value: WS
  misc_feature: MA Experiment 20000264 PARAMETER Experiment Name: At_Open_Flower_P Parameter: Tissue Value: Open Flower vs. Whole Plant
  misc_feature: MA Experiment ID: 20000265 Result: Up-regulated in Transcription
  misc_feature: MA Experiment 20000265 PARAMETER Experiment Name: At_Open_Flower_P Parameter: Age (day) Value: 21
  misc_feature: MA Experiment 20000265 PARAMETER Experiment Name: At_Open_Flower_P Parameter: Plant Line Value: WS
  misc_feature: MA Experiment 20000265 PARAMETER Experiment Name: At_Open_Flower_P Parameter: Tissue Value: Closed Flower vs. Whole Plant
  misc_feature: MA Experiment ID: 20001248 Result: Down-regulated in Transcription
  misc_feature: MA Experiment 20001248 PARAMETER Experiment Name: At_Far-red-induction_P Parameter: Age (day) Value: 7
  misc_feature: MA Experiment 20001248 PARAMETER Experiment Name: At_Far-red-induction_P Parameter: Light Value: Far-red vs. White
  misc_feature: MA Experiment 20001248 PARAMETER Experiment Name: At_Far-red-induction_P Parameter: Organism Value: A. thaliana
  misc_feature: MA Experiment 20001248 PARAMETER Experiment Name: At_Far-red-induction_P Parameter: Plant Line Value: Columbia
  misc_feature: MA Experiment 20001248 PARAMETER Experiment Name: At_Far-red-induction_P Parameter: Timepoint (hr) Value: 4
  misc_feature: MA Experiment 20001248 PARAMETER Experiment Name: At_Far-red-induction_P Parameter: Tissue Value: Whole Plant
  misc_feature: MA Experiment ID: 20001457 Result: Up-regulated in Transcription
  misc_feature: MA Experiment 20001457 PARAMETER Experiment Name: At_50mM_NH4NO3_L-to-H_P Parameter: Age (day) Value: Undefined
  misc_feature: MA Experiment 20001457 PARAMETER Experiment Name: At_50mM_NH4NO3_L-to-H_P Parameter: Organism Value: Undefined
  misc_feature: MA Experiment 20001457 PARAMETER Experiment Name: At_50mM_NH4NO3_L-to-H_P Parameter: Plant Line Value: Undefined
  misc_feature: MA Experiment 20001457 PARAMETER Experiment Name: At_50mM_NH4NO3_L-to-H_P Parameter: Timepoint (hr) Value: 0.5
  misc_feature: MA Experiment 20001457 PARAMETER Experiment Name: At_50mM_NH4NO3_L-to-H_P Parameter: Tissue Value: Siliques
  misc_feature: MA Experiment 20001457 PARAMETER Experiment Name: At_50mM_NH4NO3_L-to-H_P Parameter: Treatment Value: 50mM NH4NO3 vs. 100mM Manitol
atcaaccgtaaacttattgctttcttccttctggtagttccccaaaactcaaagtactctttttctgtgtaaacaaaaaaaaaatcaacggtactctttctcttctaagttgttgttccatggagaagagtttccagaaatcagctctccttgtgaccttgactctcttcttcttcattccagtttcaatctcggttccattcattctgtttcatgggattagagatcaatgctccaatggtggagtgagcagcttcgtacagctccttagcaacctctctagctcccatggatcttgcttagaaataggaaatggagagcaagattcggtgactatgccgcttacgcaacaagcgagtgtagcgtgtgagaaagttaaacagatgaaggatttgagtcaaggctacaacattgttgcacagtctcaaggaaacttggtagctagaggtctaatcgagttttgtgacaatgctcctccggtcttcaactatatatctttaggaggtcctcatgctggcatatccgacattcccaagtgtaattctacactttgcgagttgctgaaaacagcggtctacaccgacttcgtacaagatcatattgctccaagtggttatatcaagattcctacagatataaaagattacctggaacactccaagtatctgccaaagatcaacaacgagagacctaacgaaaggaacaccacttttaaagaccggttcactagcttgcacaacttggtccttgtcatgtttgagggtgatgcagtagtgattcctaaagaaagttcttggttcggatattacccggatggagcttccacacctcttttgtctcctcaacagacaaagctctatactgaggattggattggtctgaaaacattggatgctgccagaaaagttaagtttgtcagtgtccctggcgagcacctaagaatagcgcaagacgacgttgtaaaacacgtcgtgccttacctcaagaaccagcctgcgtctatgagtgaagatttggagatactgcatctatgattgagacttcattgttatgctctcttagaatcaaatttaaaagtgaagaactttagaggctcctttttcttaatcataaatccaaataatttc

SEQ ID NO: 36652 - protein, 304 aa, Arabidopsis thaliana
  peptide (1)..(304): Ceres Seq. ID no. 13491201
  misc_feature (21)..(289): Pfam Name: Palmitoyl protein thioesterase Pfam Description: Palmitoyl protein thioesterase
  misc_feature (1)..(296): Homolog of NCBI NO: 15238065 NR Description: palmitoyl protein thioesterase precursor,
  misc_feature (23)..(61): Homolog of NCBI NO: 7488215 NR Description: probable thioesterase - Arabidopsis thaliana
  misc_feature (2)..(295): Homolog of NCBI NO: 28393539 NR Description: putative palmitoyl-protein thioesterase precursor
  misc_feature (2)..(295): Homolog of NCBI NO: 15238063 NR Description: palmitoyl protein thioesterase precursor,
  misc_feature (1)..(288): Homolog of NCBI NO: 15236079 NR Description: palmitoyl protein thioesterase precursor,
  misc_feature (1)..(297): Homolog of NCBI NO: 15236077 NR Description: palmitoyl protein thioesterase precursor,
  misc_feature (62)..(141): Homolog of NCBI NO: 7488215 NR Description: probable thioesterase - Arabidopsis thaliana
  misc_feature (213)..(304): Homolog of NCBI NO: 7488215 NR Description: probable thioesterase - Arabidopsis thaliana
  misc_feature (1)..(304): Homolog of NCBI NO: 21554369 NR Description: palmitoyl-protein thioesterase precursor-like
  misc_feature (1)..(304): Homolog of NCBI NO: 15236078 NR Description: palmitoyl protein thioesterase precursor,
MEKSFQKSALLVTLTLFFFIPVSISVPFILFHGIRDQCSNGGVSSFVQLLSNLSSSHGSCLEIGNGEQDSVTMPLTQQASVACEKVKQMKDLSQGYNIVAQSQGNLVARGLIEFCDNAPPVFNYISLGGPHAGISDIPKCNSTLCELLKTAVYTDFVQDHIAPSGYIKIPTDIKDYLEHSKYLPKINNERPNERNTTFKDRFTSLHNLVLVMFEGDAVVIPKESSWFGYYPDGASTPLLSPQQTKLYTEDWIGLKTLDAARKVKFVSVPGEHLRIAQDDVVKHVVPYLKNQPASMSEDLEILHL

SEQ ID NO: 36653 - protein, 232 aa, Arabidopsis thaliana
  peptide (1)..(232): Ceres Seq. ID no. 13491202
  misc_feature (1)..(217): Pfam Name: Palmitoyl protein thioesterase Pfam Description: Palmitoyl protein thioesterase
  misc_feature (1)..(224): Homolog of NCBI NO: 15232301 NR Description: palmitoyl protein thioesterase precursor,
  misc_feature (1)..(224): Homolog of NCBI NO: 15238065 NR Description: palmitoyl protein thioesterase precursor,
  misc_feature (1)..(223): Homolog of NCBI NO: 28393539 NR Description: putative palmitoyl-protein thioesterase precursor
  misc_feature (1)..(223): Homolog of NCBI NO: 15238063 NR Description: palmitoyl protein thioesterase precursor,
  misc_feature (1)..(216): Homolog of NCBI NO: 15236079 NR Description: palmitoyl protein thioesterase precursor,
  misc_feature (1)..(225): Homolog of NCBI NO: 15236077 NR Description: palmitoyl protein thioesterase precursor,
  misc_feature (1)..(69): Homolog of NCBI NO: 7488215 NR Description: probable thioesterase - Arabidopsis thaliana
  misc_feature (141)..(232): Homolog of NCBI NO: 7488215 NR Description: probable thioesterase - Arabidopsis thaliana
  misc_feature (1)..(232): Homolog of NCBI NO: 21554369 NR Description: palmitoyl-protein thioesterase precursor-like
  misc_feature (1)..(232): Homolog of NCBI NO: 15236078 NR Description: palmitoyl protein thioesterase precursor,
MPLTQQASVACEKVKQMKDLSQGYNIVAQSQGNLVARGLIEFCDNAPPVFNYISLGGPHAGISDIPKCNSTLCELLKTAVYTDFVQDHIAPSGYIKIPTDIKDYLEHSKYLPKINNERPNERNTTFKDRFTSLHNLVLVMFEGDAVVIPKESSWFGYYPDGASTPLLSPQQTKLYTEDWIGLKTLDAARKVKFVSVPGEHLRIAQDDVVKHVVPYLKNQPASMSEDLEILHL

SEQ ID NO: 36654 - protein, 216 aa, Arabidopsis thaliana
  peptide (1)..(216): Ceres Seq. ID no. 13491203
  misc_feature (1)..(201): Pfam Name: Palmitoyl protein thioesterase Pfam Description: Palmitoyl protein thioesterase
  misc_feature (1)..(208): Homolog of NCBI NO: 15232301 NR Description: palmitoyl protein thioesterase precursor,
  misc_feature (1)..(208): Homolog of NCBI NO: 15238065 NR Description: palmitoyl protein thioesterase precursor,
  misc_feature (1)..(207): Homolog of NCBI NO: 28393539 NR Description: putative palmitoyl-protein thioesterase precursor
  misc_feature (1)..(207): Homolog of NCBI NO: 15238063 NR Description: palmitoyl protein thioesterase precursor,
  misc_feature (1)..(200): Homolog of NCBI NO: 15236079 NR Description: palmitoyl protein thioesterase precursor,
  misc_feature (1)..(209): Homolog of NCBI NO: 15236077 NR Description: palmitoyl protein thioesterase precursor,
  misc_feature (1)..(53): Homolog of NCBI NO: 7488215 NR Description: probable thioesterase - Arabidopsis thaliana
  misc_feature (125)..(216): Homolog of NCBI NO: 7488215 NR Description: probable thioesterase - Arabidopsis thaliana
  misc_feature (1)..(216): Homolog of NCBI NO: 21554369 NR Description: palmitoyl-protein thioesterase precursor-like
  misc_feature (1)..(216): Homolog of NCBI NO: 15236078 NR Description: palmitoyl protein thioesterase precursor,
MKDLSQGYNIVAQSQGNLVARGLIEFCDNAPPVFNYISLGGPHAGISDIPKCNSTLCELLKTAVYTDFVQDHIAPSGYIKIPTDIKDYLEHSKYLPKINNERPNERNTTFKDRFTSLHNLVLVMFEGDAVVIPKESSWFGYYPDGASTPLLSPQQTKLYTEDWIGLKTLDAARKVKFVSVPGEHLRIAQDDVVKHVVPYLKNQPASMSEDLEILHL

SEQ ID NO: 36655 - DNA, 1622 bp, Arabidopsis thaliana
  misc_feature (1)..(1622): Ceres Seq. ID no. 13611369
  misc_feature: MA Experiment ID: 20000307 Result: Up-regulated in Transcription
  misc_feature: MA Experiment 20000307 PARAMETER Experiment Name: At_Germinating_Seeds_Sub_P Parameter: Age (hr) Value: 24 vs. 0
  misc_feature: MA Experiment 20000307 PARAMETER Experiment Name: At_Germinating_Seeds_Sub_P Parameter: Organism Value: A. thaliana
  misc_feature: MA Experiment 20000307 PARAMETER Experiment Name: At_Germinating_Seeds_Sub_P Parameter: Plant Line Value: WS
  misc_feature: MA Experiment 20000307 PARAMETER Experiment Name: At_Germinating_Seeds_Sub_P Parameter: Tissue Value: Germinating Seeds
  misc_feature: MA Experiment ID: 20000314 Result: Down-regulated in Transcription
  misc_feature: MA Experiment 20000314 PARAMETER Experiment Name: At_14day_Shoots-Roots_Sub_P Parameter: Age (day) Value: 14
  misc_feature: MA Experiment 20000314 PARAMETER Experiment Name: At_14day_Shoots-Roots_Sub_P Parameter: Organism Value: A. thaliana
  misc_feature: MA Experiment 20000314 PARAMETER Experiment Name: At_14day_Shoots-Roots_Sub_P Parameter: Plant Line Value: WS
  misc_feature: MA Experiment 20000314 PARAMETER Experiment Name: At_14day_Shoots-Roots_Sub_P Parameter: Tissue Value: Roots vs. Whole Plant
  misc_feature: MA Experiment ID: 20000315 Result: Up-regulated in Transcription
  misc_feature: MA Experiment 20000315 PARAMETER Experiment Name: At_14day_Shoots-Roots_Sub_P Parameter: Age (day) Value: 14
  misc_feature: MA Experiment 20000315 PARAMETER Experiment Name: At_14day_Shoots-Roots_Sub_P Parameter: Organism Value: A. thaliana
  misc_feature: MA Experiment 20000315 PARAMETER Experiment Name: At_14day_Shoots-Roots_Sub_P Parameter: Plant Line Value: WS
  misc_feature: MA Experiment 20000315 PARAMETER Experiment Name: At_14day_Shoots-Roots_Sub_P Parameter: Tissue Value: Shoots vs. Whole Plant
  misc_feature: MA Experiment ID: 20000328 Result: Down-regulated in Transcription
  misc_feature: MA Experiment 20000328 PARAMETER Experiment Name: At_42deg_Heat_Sub_P Parameter: Age (day) Value: 14
  misc_feature: MA Experiment 20000328 PARAMETER Experiment Name: At_42deg_Heat_Sub_P Parameter: Organism Value: A. thaliana
  misc_feature: MA Experiment 20000328 PARAMETER Experiment Name: At_42deg_Heat_Sub_P Parameter: Plant Line Value: WS
  misc_feature: MA Experiment 20000328 PARAMETER Experiment Name: At_42deg_Heat_Sub_P Parameter: Temperature (deg C) Value: 42 vs. 22
  misc_feature: MA Experiment 20000328 PARAMETER Experiment Name: At_42deg_Heat_Sub_P Parameter: Timepoint (hr) Value: 6
  misc_feature: MA Experiment 20000328 PARAMETER Experiment Name: At_42deg_Heat_Sub_P Parameter: Tissue Value: Aerial
  misc_feature: MA Experiment ID: 20000440 Result: Up-regulated in Transcription
  misc_feature: MA Experiment 20000440 PARAMETER Experiment Name: At_Closed-Flower__Sub_P Parameter: Tissue Value: Closed Flower vs. Whole Plant
aatataggtgcatttaaaacataacgttccctctcttgtcttcttatttttgctctctgttctttagaactgccattaacgagagtgangagagagacacacacacacagcgagtgaaaatgtctccggagaagaagagtcaaaacttccctccaataacggaatgcagagacggagagtacgattcgatagccgccgatcttgacgggactctgcttctctcaagaagctccttcccttacttcatgctcgtcgctgttgaagctggaagccttttacgtggactaatcctccttctctcgttaccattcgtcattatctcttacctattcgtatccgaatctcttggtatccagatcctcatcttcatctcattcgctggtctcaaaatccgcgatatcgaacttgtctctcgcgcagttcttccacggttttacgcggcggatgtgaggaaagacagttttgaggtgtttgataagtgtaagagaaaagtggtagtgacggcgaatccgattgtgatggtggaggcgtttgtgaaggattatcttggaggtgataaagttttgggaacagagattgaagttaaccctaaaaccaatagagccactggatttgtgaagaagcctggtgttcttgttggtgatcttaagaggttagccattttaaaagagtttggtaacgaatcacctgatctcggcctcggtgatcgaacctctgatcatgatttcatgtctctctgcaagaaaggttacatggttcatgcgaccaagtcagccacaacgattccaaaagaacgcttaaagaaccgcatagtcttccatgatgggcgtttagcgcaacgtccaactccgttaaacgccattatcacatacctatggcttccttttggtttcatcctctccatcattcgcgtctacttcaacctccctttacctgaaagatttgtccgttacacttacgagatgctcgggatccacttaaccattcgtggtcatcgtcctccacctccttcccctggaactcttggcaacctctatgtccttaaccaccgtaccgcgcttgatcccatcatcgttgctattgctcttggacgtaagatctgttgcgtcacttacagtgtctctcgtctctcccttatgctttctcctattcctgctgttgccctcacccgtgaccgtgccaccgatgctgccaacatgagaaaacttctcgagaaaggcgacttggtgatatgtccggaaggcacgacgtgtagagaagagtatctactgagatttagcgctctattcgcagagctaagcgaccggattgtgccagtagcgatgaactgtaaacaaggaatgttcaacgggaccacagttaggggtgtgaagttttgggacccttacttcttcttcatgaacccaagaccaagctatgaagccactttcttggatcgtttgcctgaagaaatgactgtcaacggtggtggcaagactcctatagaggtggctaattacgtccagaaagttatcggcgcggttttgggcttcgaatgcaccgaacttactcgcaaggataaatatcttttgcttggaggtaatgacggcaaggtggagtctatcaacaacaccaagaagtga

SEQ ID NO: 36656 - protein, 500 aa, Arabidopsis thaliana
  peptide (1)..(500): Ceres Seq. ID no. 13611370
  misc_feature (286)..(403): Pfam Name: Acyltransferase Pfam Description: Acyltransferase
  misc_feature (1)..(208): Homolog of NCBI NO: 15236810 NR Description: expressed protein [Arabidopsis thaliana]
  misc_feature (23)..(496): Homolog of NCBI NO: 15239924 NR Description: phospholipid/glycerol acyltransferase family
  misc_feature (23)..(496): Homolog of NCBI NO: 15229747 NR Description: expressed protein [Arabidopsis thaliana]
  misc_feature (10)..(494): Homolog of NCBI NO: 37534314 NR Description: hypothetical protein [Oryza sativa (japonica
  misc_feature (45)..(497): Homolog of NCBI NO: 29788867 NR Description: hypothetical protein [Oryza sativa (japonica
  misc_feature (10)..(497): Homolog of NCBI NO: 38000002 NR Description: unknown protein [Oryza sativa (japonica
  misc_feature (212)..(500): Homolog of NCBI NO: 15236797 NR Description: expressed protein [Arabidopsis thaliana]
  misc_feature (1)..(492): Homolog of NCBI NO: 15224445 NR Description: phospholipid/glycerol acyltransferase family
  misc_feature (1)..(499): Homolog of NCBI NO: 17064780 NR Description: Unknown protein [Arabidopsis thaliana]
  misc_feature (1)..(499): Homolog of NCBI NO: 15223437 NR Description: expressed protein [Arabidopsis thaliana]
MSPEKKSQNFPPITECRDGEYDSIAADLDGTLLLSRSSFPYFMLVAVEAGSLLRGLILLLSLPFVIISYLFVSESLGIQILIFISFAGLKIRDIELVSRAVLPRFYAADVRKDSFEVFDKCKRKVVVTANPIVMVEAFVKDYLGGDKVLGTEIEVNPKTNRATGFVKKPGVLVGDLKRLAILKEFGNESPDLGLGDRTSDHDFMSLCKKGYMVHATKSATTIPKERLKNRIVFHDGRLAQRPTPLNAIITYLWLPFGFILSIIRVYFNLPLPERFVRYTYEMLGIHLTIRGHRPPPPSPGTLGNLYVLNHRTALDPIIVAIALGRKICCVTYSVSRLSLMLSPIPAVALTRDRATDAANMRKLLEKGDLVICPEGTTCREEYLLRFSALFAELSDRIVPVAMNCKQGMFNGTTVRGVKFWDPYFFFMNPRPSYEATFLDRLPEEMTVNGGGKTPIEVANYVQKVIGAVLGFECTELTRKDKYLLLGGNDGKVESINNTKK

SEQ ID NO: 36657 - protein, 458 aa, Arabidopsis thaliana
  peptide (1)..(458): Ceres Seq. ID no. 13611371
  misc_feature (244)..(361): Pfam Name: Acyltransferase Pfam Description: Acyltransferase
  misc_feature (1)..(166): Homolog of NCBI NO: 15236810 NR Description: expressed protein [Arabidopsis thaliana]
  misc_feature (1)..(454): Homolog of NCBI NO: 15239924 NR Description: phospholipid/glycerol acyltransferase family
  misc_feature (1)..(454): Homolog of NCBI NO: 15229747 NR Description: expressed protein [Arabidopsis thaliana]
  misc_feature (1)..(452): Homolog of NCBI NO: 37534314 NR Description: hypothetical protein [Oryza sativa (japonica
  misc_feature (3)..(455): Homolog of NCBI NO: 29788867 NR Description: hypothetical protein [Oryza sativa (japonica
  misc_feature (1)..(455): Homolog of NCBI NO: 38000002 NR Description: unknown protein [Oryza sativa (japonica
  misc_feature (170)..(458): Homolog of NCBI NO: 15236797 NR Description: expressed protein [Arabidopsis thaliana]
  misc_feature (1)..(450): Homolog of NCBI NO: 15224445 NR Description: phospholipid/glycerol acyltransferase family
  misc_feature (1)..(457): Homolog of NCBI NO: 17064780 NR Description: Unknown protein [Arabidopsis thaliana]
  misc_feature (1)..(457): Homolog of NCBI NO: 15223437 NR Description: expressed protein [Arabidopsis thaliana]
MLVAVEAGSLLRGLILLLSLPFVIISYLFVSESLGIQILIFISFAGLKIRDIELVSRAVLPRFYAADVRKDSFEVFDKCKRKVVVTANPIVMVEAFVKDYLGGDKVLGTEIEVNPKTNRATGFVKKPGVLVGDLKRLAILKEFGNESPDLGLGDRTSDHDFMSLCKKGYMVHATKSATTIPKERLKNRIVFHDGRLAQRPTPLNAIITYLWLPFGFILSIIRVYFNLPLPERFVRYTYEMLGIHLTIRGHRPPPPSPGTLGNLYVLNHRTALDPIIVAIALGRKICCVTYSVSRLSLMLSPIPAVALTRDRATDAANMRKLLEKGDLVICPEGTTCREEYLLRFSALFAELSDRIVPVAMNCKQGMFNGTTVRGVKFWDPYFFFMNPRPSYEATFLDRLPEEMTVNGGGKTPIEVANYVQKVIGAVLGFECTELTRKDKYLLLGGNDGKVESINNTKK

SEQ ID NO: 36658 - protein, 367 aa, Arabidopsis thaliana; identical to SEQ ID NO: 21110
  peptide (1)..(367): Ceres Seq. ID no. 13611372
  misc_feature (153)..(270): Pfam Name: Acyltransferase Pfam Description: Acyltransferase
  misc_feature (1)..(75): Homolog of NCBI NO: 15236810 NR Description: expressed protein [Arabidopsis thaliana]
  misc_feature (1)..(363): Homolog of NCBI NO: 15239924 NR Description: phospholipid/glycerol acyltransferase family
  misc_feature (1)..(363): Homolog of NCBI NO: 15229747 NR Description: expressed protein [Arabidopsis thaliana]
  misc_feature (1)..(361): Homolog of NCBI NO: 37534314 NR Description: hypothetical protein [Oryza sativa (japonica
  misc_feature (1)..(364): Homolog of NCBI NO: 29788867 NR Description: hypothetical protein [Oryza sativa (japonica
  misc_feature (1)..(364): Homolog of NCBI NO: 38000002 NR Description: unknown protein [Oryza sativa (japonica
  misc_feature (79)..(367): Homolog of NCBI NO: 15236797 NR Description: expressed protein [Arabidopsis thaliana]
  misc_feature (1)..(359): Homolog of NCBI NO: 15224445 NR Description: phospholipid/glycerol acyltransferase family
  misc_feature (1)..(366): Homolog of NCBI NO: 17064780 NR Description: Unknown protein [Arabidopsis thaliana]
  misc_feature (1)..(366): Homolog of NCBI NO: 15223437 NR Description: expressed protein [Arabidopsis thaliana]

SEQ ID NO: 36659 - DNA, 1983 bp, Arabidopsis thaliana
  misc_feature (1)..(1983): Ceres Seq. ID no. 13509881
  misc_feature: MA Experiment ID: 20000180 Result: Down-regulated in Transcription
  misc_feature: MA Experiment 20000180 PARAMETER Experiment Name: At_Germinating_Seeds_P Parameter: Age (hr) Value: 24 vs. 0
  misc_feature: MA Experiment 20000180 PARAMETER Experiment Name: At_Germinating_Seeds_P Parameter: Tissue Value: Germinating Seeds
  misc_feature: MA Experiment ID: 20000185 Result: Down-regulated in Transcription
  misc_feature: MA Experiment 20000185 PARAMETER Experiment Name: At_Roots__P Parameter: Age (day) Value: 7 vs. 21
  misc_feature: MA Experiment 20000185 PARAMETER Experiment Name: At_Roots__P Parameter: Organism Value: A. thaliana
  misc_feature: MA Experiment 20000185 PARAMETER Experiment Name: At_Roots__P Parameter: Tissue Value: Roots vs. Whole Plant
  misc_feature: MA Experiment ID: 20000439 Result: Down-regulated in Transcription
  misc_feature: MA Experiment 20000439 PARAMETER Experiment Name: At_Roots__P Parameter: Age (day) Value: 14 vs. 21
  misc_feature: MA Experiment 20000439 PARAMETER Experiment Name: At_Roots__P Parameter: Organism Value: A. thaliana
  misc_feature: MA Experiment 20000439 PARAMETER Experiment Name: At_Roots__P Parameter: Tissue Value: Roots vs. Whole Plant
  misc_feature: MA Experiment ID: 20000495 Result: Down-regulated in Transcription
  misc_feature: MA Experiment 20000495 PARAMETER Experiment Name: At_Guard_Cells_P Parameter: Harvest Date Value: 8/2/2002
  misc_feature: MA Experiment 20000495 PARAMETER Experiment Name: At_Guard_Cells_P Parameter: Organism Value: A. thaliana
  misc_feature: MA Experiment 20000495 PARAMETER Experiment Name: At_Guard_Cells_P Parameter: Tissue Value: Guard Cells vs. Leaves
  misc_feature: MA Experiment ID: 20001248 Result: Up-regulated in Transcription
  misc_feature: MA Experiment 20001248 PARAMETER Experiment Name: At_Far-red-induction_P Parameter: Age (day) Value: 7
  misc_feature: MA Experiment 20001248 PARAMETER Experiment Name: At_Far-red-induction_P Parameter: Light Value: Far-red vs. White
  misc_feature: MA Experiment 20001248 PARAMETER Experiment Name: At_Far-red-induction_P Parameter: Organism Value: A. thaliana
  misc_feature: MA Experiment 20001248 PARAMETER Experiment Name: At_Far-red-induction_P Parameter: Plant Line Value: Columbia
  misc_feature: MA Experiment 20001248 PARAMETER Experiment Name: At_Far-red-induction_P Parameter: Timepoint (hr) Value: 4
  misc_feature: MA Experiment 20001248 PARAMETER Experiment Name: At_Far-red-induction_P Parameter: Tissue Value: Whole Plant
  misc_feature: MA Experiment ID: 20001557 Result: Up-regulated in Transcription
  misc_feature: MA Experiment 20001557 PARAMETER Experiment Name: At_Drought_Soil_Dry_P Parameter: Age (day) Value: 27
  misc_feature: MA Experiment 20001557 PARAMETER Experiment Name: At_Drought_Soil_Dry_P Parameter: Organism Value: A. thaliana
  misc_feature: MA Experiment 20001557 PARAMETER Experiment Name: At_Drought_Soil_Dry_P Parameter: Plant Line Value: WS
  misc_feature: MA Experiment 20001557 PARAMETER Experiment Name: At_Drought_Soil_Dry_P Parameter: Post Timepoint (hr) Value: 3
  misc_feature: MA Experiment 20001557 PARAMETER Experiment Name: At_Drought_Soil_Dry_P Parameter: Post-Treatment Value: Re-Water vs. No Drought
  misc_feature: MA Experiment 20001557 PARAMETER Experiment Name: At_Drought_Soil_Dry_P Parameter: Timepoint (day) Value: 13
  misc_feature: MA Experiment 20001557 PARAMETER Experiment Name: At_Drought_Soil_Dry_P Parameter: Treatment Value: Drought vs. No Drought
aaaaactctcttataataatctctctcaccatttcttctcttctcttcagaagaaagaaagnaactcataaaggagaagaaagaagaacagaagagtttctctatctaaaactcattctttctttctctctctatnccagagttctgtctgtgaaaacacacaaatctaagagaagttatgaataaacaagatgttatgaaacttcagacttgtgttctgaaagtgaacgtacactgtgaagggtgtaagcataaagtgaagaaacaattgcagaaaatcgaaggtgtttactctgtaaaagcagatgtagaacaggggagagttactgttacagggaacattgacccagctcttctggttaagaaacttagcaaatcaggcaaacatgccgagatcttaggcggtggtggaggaggaggcggcggaggtggaaaggggtttcctaatctgaatgggcaatttgcaaatctcaacatgggtggaaacaataagcctaaaggtggaaaagagagtaaccaagtcaagggtaaagctggtggtggcggtggaggaggtcagaatcatggacatggtcagccaatgcaattgaatcctcaacagattcaacagatgatgatgatgaaggctgctcacggtggtggtggtggtggtcagatgaagatgccgcctatggcagctaaggatcagaagaagtcagttaagtttgctgatgatgaagacgatgagtttagtgaagatgattatgatgatgaggatttcagtgaagatgattatgatgatgatgagttcgatgatgatgaagatgatgatgatgagatgggtcatggtcatggacatggaggaggtgggggtaatcacatgcctcctaataagatgatgatgcctaacaagatgatgcctcagatgggtggtcatcatggtaatggtggtggacctaagggtcccaatgagataatgatgatgatgaatgggttcaaaggcggaggcggtggaggaaagaaaggcggtggtggcgggtttgagattccggtgcagatgaagggaatgggtgagggtaaaaatggaaaggatggtaaaaagggtaaaggaggagagaagggtaagaaagaagggaaagagaataaaggtgggggcaaaaccggaaaaacagatgccaaaagtggtggtggtggccttctagggtttttcaaaaagggtaaaagtgggaacggagatgagaagaagagcgctgggaagaaagatggccatgggggtaataaggtcaaatctcatggtgggggaggaggagttcagcattatgatagtgggcctaaaaaaggtggtggtgggaccaaaggaggaggccatgggggccttgacattgatgagctcatgaaacacagcaaaggaggaggaggaggaggtaacaagggcaatcataatcatagcgccaaagggattggtggtggcccaatgggtccaggcggtccgatgggtccaggcggtccgatgggtcaaggtggtccgatgggtatgatgggtccaggtggtccgatgagtatgatgggtccaggcggtcctatgggtccaatgggtggccaaggcggctcttacccagcggttcaaggcttgccaatgagtggaggtggaggatattatccagggccgcctcaggcaagtcagcaaatgaaccaacaacaatatatgcaaatgatgatgaaccaacagcagcaacaacaacaacaacaacaagctgtagctcatggtggctatggcggtggtcacggtggcgacatgtaccatccgatgatgtacgctcggccttatcctgcagttaattatgctcaccctccaccaatgccgcctcctcactcggattcttatactcatatgttcagcgatgagaatccaggtagttgtagtattatgtgatcatcttttgtaatgttatttagaatatggacatgtatgcttgtcttagtcttatgtttttttttttgggg

SEQ ID NO: 36660 - protein, 577 aa, Arabidopsis thaliana
  peptide (1)..(577): Ceres Seq. ID no. 13509882
  misc_feature (172)..(472): Pfam Name: S-antigen protein Pfam Description: S-antigen protein
  misc_feature (75)..(133): Homolog of NCBI NO: 34394861 NR Description: putative glycin-rich protein
  misc_feature (74)..(132): Homolog of NCBI NO: 34394861 NR Description: putative glycin-rich protein
  misc_feature (214)..(485): Homolog of NCBI NO: 34394861 NR Description: putative glycin-rich protein
  misc_feature (75)..(461): Homolog of NCBI NO: 27754558 NR Description: unknown protein [Arabidopsis thaliana]
  misc_feature (104)..(577): Homolog of NCBI NO: 27754558 NR Description: unknown protein [Arabidopsis thaliana]
  misc_feature (1)..(398): Homolog of NCBI NO: 18397481 NR Description: heavy-metal-associated domain-containing protein
  misc_feature (1)..(164): Homolog of NCBI NO: 30687142 NR Description: heavy-metal-associated domain-containing protein
  misc_feature (416)..(577): Homolog of NCBI NO: 30687142 NR Description: heavy-metal-associated domain-containing protein
  misc_feature (1)..(577): Homolog of NCBI NO: 15239643 NR Description: heavy-metal-associated domain-containing protein
  misc_feature (41)..(577): Homolog of NCBI NO: 6729032 NR Description: unknown protein [Arabidopsis thaliana]
MNKQDVMKLQTCVLKVNVHCEGCKHKVKKQLQKIEGVYSVKADVEQGRVTVTGNIDPALLVKKLSKSGKHAEILGGGGGGGGGGGKGFPNLNGQFANLNMGGNNKPKGGKESNQVKGKAGGGGGGGQNHGHGQPMQLNPQQIQQMMMMKAAHGGGGGGQMKMPPMAAKDQKKSVKFADDEDDEFSEDDYDDEDFSEDDYDDDEFDDDEDDDDEMGHGHGHGGGGGNHMPPNKMMMPNKMMPQMGGHHGNGGGPKGPNEIMMMMNGFKGGGGGGKKGGGGGFEIPVQMKGMGEGKNGKDGKKGKGGEKGKKEGKENKGGGKTGKTDAKSGGGGLLGFFKKGKSGNGDEKKSAGKKDGHGGNKVKSHGGGGGVQHYDSGPKKGGGGTKGGGHGGLDIDELMKHSKGGGGGGNKGNHNHSAKGIGGGPMGPGGPMGPGGPMGQGGPMGMMGPGGPMSMMGPGGPMGPMGGQGGSYPAVQGLPMSGGGGYYPGPPQASQQMNQQQYMQMMMNQQQQQQQQQQAVAHGGYGGGHGGDMYHPMMYARPYPAVNYAHPPPMPPPHSDSYTHMFSDENPGSCSIM

SEQ ID NO: 36661 - protein, 571 aa, Arabidopsis thaliana
  peptide (1)..(571): Ceres Seq. ID no. 13509883
  misc_feature (166)..(466): Pfam Name: S-antigen protein Pfam Description: S-antigen protein
  misc_feature (69)..(127): Homolog of NCBI NO: 34394861 NR Description: putative glycin-rich protein
  misc_feature (68)..(126): Homolog of NCBI NO: 34394861 NR Description: putative glycin-rich protein
  misc_feature (208)..(479): Homolog of NCBI NO: 34394861 NR Description: putative glycin-rich protein
  misc_feature (69)..(455): Homolog of NCBI NO: 27754558 NR Description: unknown protein [Arabidopsis thaliana]
  misc_feature (98)..(571): Homolog of NCBI NO: 27754558 NR Description: unknown protein [Arabidopsis thaliana]
  misc_feature (1)..(392): Homolog of NCBI NO: 18397481 NR Description: heavy-metal-associated domain-containing protein
  misc_feature (1)..(158): Homolog of NCBI NO: 30687142 NR Description: heavy-metal-associated domain-containing protein
  misc_feature (410)..(571): Homolog of NCBI NO: 30687142 NR Description: heavy-metal-associated domain-containing protein
  misc_feature (1)..(571): Homolog of NCBI NO: 15239643 NR Description: heavy-metal-associated domain-containing protein
  misc_feature (35)..(571): Homolog of NCBI NO: 6729032 NR Description: unknown protein [Arabidopsis thaliana]
MKLQTCVLKVNVHCEGCKHKVKKQLQKIEGVYSVKADVEQGRVTVTGNIDPALLVKKLSKSGKHAEILGGGGGGGGGGGKGFPNLNGQFANLNMGGNNKPKGGKESNQVKGKAGGGGGGGQNHGHGQPMQLNPQQIQQMMMMKAAHGGGGGGQMKMPPMAAKDQKKSVKFADDEDDEFSEDDYDDEDFSEDDYDDDEFDDDEDDDDEMGHGHGHGGGGGNHMPPNKMMMPNKMMPQMGGHHGNGGGPKGPNEIMMMMNGFKGGGGGGKKGGGGGFEIPVQMKGMGEGKNGKDGKKGKGGEKGKKEGKENKGGGKTGKTDAKSGGGGLLGFFKKGKSGNGDEKKSAGKKDGHGGNKVKSHGGGGGVQHYDSGPKKGGGGTKGGGHGGLDIDELMKHSKGGGGGGNKGNHNHSAKGIGGGPMGPGGPMGPGGPMGQGGPMGMMGPGGPMSMMGPGGPMGPMGGQGGSYPAVQGLPMSGGGGYYPGPPQASQQMNQQQYMQMMMNQQQQQQQQQQAVAHGGYGGGHGGDMYHPMMYARPYPAVNYAHPPPMPPPHSDSYTHMFSDENPGSCSIM

SEQ ID NO: 36662 - protein, 478 aa, Arabidopsis thaliana
  peptide (1)..(478): Ceres Seq. ID no. 13509884
  misc_feature (73)..(373): Pfam Name: S-antigen protein Pfam Description: S-antigen protein
  misc_feature (1)..(34): Homolog of NCBI NO: 34394861 NR Description: putative glycin-rich protein
  misc_feature (1)..(33): Homolog of NCBI NO: 34394861 NR Description: putative glycin-rich protein
  misc_feature (115)..(386): Homolog of NCBI NO: 34394861 NR Description: putative glycin-rich protein
  misc_feature (1)..(362): Homolog of NCBI NO: 27754558 NR Description: unknown protein [Arabidopsis thaliana]
  misc_feature (5)..(478): Homolog of NCBI NO: 27754558 NR Description: unknown protein [Arabidopsis thaliana]
  misc_feature (1)..(299): Homolog of NCBI NO: 18397481 NR Description: heavy-metal-associated domain-containing protein
  misc_feature (1)..(65): Homolog of NCBI NO: 30687142 NR Description: heavy-metal-associated domain-containing protein
  misc_feature (317)..(478): Homolog of NCBI NO: 30687142 NR Description: heavy-metal-associated domain-containing protein
  misc_feature (1)..(478): Homolog of NCBI NO: 15239643 NR Description: heavy-metal-associated domain-containing protein
  misc_feature (1)..(478): Homolog of NCBI NO: 6729032 NR Description: unknown protein [Arabidopsis thaliana]
MGGNNKPKGGKESNQVKGKAGGGGGGGQNHGHGQPMQLNPQQIQQMMMMKAAHGGGGGGQMKMPPMAAKDQKKSVKFADDEDDEFSEDDYDDEDFSEDDYDDDEFDDDEDDDDEMGHGHGHGGGGGNHMPPNKMMMPNKMMPQMGGHHGNGGGPKGPNEIMMMMNGFKGGGGGGKKGGGGGFEIPVQMKGMGEGKNGKDGKKGKGGEKGKKEGKENKGGGKTGKTDAKSGGGGLLGFFKKGKSGNGDEKKSAGKKDGHGGNKVKSHGGGGGVQHYDSGPKKGGGGTKGGGHGGLDIDELMKHSKGGGGGGNKGNHNHSAKGIGGGPMGPGGPMGPGGPMGQGGPMGMMGPGGPMSMMGPGGPMGPMGGQGGSYPAVQGLPMSGGGGYYPGPPQASQQMNQQQYMQMMMNQQQQQQQQQQAVAHGGYGGGHGGDMYHPMMYARPYPAVNYAHPPPMPPPHSDSYTHMFSDENPGSCSIM

SEQ ID NO: 36663 - DNA, 1207 bp, Arabidopsis thaliana
  misc_feature (1)..(1207): Ceres Seq. ID no. 12390595
  misc_feature: MA Experiment ID: 108434 Result: Up-regulated in Transcription
  misc_feature: MA Experiment 108434 PARAMETER Experiment Name: At_Root_Tips_cDNA_P Parameter: Tissue Value: Root Tips
  misc_feature: MA Experiment ID: 20000071 Result: Down-regulated in Transcription
  misc_feature: MA Experiment 20000071 PARAMETER Experiment Name: At_100uM_ABA_Mutants_cDNA_P Parameter: Plant Line Value: CS8104
  misc_feature: MA Experiment 20000071 PARAMETER Experiment Name: At_100uM_ABA_Mutants_cDNA_P Parameter: Timepoint (hr) Value: 6
  misc_feature: MA Experiment 20000071 PARAMETER Experiment Name: At_100uM_ABA_Mutants_cDNA_P Parameter: Tissue Value: Aerial
  misc_feature: MA Experiment 20000071 PARAMETER Experiment Name: At_100uM_ABA_Mutants_cDNA_P Parameter: Treatment Value: 100uM ABA vs. No Treatment
  misc_feature: MA Experiment ID: 20000072 Result: Down-regulated in Transcription
  misc_feature: MA Experiment 20000072 PARAMETER Experiment Name: At_100uM_ABA_Mutants_cDNA_P Parameter: Plant Line Value: CS8105
  misc_feature: MA Experiment 20000072 PARAMETER Experiment Name: At_100uM_ABA_Mutants_cDNA_P Parameter: Timepoint (hr) Value: 6
  misc_feature: MA Experiment 20000072 PARAMETER Experiment Name: At_100uM_ABA_Mutants_cDNA_P Parameter: Tissue Value: Aerial
  misc_feature: MA Experiment 20000072 PARAMETER Experiment Name: At_100uM_ABA_Mutants_cDNA_P Parameter: Treatment Value: 100uM ABA vs. No Treatment
  misc_feature: MA Experiment ID: 20000086 Result: Down-regulated in Transcription
  misc_feature: MA Experiment 20000086 PARAMETER Experiment Name: At_100uM_ABA_Mutants_cDNA_P Parameter: Plant Line Value: CS22
  misc_feature: MA Experiment 20000086 PARAMETER Experiment Name: At_100uM_ABA_Mutants_cDNA_P Parameter: Timepoint (hr) Value: 6
  misc_feature: MA Experiment 20000086 PARAMETER Experiment Name: At_100uM_ABA_Mutants_cDNA_P Parameter: Tissue Value: Aerial
  misc_feature: MA Experiment 20000086 PARAMETER Experiment Name: At_100uM_ABA_Mutants_cDNA_P Parameter: Treatment Value: 100uM ABA vs. No Treatment
  misc_feature: MA Experiment ID: 20000087 Result: Down-regulated in Transcription
  misc_feature: MA Experiment 20000087 PARAMETER Experiment Name: At_100uM_ABA_Mutants_cDNA_P Parameter: Plant Line Value: WS
  misc_feature: MA Experiment 20000087 PARAMETER Experiment Name: At_100uM_ABA_Mutants_cDNA_P Parameter: Timepoint (hr) Value: 6
  misc_feature: MA Experiment 20000087 PARAMETER Experiment Name: At_100uM_ABA_Mutants_cDNA_P Parameter: Tissue Value: Aerial
  misc_feature: MA Experiment 20000087 PARAMETER Experiment Name: At_100uM_ABA_Mutants_cDNA_P Parameter: Treatment Value: 100uM ABA vs. No Treatment
  misc_feature: MA Experiment ID: 20000088 Result: Down-regulated in Transcription
  misc_feature: MA Experiment 20000088 PARAMETER Experiment Name: At_100uM_ABA_Mutants_cDNA_P Parameter: Plant Line Value: Landsberg
  misc_feature: MA Experiment 20000088 PARAMETER Experiment Name: At_100uM_ABA_Mutants_cDNA_P Parameter: Timepoint (hr) Value: 6
  misc_feature: MA Experiment 20000088 PARAMETER Experiment Name: At_100uM_ABA_Mutants_cDNA_P Parameter: Tissue Value: Aerial
  misc_feature: MA Experiment 20000088 PARAMETER Experiment Name: At_100uM_ABA_Mutants_cDNA_P Parameter: Treatment Value: 100uM ABA vs. No Treatment
  misc_feature: MA Experiment ID: 20000179 Result: Up-regulated in Transcription
  misc_feature: MA Experiment 20000179 PARAMETER Experiment Name: At_Germinating_Seeds_P Parameter: Age (hr) Value: 6 vs. 0
  misc_feature: MA Experiment 20000179 PARAMETER Experiment Name: At_Germinating_Seeds_P Parameter: Tissue Value: Germinating Seeds
  misc_feature: MA Experiment ID: 20000180 Result: Up-regulated in Transcription
  misc_feature: MA Experiment 20000180 PARAMETER Experiment Name: At_Germinating_Seeds_P Parameter: Age (hr) Value: 24 vs. 0
  misc_feature: MA Experiment 20000180 PARAMETER Experiment Name: At_Germinating_Seeds_P Parameter: Tissue Value: Germinating Seeds
  misc_feature: MA Experiment ID: 20000184 Result: Up-regulated in Transcription
  misc_feature: MA Experiment 20000184 PARAMETER Experiment Name: At_Shoots__P Parameter: Age (day) Value: 7
  misc_feature: MA Experiment 20000184 PARAMETER Experiment Name: At_Shoots__P Parameter: Tissue Value: Shoots vs. Whole Plant
  misc_feature: MA Experiment ID: 20000227 Result: Up-regulated in Transcription
  misc_feature: MA Experiment 20000227 PARAMETER Experiment Name: At_Root-Tips-vs-Tops_P Parameter: Tissue Value: Root Tips vs. Root Tops
  misc_feature: MA Experiment ID: 20000234 Result: Up-regulated in Transcription
  misc_feature: MA Experiment 20000234 PARAMETER Experiment Name: At_Siliques_P Parameter: Age (day) Value: 21
  misc_feature: MA Experiment 20000234 PARAMETER Experiment Name: At_Siliques_P Parameter: Organism Value: A. thaliana
  misc_feature: MA Experiment 20000234 PARAMETER Experiment Name: At_Siliques_P Parameter: Plant Line Value: WS
  misc_feature: MA Experiment 20000234 PARAMETER Experiment Name: At_Siliques_P Parameter: Tissue Value: Less Than 5mm Siliques vs. Whole Plant
  misc_feature: MA Experiment ID: 20000264 Result: Up-regulated in Transcription
  misc_feature: MA Experiment 20000264 PARAMETER Experiment Name: At_Open_Flower_P Parameter: Age (day) Value: 21
  misc_feature: MA Experiment 20000264 PARAMETER Experiment Name: At_Open_Flower_P Parameter: Plant Line Value: WS
  misc_feature: MA Experiment 20000264 PARAMETER Experiment Name: At_Open_Flower_P Parameter: Tissue Value: Open Flower vs. Whole Plant
  misc_feature: MA Experiment ID: 20000265 Result: Up-regulated in Transcription
  misc_feature: MA Experiment 20000265 PARAMETER Experiment Name: At_Open_Flower_P Parameter: Age (day) Value: 21
  misc_feature: MA Experiment 20000265 PARAMETER Experiment Name: At_Open_Flower_P Parameter: Plant Line Value: WS
  misc_feature: MA Experiment 20000265 PARAMETER Experiment Name: At_Open_Flower_P Parameter: Tissue Value: Closed Flower vs. Whole Plant
  misc_feature: MA Experiment ID: 20000286 Result: Up-regulated in Transcription
  misc_feature: MA Experiment 20000286 PARAMETER Experiment Name: At_Open_Flower_P Parameter: Age (day) Value: 21
  misc_feature: MA Experiment 20000286 PARAMETER Experiment Name: At_Open_Flower_P Parameter: Plant Line Value: WS
  misc_feature: MA Experiment 20000286 PARAMETER Experiment Name: At_Open_Flower_P Parameter: Tissue Value: Half Open vs. Whole Plant
  misc_feature: MA Experiment ID: 20000437 Result: Down-regulated in Transcription
  misc_feature: MA Experiment 20000437 PARAMETER Experiment Name: At_Drought_P Parameter: Age (day) Value: 8
  misc_feature: MA Experiment 20000437 PARAMETER Experiment Name: At_Drought_P Parameter: Organism Value: A. thaliana
  misc_feature: MA Experiment 20000437 PARAMETER Experiment Name: At_Drought_P Parameter: Plant Line Value: WS
  misc_feature: MA Experiment 20000437 PARAMETER Experiment Name: At_Drought_P Parameter: Timepoint (hr) Value: 24
  misc_feature: MA Experiment 20000437 PARAMETER Experiment Name: At_Drought_P Parameter: Tissue Value: Whole Plant
  misc_feature: MA Experiment 20000437 PARAMETER Experiment Name: At_Drought_P Parameter: Treatment Value: Drought vs. No Drought
  misc_feature: MA Experiment ID: 20000438 Result: Up-regulated in Transcription
  misc_feature: MA Experiment 20000438 PARAMETER Experiment Name: At_Shoots__P Parameter: Age (day) Value: 14
  misc_feature: MA Experiment 20000438 PARAMETER Experiment Name: At_Shoots__P Parameter: Tissue Value: Shoots vs. Whole Plant
  misc_feature: MA Experiment ID: 20001248 Result: Down-regulated in Transcription
  misc_feature: MA Experiment 20001248 PARAMETER Experiment Name: At_Far-red-induction_P Parameter: Age (day) Value: 7
  misc_feature: MA Experiment 20001248 PARAMETER Experiment Name: At_Far-red-induction_P Parameter: Light Value: Far-red vs. White
  misc_feature: MA Experiment 20001248 PARAMETER Experiment Name: At_Far-red-induction_P Parameter: Organism Value: A. thaliana
  misc_feature: MA Experiment 20001248 PARAMETER Experiment Name: At_Far-red-induction_P Parameter: Plant Line Value: Columbia
  misc_feature: MA Experiment 20001248 PARAMETER Experiment Name: At_Far-red-induction_P Parameter: Timepoint (hr) Value: 4
  misc_feature: MA Experiment 20001248 PARAMETER Experiment Name: At_Far-red-induction_P Parameter: Tissue Value: Whole Plant
acacctcacatccttttctttccccttctctcaaccttttggtggaaaaaaccagaaaatggggttgcatccaatttccgacgccaatgaacacaatcccttcggctctctcaccgccgacgaattctacgccaaacattccgttagccactcctccgctttcatcaccaaccctcgcggtctcaaactcttcactcaatggtggtcaccactccctccaactaaaccaatcggtatcatcgctgtcgttcatggcttcaccggcgaatccagttggttccttcagctcacatcaatcctcttcgctaaatccggtttcataacctgcgcaattgatcaccaaggccatggattctccgatggactcatcgctcatatccctgacatcaatcccgtcgtcgatgactgtatctctttcttcgatgacttccgtagccgtcaaacaccgtcagatctgccgtgttttctctactctgaatccctaggcggcgcgattgctctctacatctcgcttcgtcagagaggtgtttgggatggacttatcctcaacggagctatgtgtggaatcagcgataaattcaaaccgccgtggccgttggagcatttgctattcgtcgtcgcgaatcttatccctacttggcgcgttatccccactcgcggatctattcccgatgtttcgttcaaggagccgtggaagaggaagcttgccatggctagcccaaggaggacggtggcgaaaccacgggccgctactgcttatgagctgattcgtgtttgtaaggatctgcaggggaggtttgaggaagtggaggttccgcttctgattgtgcacggcggaggtgatgttgtatgcgacgtagcgtgtgttgaggagcttcatcggagagcgattagtgaggataagacgatcaagatctaccctgagttgtggcatcagatgattggggaatcggaggagaaagtcgatctggtttacggtgatatgctgagctggctcaagagtcgagctgaaaggaaggcacgcgccgccgttgatggaggagcagcttagagtcccttttgagtctttgggtgttgtattgtagtccaataggactgtgccatctggcaagaaactatttatggttttactgtttcgtaatcgtagcacatggtttacagttaaaccaatacctttgggtatcatcaataatataaaaaatcgttg

SEQ ID NO: 36664 - protein, 349 aa, Arabidopsis thaliana
  peptide (1)..(349): Ceres Seq. ID no. 12390596
  misc_feature (106)..(324): Pfam Name: alpha/beta hydrolase fold Pfam Description: alpha/beta hydrolase fold
  misc_feature (48)..(336): Homolog of NCBI NO: 18405038 NR Description: putative phospholipase
  misc_feature (47)..(335): Homolog of NCBI NO: 30687883 NR Description: esterase/lipase/thioesterase family [Arabidopsis
  misc_feature (47)..(335): Homolog of NCBI NO: 7487948 NR Description: lysophospholipase homolog F12L6.8 - Arabidopsis
  misc_feature (53)..(337): Homolog of NCBI NO: 7487947 NR Description: lysophospholipase homolog F12L6.7 - Arabidopsis
  misc_feature (48)..(337): Homolog of NCBI NO: 30687879 NR Description: hydrolase, alpha/beta fold family [Arabidopsis
  misc_feature (38)..(335): Homolog of NCBI NO: 34899776 NR Description: putative lysophospholipase isolog
  misc_feature (30)..(335): Homolog of NCBI NO: 15220284 NR Description: lysophospholipase isolog; protein id: At1g11090.1
  misc_feature (23)..(346): Homolog of NCBI NO: 34894634 NR Description: P0028G04.16 [Oryza sativa (japonica
  misc_feature (20)..(337): Homolog of NCBI NO: 15242179 NR Description: lysophospholipase -like protein; protein id:
  misc_feature (20)..(349): Homolog of NCBI NO: 15239709 NR Description: phospholipase - like protein
HLTSFSFPFSQPFGGKNQKMGLHPISDANEHNPFGSLTADEFYAKHSVSHSSAFITNPRGLKLFTQWWSPLPPTKPIGIIAVVHGFTGESSWFLQLTSILFAKSGFITCAIDHQGHGFSDGLIAHIPDINPVVDDCISFFDDFRSRQTPSDLPCFLYSESLGGAIALYISLRQRGVWDGLILNGAMCGISDKFKPPWPLEHLLFVVANLIPTWRVIPTRGSIPDVSFKEPWKRKLAMASPRRTVAKPRAATAYELIRVCKDLQGRFEEVEVPLLIVHGGGDVVCDVACVEELHRRAISEDKTIKIYPELWHQMIGESEEKVDLVYGDMLSWLKSRAERKARAAVDGGAA

SEQ ID NO: 36665 - protein, 330 aa, Arabidopsis thaliana; identical to SEQ ID NO: 22701
  peptide (1)..(330): Ceres Seq. ID no. 12390597
  misc_feature (87)..(305): Pfam Name: alpha/beta hydrolase fold Pfam Description: alpha/beta hydrolase fold
  misc_feature (29)..(317): Homolog of NCBI NO: 18405038 NR Description: putative phospholipase
  misc_feature (28)..(316): Homolog of NCBI NO: 30687883 NR Description: esterase/lipase/thioesterase family [Arabidopsis
  misc_feature (28)..(316): Homolog of NCBI NO: 7487948 NR Description: lysophospholipase homolog F12L6.8 - Arabidopsis
  misc_feature (34)..(318): Homolog of NCBI NO: 7487947 NR Description: lysophospholipase homolog F12L6.7 - Arabidopsis
  misc_feature (29)..(318): Homolog of NCBI NO: 30687879 NR Description: hydrolase, alpha/beta fold family [Arabidopsis
  misc_feature (19)..(316): Homolog of NCBI NO: 34899776 NR Description: putative lysophospholipase isolog
  misc_feature (11)..(316): Homolog of NCBI NO: 15220284 NR Description: lysophospholipase isolog; protein id: At1g11090.1
  misc_feature (4)..(327): Homolog of NCBI NO: 34894634 NR Description: P0028G04.16 [Oryza sativa (japonica
  misc_feature (1)..(318): Homolog of NCBI NO: 15242179 NR Description: lysophospholipase -like protein; protein id:
  misc_feature (1)..(330): Homolog of NCBI NO: 15239709 NR Description: phospholipase - like protein

SEQ ID NO: 36666 - DNA, 1646 bp, Arabidopsis thaliana
  misc_feature (1)..(1646): Ceres Seq. ID no. 13495734
  misc_feature: MA Experiment ID: 108434 Result: Down-regulated in Transcription
  misc_feature: MA Experiment 108434 PARAMETER Experiment Name: At_Root_Tips_cDNA_P Parameter: Tissue Value: Root Tips
  misc_feature: MA Experiment ID: 108573 Result: Up-regulated in Transcription
  misc_feature: MA Experiment 108573 PARAMETER Experiment Name: At_Drought_cDNA_P Parameter: Timepoint (hr) Value: 6
  misc_feature: MA Experiment 108573 PARAMETER Experiment Name: At_Drought_cDNA_P Parameter: Tissue Value: Aerial
  misc_feature: MA Experiment 108573 PARAMETER Experiment Name: At_Drought_cDNA_P Parameter: Treatment Value: Drought vs. No Drought
  misc_feature: MA Experiment ID: 20000089 Result: Down-regulated in Transcription
  misc_feature: MA Experiment ID: 20000113 Result: Down-regulated in Transcription
  misc_feature: MA Experiment 20000113 PARAMETER Experiment Name: At_42deg_Heat_cDNA_P Parameter: Temperature (deg C) Value: 42 vs. 22
  misc_feature: MA Experiment 20000113 PARAMETER Experiment Name: At_42deg_Heat_cDNA_P Parameter: Timepoint (hr) Value: 8
  misc_feature: MA Experiment 20000113 PARAMETER Experiment Name: At_42deg_Heat_cDNA_P Parameter: Tissue Value: Aerial
  misc_feature: MA Experiment ID: 20000224 Result: Down-regulated in Transcription
ccaccaccaccttcgatcgatttctactaacttgttcttcttcttctttctcaactctcttgtcttttgtctctccaccaattttttcttgttctttctctctccaccacataaaaaaaaaaaacctagctttgtcccctcaactcactgattgaactgcttgattttcgattgatcatctgggtggttttgaatcgaagagtattgttgtattagtggctggtggctctccaaaagagtaaggccggagagagaaatcaatggcctctggcggcggagaggcggataaatcacttgaaatcgggtccgggaccgcggatcccaaaataggcggtactgggagcaggagcgccggagaagaacgatacttcagggcagatacactggatttcagtaaatgggatttgcatatgggtcaaacctctactagcagcgtcctcaccaattccgcttccacgagcgctcccgcaccggcgatgcaggaatgggagattgacctctccaaactcgatatgaagcacgtcctcgctcacggtacttacggcactgtctaccgcggtgtctacgccggccaagaagtcgcagtgaaagtgttagattggggagaagatggttacgccacaccagctgaaactacagctctccgtgcttccttcgagcaagaggtcgccgtctggcagaagctcgatcatcccaacgttaccaagtttataggagcatccatgggaacctctgatctgcggatccctcctgctggtgatactggcggacgtggtaacggtgcacatcctgcgagggcctgttgtgttgtggttgaatatgttgccggaggcacgcttaagaagttcctcatcaagaaatatagggccaaactacccatcaaggatgtcattcagctcgctttggatctcgctagagggcttagttacctccactccaaggcgattgtacatagggacgtgaagtcagagaacatgctgttacagcctaacaagacgctgaagatcgctgatttcggggtagctagagttgaagctcagaaccctcaagacatgacgggtgaaactggaacacttggatacatggcaccagaggttcttgaaggaaagccttacaacaggaaatgcgatgtctatagctttggggtatgcctctgggaaatatactgctgtgacatgccctatgctgactgtagttttgctgagatctctcacgccgttgttcataggaatctgagaccagagattccgaaatgctgcccgcatgcggtggcaaacatcatgaagagatgctgggacccgaatccagacaggcgtccggagatggaggaggtggtgaagctgcttgaagccatagacacaagcaaaggtggtggaatgatagctccggaccagtttcaggggtgcctctgtttcttcaaacctcgaggcccctgaatctctctccctctctttcctttttgctccgtgtctgatatattcttgagagctgcgtgattctttggattttgtatttactttgagctatgggagttggattggtgtgggttttgtcataagaatctttctgcgctctatgtatttatatacttaacacagtcgtgtataattcgattaagctttattttattttttgatgttgattcc

SEQ ID NO: 36667 - protein, 391 aa, Arabidopsis thaliana
  peptide (1)..(391): Ceres Seq. ID no. 13495735
  misc_feature (2)..(390): Homolog of NCBI NO: 14626298 NR Description: putative protein kinase [Oryza sativa (japonica
  misc_feature (74)..(391): Homolog of NCBI NO: 29367399 NR Description: putative protein kinase [Oryza sativa (japonica
  misc_feature (74)..(391): Homolog of NCBI NO: 34911620 NR Description: protein kinase -like [Oryza sativa (japonica
  misc_feature (52)..(391): Homolog of NCBI NO: 21553402 NR Description: protein kinase [Arabidopsis thaliana]
  misc_feature (52)..(391): Homolog of NCBI NO: 15240597 NR Description: protein kinase, putative [Arabidopsis thaliana]
  misc_feature (33)..(391): Homolog of NCBI NO: 15233574 NR Description: protein kinase, putative [Arabidopsis thaliana]
  misc_feature (74)..(391): Homolog of NCBI NO: 15232131 NR Description: protein kinase, putative [Arabidopsis thaliana]
  misc_feature (24)..(391): Homolog of NCBI NO: 18403507 NR Description: protein kinase, putative [Arabidopsis thaliana]
  misc_feature (1)..(391): Homolog of NCBI NO: 21554375 NR Description: ATMRK1 [Arabidopsis thaliana]
  misc_feature (1)..(391): Homolog of NCBI NO: 15229398 NR Description: protein kinase, putative (ATMRK1) [Arabidopsis
MASGGGEADKSLEIGSGTADPKIGGTGSRSAGEERYFRADTLDFSKWDLHMGQTSTSSVLTNSASTSAPAPAMQEWEIDLSKLDMKHVLAHGTYGTVYRGVYAGQEVAVKVLDWGEDGYATPAETTALRASFEQEVAVWQKLDHPNVTKFIGASMGTSDLRIPPAGDTGGRGNGAHPARACCVVVEYVAGGTLKKFLIKKYRAKLPIKDVIQLALDLARGLSYLHSKAIVHRDVKSENMLLQPNKTLKIADFGVARVEAQNPQDMTGETGTLGYMAPEVLEGKPYNRKCDVYSFGVCLWEIYCCDMPYADCSFAEISHAVVHRNLRPEIPKCCPHAVANIMKRCWDPNPDRRPEMEEVVKLLEAIDTSKGGGMIAPDQFQGCLCFFKPRGP

SEQ ID NO: 36668 - protein, 341 aa, Arabidopsis thaliana
  peptide (1)..(341): Ceres Seq. ID no. 13495736
  misc_feature (1)..(340): Homolog of NCBI NO: 14626298 NR Description: putative protein kinase [Oryza sativa (japonica
  misc_feature (24)..(341): Homolog of NCBI NO: 29367399 NR Description: putative protein kinase [Oryza sativa (japonica
  misc_feature (24)..(341): Homolog of NCBI NO: 34911620 NR Description: protein kinase -like [Oryza sativa (japonica
  misc_feature (2)..(341): Homolog of NCBI NO: 21553402 NR Description: protein kinase [Arabidopsis thaliana]
  misc_feature (2)..(341): Homolog of NCBI NO: 15240597 NR Description: protein kinase, putative [Arabidopsis thaliana]
  misc_feature (1)..(341): Homolog of NCBI NO: 15233574 NR Description: protein kinase, putative [Arabidopsis thaliana]
  misc_feature (24)..(341): Homolog of NCBI NO: 15232131 NR Description: protein kinase, putative [Arabidopsis thaliana]
  misc_feature (1)..(341): Homolog of NCBI NO: 18403507 NR Description: protein kinase, putative [Arabidopsis thaliana]
  misc_feature (1)..(341): Homolog of NCBI NO: 21554375 NR Description: ATMRK1 [Arabidopsis thaliana]
  misc_feature (1)..(341): Homolog of NCBI NO: 15229398 NR Description: protein kinase, putative (ATMRK1) [Arabidopsis
MGQTSTSSVLTNSASTSAPAPAMQEWEIDLSKLDMKHVLAHGTYGTVYRGVYAGQEVAVKVLDWGEDGYATPAETTALRASFEQEVAVWQKLDHPNVTKFIGASMGTSDLRIPPAGDTGGRGNGAHPARACCVVVEYVAGGTLKKFLIKKYRAKLPIKDVIQLALDLARGLSYLHSKAIVHRDVKSENMLLQPNKTLKIADFGVARVEAQNPQDMTGETGTLGYMAPEVLEGKPYNRKCDVYSFGVCLWEIYCCDMPYADCSFAEISHAVVHRNLRPEIPKCCPHAVANIMKRCWDPNPDRRPEMEEVVKLLEAIDTSKGGGMIAPDQFQGCLCFFKPRGP

SEQ ID NO: 36669 - protein, 319 aa, Arabidopsis thaliana
  peptide (1)..(319): Ceres Seq. ID no. 13495737
  misc_feature (1)..(318): Homolog of NCBI NO: 14626298 NR Description: putative protein kinase [Oryza sativa (japonica
  misc_feature (2)..(319): Homolog of NCBI NO: 29367399 NR Description: putative protein kinase [Oryza sativa (japonica
  misc_feature (2)..(319): Homolog of NCBI NO: 34911620 NR Description: protein kinase -like [Oryza sativa (japonica
  misc_feature (1)..(319): Homolog of NCBI NO: 21553402 NR Description: protein kinase [Arabidopsis thaliana]
  misc_feature (1)..(319): Homolog of NCBI NO: 15240597 NR Description: protein kinase, putative [Arabidopsis thaliana]
  misc_feature (1)..(319): Homolog of NCBI NO: 15233574 NR Description: protein kinase, putative [Arabidopsis thaliana]
  misc_feature (2)..(319): Homolog of NCBI NO: 15232131 NR Description: protein kinase, putative [Arabidopsis thaliana]
  misc_feature (1)..(319): Homolog of NCBI NO: 18403507 NR Description: protein kinase, putative [Arabidopsis thaliana]
  misc_feature (1)..(319): Homolog of NCBI NO: 21554375 NR Description: ATMRK1 [Arabidopsis thaliana]
  misc_feature (1)..(319): Homolog of NCBI NO: 15229398 NR Description: protein kinase, putative (ATMRK1) [Arabidopsis
MQEWEIDLSKLDMKHVLAHGTYGTVYRGVYAGQEVAVKVLDWGEDGYATPAETTALRASFEQEVAVWQKLDHPNVTKFIGASMGTSDLRIPPAGDTGGRGNGAHPARACCVVVEYVAGGTLKKFLIKKYRAKLPIKDVIQLALDLARGLSYLHSKAIVHRDVKSENMLLQPNKTLKIADFGVARVEAQNPQDMTGETGTLGYMAPEVLEGKPYNRKCDVYSFGVCLWEIYCCDMPYADCSFAEISHAVVHRNLRPEIPKCCPHAVANIMKRCWDPNPDRRPEMEEVVKLLEAIDTSKGGGMIAPDQFQGCLCFFKPRGP

SEQ ID NO: 36670 - DNA, 1064 bp, Arabidopsis thaliana
  misc_feature (1)..(1064): Ceres Seq. ID no. 12560070
  misc_feature: MA Experiment ID: 20000182 Result: Up-regulated in Transcription
  misc_feature: MA Experiment 20000182 PARAMETER Experiment Name: At_2mM_SA_P Parameter: Age (day) Value: 14
  misc_feature: MA Experiment 20000182 PARAMETER Experiment Name: At_2mM_SA_P Parameter: Organism Value: A. thaliana
  misc_feature: MA Experiment 20000182 PARAMETER Experiment Name: At_2mM_SA_P Parameter: Plant Line Value: WS
  misc_feature: MA Experiment 20000182 PARAMETER Experiment Name: At_2mM_SA_P Parameter: Timepoint (hr) Value: 6
  misc_feature: MA Experiment 20000182 PARAMETER Experiment Name: At_2mM_SA_P Parameter: Tissue Value: Aerial
  misc_feature: MA Experiment 20000182 PARAMETER Experiment Name: At_2mM_SA_P Parameter: Treatment Value: 2mM SA vs. No Treatment
  misc_feature: MA Experiment ID: 20000234 Result: Down-regulated in Transcription
  misc_feature: MA Experiment 20000234 PARAMETER Experiment Name: At_Siliques_P Parameter: Age (day) Value: 21
  misc_feature: MA Experiment 20000234 PARAMETER Experiment Name: At_Siliques_P Parameter: Organism Value: A. thaliana
  misc_feature: MA Experiment 20000234 PARAMETER Experiment Name: At_Siliques_P Parameter: Plant Line Value: WS
  misc_feature: MA Experiment 20000234 PARAMETER Experiment Name: At_Siliques_P Parameter: Tissue Value: Less Than 5mm Siliques vs. Whole Plant
  misc_feature: MA Experiment ID: 20000437 Result: Up-regulated in Transcription
  misc_feature: MA Experiment 20000437 PARAMETER Experiment Name: At_Drought_P Parameter: Age (day) Value: 8
  misc_feature: MA Experiment 20000437 PARAMETER Experiment Name: At_Drought_P Parameter: Organism Value: A. thaliana
  misc_feature: MA Experiment 20000437 PARAMETER Experiment Name: At_Drought_P Parameter: Plant Line Value: WS
  misc_feature: MA Experiment 20000437 PARAMETER Experiment Name: At_Drought_P Parameter: Timepoint (hr) Value: 24
  misc_feature: MA Experiment 20000437 PARAMETER Experiment Name: At_Drought_P Parameter: Tissue Value: Whole Plant
  misc_feature: MA Experiment 20000437 PARAMETER Experiment Name: At_Drought_P Parameter: Treatment Value: Drought vs. No Drought
  misc_feature: MA Experiment ID: 20001451 Result: Up-regulated in Transcription
  misc_feature: MA Experiment 20001451 PARAMETER Experiment Name: At_Far-red-induction_P Parameter: Age (day) Value: 7
  misc_feature: MA Experiment 20001451 PARAMETER Experiment Name: At_Far-red-induction_P Parameter: Light Value: Far-red vs. White
  misc_feature: MA Experiment 20001451 PARAMETER Experiment Name: At_Far-red-induction_P Parameter: Organism Value: A. thaliana
  misc_feature: MA Experiment 20001451 PARAMETER Experiment Name: At_Far-red-induction_P Parameter: Plant Line Value: Columbia
  misc_feature: MA Experiment 20001451 PARAMETER Experiment Name: At_Far-red-induction_P Parameter: Timepoint (hr) Value: 24
  misc_feature: MA Experiment 20001451 PARAMETER Experiment Name: At_Far-red-induction_P Parameter: Tissue Value: Whole Plant
  misc_feature: MA Experiment ID: 20001905 Result: Up-regulated in Transcription
  misc_feature: MA Experiment 20001905 PARAMETER Experiment Name: At_Drought_Reproduction_P Parameter: Age (day) Value: 40
  misc_feature: MA Experiment 20001905 PARAMETER Experiment Name: At_Drought_Reproduction_P Parameter: Organism Value: A. thaliana
  misc_feature: MA Experiment 20001905 PARAMETER Experiment Name: At_Drought_Reproduction_P Parameter: Plant Line Value: WS
  misc_feature: MA Experiment 20001905 PARAMETER Experiment Name: At_Drought_Reproduction_P Parameter: Timepoint (day) Value: 10
  misc_feature: MA Experiment 20001905 PARAMETER Experiment Name: At_Drought_Reproduction_P Parameter: Tissue Value: Rosettes
  misc_feature: MA Experiment 20001905 PARAMETER Experiment Name: At_Drought_Reproduction_P Parameter: Treatment Value: Drought vs. No Drought
caatcttttcttcgatctctttcttttttatctcttcatcgattgtgagaaaagttttgatttgtctctctatatctttcatctttcttatttttacactttgatagattctctatttttggaatctgattcatatgtttggggtttaatagtttcagctcaaagaaatctgggttaaagtgtgttagtgttcgtgtgttctctaaaggaaaatcctgaagaaaccaattgtaacttgtacactgggaaaatataagtgttcctgaggagtaaaagaggggaaaaagagaatgagaatagtccgggttaacgggaggcatagcgtctgggaagagtacagtgtctaacctcttcaaggctagtggcattcccgttgttgacgctgatgttgttgctcgagatgtattgaagaaaggaagcggtggatggaaaagagtcgttgcagcttttggtgaggagattctgcttcctagtggagaagtggatcggccaaaactcggtcagattgtgttctcgtctgattccaagcgtcaacttctaaacaagctgatggctccatacatatcaagtggtatcttctgggaaattctgaaacaatgggcgaagtggagctaaagtgatagttgtcgatatccctttgttgttcgaagtgaagatggataaatggactaaacctattgtggttgtgtgggttagtcaagagacacaacttaagagactgatggagagagatggattgagtgaggaagatgcaagaaacagagtgatggctcagatgccgttggattcgaaaagaagcaaagctgatgttgtgatcgataataatggctctcttgacgaccttcaccaacagttcgagaaggttttgattgaaattagaagaccattgacgtggatcgagttttggcgttcaaggcaaggagccttctcggtccttggttcagtgattttaggattatctgtttgcaaacagctcaaaattggctcttaacatttcacttctgttactgctaaaaaacttgttataatcttaaagctttgatttattattctcttgctctctc

SEQ ID NO: 36671 - protein, 111 aa, Arabidopsis thaliana
  peptide (1)..(111): Ceres Seq. ID no. 12560071
  misc_feature (1)..(62): Pfam Name: Dephospho-CoA kinase Pfam Description: Dephospho-CoA kinase
  misc_feature (1)..(109): Homolog of NCBI NO: 24644728 NR Description: CG1939-PA [Drosophila melanogaster]
  misc_feature (1)..(109): Homolog of NCBI NO: 20151879 NR Description: RH63365p [Drosophila melanogaster]
  misc_feature (1)..(71): Homolog of NCBI NO: 30022659 NR Description: Dephospho-CoA kinase [Bacillus cereus ATCC 14579]
  misc_feature (1)..(66): Homolog of NCBI NO: 16803603 NR Description: similar to unknown proteins [Listeria
  misc_feature (1)..(73): Homolog of NCBI NO: 29375465 NR Description: dephospho-CoA kinase, putative [Enterococcus
  misc_feature (1)..(71): Homolog of NCBI NO: 16079958 NR Description: similar to hypothetical proteins [Bacillus
  misc_feature (1)..(71): Homolog of NCBI NO: 21402627 NR Description: CoaE, Dephospho-CoA kinase [Bacillus anthracis
  misc_feature (1)..(66): Homolog of NCBI NO: 16800666 NR Description: similar to unknown proteins [Listeria innocua]
  misc_feature (1)..(106): Homolog of NCBI NO: 14587322 NR Description: P0460H02.3 [Oryza sativa (japonica
  misc_feature (1)..(111): Homolog of NCBI NO: 15225886 NR Description: unknown protein; protein id: At2g27490.1
MDKWTKPIVVVWVSQETQLKRLMERDGLSEEDARNRVMAQMPLDSKRSKADVVIDNNGSLDDLHQQFEKVLIEIRRPLTWIEFWRSRQGAFSVLGSVILGLSVCKQLKIGS

SEQ ID NO: 36672 - protein, 89 aa, Arabidopsis thaliana
  peptide (1)..(89): Ceres Seq. ID no. 12560072
  misc_feature (1)..(87): Homolog of NCBI NO: 24644728 NR Description: CG1939-PA [Drosophila melanogaster]
  misc_feature (1)..(87): Homolog of NCBI NO: 20151879 NR Description: RH63365p [Drosophila melanogaster]
  misc_feature (1)..(49): Homolog of NCBI NO: 30022659 NR Description: Dephospho-CoA kinase [Bacillus cereus ATCC 14579]
  misc_feature (1)..(44): Homolog of NCBI NO: 16803603 NR Description: similar to unknown proteins [Listeria
  misc_feature (1)..(51): Homolog of NCBI NO: 29375465 NR Description: dephospho-CoA kinase, putative [Enterococcus
  misc_feature (1)..(49): Homolog of NCBI NO: 16079958 NR Description: similar to hypothetical proteins [Bacillus
  misc_feature (1)..(49): Homolog of NCBI NO: 21402627 NR Description: CoaE, Dephospho-CoA kinase [Bacillus anthracis
  misc_feature (1)..(44): Homolog of NCBI NO: 16800666 NR Description: similar to unknown proteins [Listeria innocua]
  misc_feature (1)..(84): Homolog of NCBI NO: 14587322 NR Description: P0460H02.3 [Oryza sativa (japonica
  misc_feature (1)..(89): Homolog of NCBI NO: 15225886 NR Description: unknown protein; protein id: At2g27490.1
MERDGLSEEDARNRVMAQMPLDSKRSKADVVIDNNGSLDDLHQQFEKVLIEIRRPLTWIEFWRSRQGAFSVLGSVILGLSVCKQLKIGS

SEQ ID NO: 36673 - protein, 74 aa, Arabidopsis thaliana
  peptide (1)..(74): Ceres Seq. ID no. 12560073
  misc_feature (1)..(72): Homolog of NCBI NO: 24644728 NR Description: CG1939-PA [Drosophila melanogaster]
  misc_feature (1)..(72): Homolog of NCBI NO: 20151879 NR Description: RH63365p [Drosophila melanogaster]
  misc_feature (1)..(34): Homolog of NCBI NO: 30022659 NR Description: Dephospho-CoA kinase [Bacillus cereus ATCC 14579]
  misc_feature (1)..(29): Homolog of NCBI NO: 16803603 NR Description: similar to unknown proteins [Listeria
  misc_feature (1)..(36): Homolog of NCBI NO: 29375465 NR Description: dephospho-CoA kinase, putative [Enterococcus
  misc_feature (1)..(34): Homolog of NCBI NO: 16079958 NR Description: similar to hypothetical proteins [Bacillus
  misc_feature (1)..(34): Homolog of NCBI NO: 21402627 NR Description: CoaE, Dephospho-CoA kinase [Bacillus anthracis
  misc_feature (1)..(29): Homolog of NCBI NO: 16800666 NR Description: similar to unknown proteins [Listeria innocua]
  misc_feature (1)..(69): Homolog of NCBI NO: 14587322 NR Description: P0460H02.3 [Oryza sativa (japonica
  misc_feature (1)..(74): Homolog of NCBI NO: 15225886 NR Description: unknown protein; protein id: At2g27490.1
MAQMPLDSKRSKADVVIDNNGSLDDLHQQFEKVLIEIRRPLTWIEFWRSRQGAFSVLGSVILGLSVCKQLKIGS

SEQ ID NO: 36674 - DNA, 783 bp, Arabidopsis thaliana
  misc_feature (1)..(783): Ceres Seq. ID no. 12357676
  misc_feature: MA Experiment ID: 108434 Result: Up-regulated in Transcription
  misc_feature: MA Experiment 108434 PARAMETER Experiment Name: At_Root_Tips_cDNA_P Parameter: Tissue Value: Root Tips
  misc_feature: MA Experiment ID: 20001911 Result: Down-regulated in Transcription
  misc_feature: MA Experiment 20001911 PARAMETER Experiment Name: At_Drought_Reproduction_P Parameter: Age (day) Value: 40
  misc_feature: MA Experiment 20001911 PARAMETER Experiment Name: At_Drought_Reproduction_P Parameter: Organism Value: A. thaliana
  misc_feature: MA Experiment 20001911 PARAMETER Experiment Name: At_Drought_Reproduction_P Parameter: Plant Line Value: WS
  misc_feature: MA Experiment 20001911 PARAMETER Experiment Name: At_Drought_Reproduction_P Parameter: Timepoint (day) Value: 10
  misc_feature: MA Experiment 20001911 PARAMETER Experiment Name: At_Drought_Reproduction_P Parameter: Tissue Value: Flowers
  misc_feature: MA Experiment 20001911 PARAMETER Experiment Name: At_Drought_Reproduction_P Parameter: Treatment Value: Drought vs. No Drought
ttggcgagaaaagttgagaactggaatcgaagaagcgatagggttttggttacttggagtgtgagtattttagttaccaccgcttgcaatttcaaattggtttcttttttccggtgacatttagtaagacaatggaagaaataagatcggcgatggagaagcaagtggatctcgtagcggatctggttgagaaactctccggagagctccgaacggggtttcaacctgcttacgataatttcttggggtttttccacgccattaattggaaggaaccttggattatgggtttaatggcgtttcatgctttgttgttactagtgactcttctttctagaaggcatctcaacttccatatgttcctcttcttattggctttggctggggtatactttgcagagaatctcaaccgggagttgaggaaaaactggaagagcttctcaactcaaaactactttgactcgaacggagtcttcctatcgactctctggtctgggaccacttttggtcattgcaatgataatcctgataaacacactcttttcgctttgctacttaatcgtaaagtggaaaagagctgagctcaggcatcgcgcaaggcttgctcataccaaggaggaatgatcccactttttttaatctcacatttatgtatactctcacacaatgcatcaaaactgttttgagttttttagtagaagctgctcttttatgtatttcgttttcaattgaatcgaattgtatcaaaccgaaccaaaccaaattattctacttcggtctgtt

SEQ ID NO: 36675 - protein, 149 aa, Arabidopsis thaliana
  peptide (1)..(149): Ceres Seq. ID no. 12357677
  misc_feature (45)..(121): Homolog of NCBI NO: 25286705 NR Description: cDNA sequence BC024093 [Mus musculus]
  misc_feature (45)..(121): Homolog of NCBI NO: 21595411 NR Description: Hypothetical protein DKFZp434C1714 [Homo sapiens]
  misc_feature (45)..(121): Homolog of NCBI NO: 16359094 NR Description: Unknown (protein for IMAGE:4686355) [Homo sapiens]
  misc_feature (45)..(121): Homolog of NCBI NO: 11359939 NR Description: hypothetical protein DKFZp434C1714.1 - human
  misc_feature (40)..(121): Homolog of NCBI NO: 24653051 NR Description: CG30051-PB [Drosophila melanogaster]
  misc_feature (46)..(82): Homolog of NCBI NO: 25518732 NR Description: hypothetical protein F7P12.4 [imported] -
  misc_feature (1)..(47): Homolog of NCBI NO: 25518732 NR Description: hypothetical protein F7P12.4 [imported] -
  misc_feature (1)..(122): Homolog of NCBI NO: 38637052 NR Description: unknown protein [Oryza sativa (japonica
  misc_feature (1)..(122): Homolog of NCBI NO: 18399227 NR Description: Expressed protein
  misc_feature (1)..(122): Homolog of NCBI NO: 21554376 NR Description: unknown [Arabidopsis thaliana]
MEEIRSAMEKQVDLVADLVEKLSGELRTGFQPAYDNFLGFFHAINWKEPWIMGLMAFHALLLLVTLLSRRHLNFHMFLFLLALAGVYFAENLNRELRKNWKSFSTQNYFDSNGVFLSTLWSGTTFGHCNDNPDKHTLFALLLNRKVEKS

SEQ ID NO: 36676 - protein, 142 aa, Arabidopsis thaliana
  peptide (1)..(142): Ceres Seq. ID no. 12357678
  misc_feature (38)..(114): Homolog of NCBI NO: 25286705 NR Description: cDNA sequence BC024093 [Mus musculus]
  misc_feature (38)..(114): Homolog of NCBI NO: 21595411 NR Description: Hypothetical protein DKFZp434C1714 [Homo sapiens]
  misc_feature (38)..(114): Homolog of NCBI NO: 16359094 NR Description: Unknown (protein for IMAGE:4686355) [Homo sapiens]
  misc_feature (38)..(114): Homolog of NCBI NO: 11359939 NR Description: hypothetical protein DKFZp434C1714.1 - human
  misc_feature (33)..(114): Homolog of NCBI NO: 24653051 NR Description: CG30051-PB [Drosophila melanogaster]
  misc_feature (39)..(75): Homolog of NCBI NO: 25518732 NR Description: hypothetical protein F7P12.4 [imported] -
  misc_feature (1)..(40): Homolog of NCBI NO: 25518732 NR Description: hypothetical protein F7P12.4 [imported] -
  misc_feature (1)..(115): Homolog of NCBI NO: 38637052 NR Description: unknown protein [Oryza sativa (japonica
  misc_feature (1)..(115): Homolog of NCBI NO: 18399227 NR Description: Expressed protein
  misc_feature (1)..(115): Homolog of NCBI NO: 21554376 NR Description: unknown [Arabidopsis thaliana]
MEKQVDLVADLVEKLSGELRTGFQPAYDNFLGFFHAINWKEPWIMGLMAFHALLLLVTLLSRRHLNFHMFLFLLALAGVYFAENLNRELRKNWKSFSTQNYFDSNGVFLSTLWSGTTFGHCNDNPDKHTLFALLLNRKVEKS

SEQ ID NO: 36677 - protein, 98 aa, Arabidopsis thaliana
  peptide (1)..(98): Ceres Seq. ID no. 12357679
  misc_feature (1)..(70): Homolog of NCBI NO: 34864175 NR Description: similar to cDNA sequence BC024093 [Rattus
  misc_feature (1)..(70): Homolog of NCBI NO: 25286705 NR Description: cDNA sequence BC024093 [Mus musculus]
  misc_feature (1)..(70): Homolog of NCBI NO: 21595411 NR Description: Hypothetical protein DKFZp434C1714 [Homo sapiens]
  misc_feature (1)..(70): Homolog of NCBI NO: 16359094 NR Description: Unknown (protein for IMAGE:4686355) [Homo sapiens]
  misc_feature (1)..(70): Homolog of NCBI NO: 11359939 NR Description: hypothetical protein DKFZp434C1714.1 - human
  misc_feature (1)..(70): Homolog of NCBI NO: 24653051 NR Description: CG30051-PB [Drosophila melanogaster]
  misc_feature (1)..(31): Homolog of NCBI NO: 25518732 NR Description: hypothetical protein F7P12.4 [imported] -
  misc_feature (1)..(71): Homolog of NCBI NO: 38637052 NR Description: unknown protein [Oryza sativa (japonica
  misc_feature (1)..(71): Homolog of NCBI NO: 18399227 NR Description: Expressed protein
  misc_feature (1)..(71): Homolog of NCBI NO: 21554376 NR Description: unknown [Arabidopsis thaliana]
MGLMAFHALLLLVTLLSRRHLNFHMFLFLLALAGVYFAENLNRELRKNWKSFSTQNYFDSNGVFLSTLWSGTTFGHCNDNPDKHTLFALLLNRKVEKS

SEQ ID NO: 36678 - DNA, 1233 bp, Arabidopsis thaliana
  misc_feature (1)..(1233): Ceres Seq. ID no. 12336540
  misc_feature: MA Experiment ID: 108573 Result: Up-regulated in Transcription
  misc_feature: MA Experiment 108573 PARAMETER Experiment Name: At_Drought_cDNA_P Parameter: Timepoint (hr) Value: 6
  misc_feature: MA Experiment 108573 PARAMETER Experiment Name: At_Drought_cDNA_P Parameter: Tissue Value: Aerial
  misc_feature: MA Experiment 108573 PARAMETER Experiment Name: At_Drought_cDNA_P Parameter: Treatment Value: Drought vs. No Drought
  misc_feature: MA Experiment ID: 108579 Result: Down-regulated in Transcription
  misc_feature: MA Experiment 108579 PARAMETER Experiment Name: At_4deg_Cold_cDNA_P Parameter: Temperature (deg C) Value: 4 vs. 22
  misc_feature: MA Experiment 108579 PARAMETER Experiment Name: At_4deg_Cold_cDNA_P Parameter: Timepoint (hr) Value: 6
  misc_feature: MA Experiment 108579 PARAMETER Experiment Name: At_4deg_Cold_cDNA_P Parameter: Tissue Value: Aerial
  misc_feature: MA Experiment ID: 20000495 Result: Up-regulated in Transcription
  misc_feature: MA Experiment 20000495 PARAMETER Experiment Name: At_Guard_Cells_P Parameter: Harvest Date Value: 8/2/2002
  misc_feature: MA Experiment 20000495 PARAMETER Experiment Name: At_Guard_Cells_P Parameter: Organism Value: A. thaliana
  misc_feature: MA Experiment 20000495 PARAMETER Experiment Name: At_Guard_Cells_P Parameter: Tissue Value: Guard Cells vs. Leaves
  misc_feature: MA Experiment ID: 20000573 Result: Down-regulated in Transcription
  misc_feature: MA Experiment 20000573 PARAMETER Experiment Name: At_100uM_ABA_Mutants__P Parameter: Organism Value: A. thaliana
  misc_feature: MA Experiment 20000573 PARAMETER Experiment Name: At_100uM_ABA_Mutants__P Parameter: Plant Line Value: CS22 vs. Ler wt
  misc_feature: MA Experiment 20000573 PARAMETER Experiment Name: At_100uM_ABA_Mutants__P Parameter: Timepoint (hr) Value: N/A
  misc_feature: MA Experiment 20000573 PARAMETER Experiment Name: At_100uM_ABA_Mutants__P Parameter: Tissue Value: Whole Plant
  misc_feature: MA Experiment 20000573 PARAMETER Experiment Name: At_100uM_ABA_Mutants__P Parameter: Treatment Value: None
  misc_feature: MA Experiment ID: 20000574 Result: Down-regulated in Transcription
  misc_feature: MA Experiment 20000574 PARAMETER Experiment Name: At_100uM_ABA_Mutants__P Parameter: Organism Value: A. thaliana
  misc_feature: MA Experiment 20000574 PARAMETER Experiment Name: At_100uM_ABA_Mutants__P Parameter: Plant Line Value: CS23 vs. Ler wt
  misc_feature: MA Experiment 20000574 PARAMETER Experiment Name: At_100uM_ABA_Mutants__P Parameter: Timepoint (hr) Value: N/A
  misc_feature: MA Experiment 20000574 PARAMETER Experiment Name: At_100uM_ABA_Mutants__P Parameter: Tissue Value: Whole Plant
  misc_feature: MA Experiment 20000574 PARAMETER Experiment Name: At_100uM_ABA_Mutants__P Parameter: Treatment Value: None
  misc_feature: MA Experiment ID: 20000794 Result: Up-regulated in Transcription
  misc_feature: MA Experiment 20000794 PARAMETER Experiment Name: At_Petals_P Parameter: Age (day) Value: 23-25 days
  misc_feature: MA Experiment 20000794 PARAMETER Experiment Name: At_Petals_P Parameter: Plant Line Value: WS
  misc_feature: MA Experiment 20000794 PARAMETER Experiment Name: At_Petals_P Parameter: Tissue Value: Petals vs. Whole plant
  misc_feature: MA Experiment ID: 20001911 Result: Up-regulated in Transcription
  misc_feature: MA Experiment 20001911 PARAMETER Experiment Name: At_Drought_Reproduction_P Parameter: Age (day) Value: 40
  misc_feature: MA Experiment 20001911 PARAMETER Experiment Name: At_Drought_Reproduction_P Parameter: Organism Value: A. thaliana
  misc_feature: MA Experiment 20001911 PARAMETER Experiment Name: At_Drought_Reproduction_P Parameter: Plant Line Value: WS
  misc_feature: MA Experiment 20001911 PARAMETER Experiment Name: At_Drought_Reproduction_P Parameter: Timepoint (day) Value: 10
  misc_feature: MA Experiment 20001911 PARAMETER Experiment Name: At_Drought_Reproduction_P Parameter: Tissue Value: Flowers
  misc_feature: MA Experiment 20001911 PARAMETER Experiment Name: At_Drought_Reproduction_P Parameter: Treatment Value: Drought vs. No Drought
aattactttagagatttcccaaattccgtctcgaagatgtcaacggagagacgtgcttcgtcgaatccaatgaccaacgaagagaacgctatgttccttgatatattgcatgaagcaccattatttggtcacaggaaatctagaagccttgttggaagttacctctatatgcttctattggcaggttatgctattttagctgctggtgctccttggatgtttcaccgagtccaacagttgaccccttcattgctctgctgctgcgatgttgcgcttttggttgtcacaggtgtctttcaacaatactttgtttatcaagtccagaaaatacgtctccagggttattacagtttcagtcaaaagttgaagcatgttgttcgtctgccatttgcaatcgctgcatatgggactgctgcaatgcttcttgtgatagtgtggaggcctcaaatccacattctttctatttcttctttgcaacggatcatcatgttggttgaagcagtgggcgctggctttttcatgggtttatacatcggttatgtgcaccaatacaattccgtgaattcccggccagatgtcttgaagtcattatattctcctcttcagccgtcaagttctatggaaggtttgaggtattatgaaggccggctttctgatcaacaaacggctttgttacaatatcaacgtgaaaatctccattttctaagcgaggagattctgtgcttgcaagagaaacttagcaaatatgaacaatctgatgatggaagcacacctcaggttgatctcgcacatcttttagctgctcgagatcaagagctgaggacactttcagctgagatgaatcagcttcagtctgagctacggcttgctcgttctttaatagccgagagagatgcagaggtgcagcgtgtcaacagtaccaacaaccagtatatcgaagaaaacgaaagactgagggcaattttgagtgaatggagcatgcgggcagcgaatcttgagagagctttggaagtggaacggatgtcgaactcagaactacagaaggaagtagcaagcacgcgtagaaagcagatgcttgagacaacaacgtctgagcaaccttaattctaatatgggaatcaaagcttatataggtttttaacataatctctaaagtttgatggtgtaactataaagatcatggaatgtgtctactgaaagaagtttgtgtagtaaacggctcttttgtttttt

SEQ ID NO: 36679 - protein, 367 aa, Arabidopsis thaliana
  peptide (1)..(367): Ceres Seq. ID no. 12336541
  misc_feature (238)..(359): Homolog of NCBI NO: 15242018 NR Description: putative protein; protein id: At5g20580.1
  misc_feature (211)..(314): Homolog of NCBI NO: 25411202 NR Description: hypothetical protein At2g06010 [imported] -
  misc_feature (140)..(367): Homolog of NCBI NO: 20453094 NR Description: At2g06010/F5K7.23 [Arabidopsis thaliana]
  misc_feature (13)..(367): Homolog of NCBI NO: 18396221 NR Description: Expressed protein
NYFRDFPNSVSKMSTERRASSNPMTNEENAMFLDILHEAPLFGHRKSRSLVGSYLYMLLLAGYAILAAGAPWMFHRVQQLTPSLLCCCDVALLVVTGVFQQYFVYQVQKIRLQGYYSFSQKLKHVVRLPFAIAAYGTAAMLLVIVWRPQIHILSISSLQRIIMLVEAVGAGFFMGLYIGYVHQYNSVNSRPDVLKSLYSPLQPSSSMEGLRYYEGRLSDQQTALLQYQRENLHFLSEEILCLQEKLSKYEQSDDGSTPQVDLAHLLAARDQELRTLSAEMNQLQSELRLARSLIAERDAEVQRVNSTNNQYIEENERLRAILSEWSMRAANLERALEVERMSNSELQKEVASTRRKQMLETTTSEQP

SEQ ID NO: 36680 - protein, 355 aa, Arabidopsis thaliana
  peptide (1)..(355): Ceres Seq. ID no. 12336542
  misc_feature (226)..(347): Homolog of NCBI NO: 15242018 NR Description: putative protein; protein id: At5g20580.1
  misc_feature (199)..(302): Homolog of NCBI NO: 25411202 NR Description: hypothetical protein At2g06010 [imported] -
  misc_feature (128)..(355): Homolog of NCBI NO: 20453094 NR Description: At2g06010/F5K7.23 [Arabidopsis thaliana]
  misc_feature (1)..(355): Homolog of NCBI NO: 18396221 NR Description: Expressed protein
MSTERRASSNPMTNEENAMFLDILHEAPLFGHRKSRSLVGSYLYMLLLAGYAILAAGAPWMFHRVQQLTPSLLCCCDVALLVVTGVFQQYFVYQVQKIRLQGYYSFSQKLKHVVRLPFAIAAYGTAAMLLVIVWRPQIHILSISSLQRIIMLVEAVGAGFFMGLYIGYVHQYNSVNSRPDVLKSLYSPLQPSSSMEGLRYYEGRLSDQQTALLQYQRENLHFLSEEILCLQEKLSKYEQSDDGSTPQVDLAHLLAARDQELRTLSAEMNQLQSELRLARSLIAERDAEVQRVNSTNNQYIEENERLRAILSEWSMRAANLERALEVERMSNSELQKEVASTRRKQMLETTTSEQP

SEQ ID NO: 36681 - protein, 344 aa, Arabidopsis thaliana
  peptide (1)..(344): Ceres Seq. ID no. 12336543
  misc_feature (215)..(336): Homolog of NCBI NO: 15242018 NR Description: putative protein; protein id: At5g20580.1
  misc_feature (188)..(291): Homolog of NCBI NO: 25411202 NR Description: hypothetical protein At2g06010 [imported] -
  misc_feature (117)..(344): Homolog of NCBI NO: 20453094 NR Description: At2g06010/F5K7.23 [Arabidopsis thaliana]
  misc_feature (1)..(344): Homolog of NCBI NO: 18396221 NR Description: Expressed protein
MTNEENAMFLDILHEAPLFGHRKSRSLVGSYLYMLLLAGYAILAAGAPWMFHRVQQLTPSLLCCCDVALLVVTGVFQQYFVYQVQKIRLQGYYSFSQKLKHVVRLPFAIAAYGTAAMLLVIVWRPQIHILSISSLQRIIMLVEAVGAGFFMGLYIGYVHQYNSVNSRPDVLKSLYSPLQPSSSMEGLRYYEGRLSDQQTALLQYQRENLHFLSEEILCLQEKLSKYEQSDDGSTPQVDLAHLLAARDQELRTLSAEMNQLQSELRLARSLIAERDAEVQRVNSTNNQYIEENERLRAILSEWSMRAANLERALEVERMSNSELQKEVASTRRKQMLETTTSEQP

SEQ ID NO: 36682 - DNA, 721 bp, Arabidopsis thaliana
  misc_feature (1)..(721): Ceres Seq. ID no. 13646117
  misc_feature: MA Experiment ID: 20000180 Result: Up-regulated in Transcription
  misc_feature: MA Experiment 20000180 PARAMETER Experiment Name: At_Germinating_Seeds_P Parameter: Age (hr) Value: 24 vs. 0
  misc_feature: MA Experiment 20000180 PARAMETER Experiment Name: At_Germinating_Seeds_P Parameter: Tissue Value: Germinating Seeds
  misc_feature: MA Experiment ID: 20000185 Result: Down-regulated in Transcription
  misc_feature: MA Experiment 20000185 PARAMETER Experiment Name: At_Roots__P Parameter: Age (day) Value: 7 vs. 21
  misc_feature: MA Experiment 20000185 PARAMETER Experiment Name: At_Roots__P Parameter: Organism Value: A. thaliana
  misc_feature: MA Experiment 20000185 PARAMETER Experiment Name: At_Roots__P Parameter: Tissue Value: Roots vs. Whole Plant
  misc_feature: MA Experiment ID: 20000264 Result: Down-regulated in Transcription
  misc_feature: MA Experiment 20000264 PARAMETER Experiment Name: At_Open_Flower_P Parameter: Age (day) Value: 21
  misc_feature: MA Experiment 20000264 PARAMETER Experiment Name: At_Open_Flower_P Parameter: Plant Line Value: WS
  misc_feature: MA Experiment 20000264 PARAMETER Experiment Name: At_Open_Flower_P Parameter: Tissue Value: Open Flower vs. Whole Plant
  misc_feature: MA Experiment ID: 20000286 Result: Down-regulated in Transcription
  misc_feature: MA Experiment 20000286 PARAMETER Experiment Name: At_Open_Flower_P Parameter: Age (day) Value: 21
  misc_feature: MA Experiment 20000286 PARAMETER Experiment Name: At_Open_Flower_P Parameter: Plant Line Value: WS
  misc_feature: MA Experiment 20000286 PARAMETER Experiment Name: At_Open_Flower_P Parameter: Tissue Value: Half Open vs. Whole Plant
  misc_feature: MA Experiment ID: 20000438 Result: Up-regulated in Transcription
  misc_feature: MA Experiment 20000438 PARAMETER Experiment Name: At_Shoots__P Parameter: Age (day) Value: 14
  misc_feature: MA Experiment 20000438 PARAMETER Experiment Name: At_Shoots__P Parameter: Tissue Value: Shoots vs. Whole Plant
  misc_feature: MA Experiment ID: 20000439 Result: Down-regulated in Transcription
  misc_feature: MA Experiment 20000439 PARAMETER Experiment Name: At_Roots__P Parameter: Age (day) Value: 14 vs. 21
  misc_feature: MA Experiment 20000439 PARAMETER Experiment Name: At_Roots__P Parameter: Organism Value: A. thaliana
  misc_feature: MA Experiment 20000439 PARAMETER Experiment Name: At_Roots__P Parameter: Tissue Value: Roots vs. Whole Plant
  misc_feature: MA Experiment ID: 20000794 Result: Down-regulated in Transcription
  misc_feature: MA Experiment 20000794 PARAMETER Experiment Name: At_Petals_P Parameter: Age (day) Value: 23-25 days
  misc_feature: MA Experiment 20000794 PARAMETER Experiment Name: At_Petals_P Parameter: Plant Line Value: WS
  misc_feature: MA Experiment 20000794 PARAMETER Experiment Name: At_Petals_P Parameter: Tissue Value: Petals vs. Whole plant
  misc_feature: MA Experiment ID: 20001451 Result: Down-regulated in Transcription
  misc_feature: MA Experiment 20001451 PARAMETER Experiment Name: At_Far-red-induction_P Parameter: Age (day) Value: 7
  misc_feature: MA Experiment 20001451 PARAMETER Experiment Name: At_Far-red-induction_P Parameter: Light Value: Far-red vs. White
  misc_feature: MA Experiment 20001451 PARAMETER Experiment Name: At_Far-red-induction_P Parameter: Organism Value: A. thaliana
  misc_feature: MA Experiment 20001451 PARAMETER Experiment Name: At_Far-red-induction_P Parameter: Plant Line Value: Columbia
  misc_feature: MA Experiment 20001451 PARAMETER Experiment Name: At_Far-red-induction_P Parameter: Timepoint (hr) Value: 24
  misc_feature: MA Experiment 20001451 PARAMETER Experiment Name: At_Far-red-induction_P Parameter: Tissue Value: Whole Plant
  misc_feature: MA Experiment ID: 20001557 Result: Down-regulated in Transcription
  misc_feature: MA Experiment 20001557 PARAMETER Experiment Name: At_Drought_Soil_Dry_P Parameter: Age (day) Value: 27
  misc_feature: MA Experiment 20001557 PARAMETER Experiment Name: At_Drought_Soil_Dry_P Parameter: Organism Value: A. thaliana
  misc_feature: MA Experiment 20001557 PARAMETER Experiment Name: At_Drought_Soil_Dry_P Parameter: Plant Line Value: WS
  misc_feature: MA Experiment 20001557 PARAMETER Experiment Name: At_Drought_Soil_Dry_P Parameter: Post Timepoint (hr) Value: 3
  misc_feature: MA Experiment 20001557 PARAMETER Experiment Name: At_Drought_Soil_Dry_P Parameter: Post-Treatment Value: Re-Water vs. No Drought
  misc_feature: MA Experiment 20001557 PARAMETER Experiment Name: At_Drought_Soil_Dry_P Parameter: Timepoint (day) Value: 13
  misc_feature: MA Experiment 20001557 PARAMETER Experiment Name: At_Drought_Soil_Dry_P Parameter: Treatment Value: Drought vs. No Drought
  misc_feature: MA Experiment ID: 20001757 Result: Up-regulated in Transcription
  misc_feature: MA Experiment 20001757 PARAMETER Experiment Name: At_50mM_NH4NO3_L-to-H_P Parameter: Timepoint (hr) Value: 6
  misc_feature: MA Experiment 20001757 PARAMETER Experiment Name: At_50mM_NH4NO3_L-to-H_P Parameter: Tissue Value: Leaf
  misc_feature: MA Experiment 20001757 PARAMETER Experiment Name: At_50mM_NH4NO3_L-to-H_P Parameter: Treatment Value: 50mM NH4NO3 vs 100mM Mannitol
  misc_feature: MA Experiment ID: 20001905 Result: Down-regulated in Transcription
  misc_feature: MA Experiment 20001905 PARAMETER Experiment Name: At_Drought_Reproduction_P Parameter: Age (day) Value: 40
  misc_feature: MA Experiment 20001905 PARAMETER Experiment Name: At_Drought_Reproduction_P Parameter: Organism Value: A. thaliana
  misc_feature: MA Experiment 20001905 PARAMETER Experiment Name: At_Drought_Reproduction_P Parameter: Plant Line Value: WS
  misc_feature: MA Experiment 20001905 PARAMETER Experiment Name: At_Drought_Reproduction_P Parameter: Timepoint (day) Value: 10
  misc_feature: MA Experiment 20001905 PARAMETER Experiment Name: At_Drought_Reproduction_P Parameter: Tissue Value: Rosettes
  misc_feature: MA Experiment 20001905 PARAMETER Experiment Name: At_Drought_Reproduction_P Parameter: Treatment Value: Drought vs. No Drought
  misc_feature: MA Experiment ID: 20001906 Result: Down-regulated in Transcription
  misc_feature: MA Experiment 20001906 PARAMETER Experiment Name: At_Drought_Reproduction_P Parameter: Age (day) Value: 35
  misc_feature: MA Experiment 20001906 PARAMETER Experiment Name: At_Drought_Reproduction_P Parameter: Organism Value: A. thaliana
  misc_feature: MA Experiment 20001906 PARAMETER Experiment Name: At_Drought_Reproduction_P Parameter: Plant Line Value: WS
  misc_feature: MA Experiment 20001906 PARAMETER Experiment Name: At_Drought_Reproduction_P Parameter: Timepoint (day) Value: 5
  misc_feature: MA Experiment 20001906 PARAMETER Experiment Name: At_Drought_Reproduction_P Parameter: Tissue Value: Siliques
  misc_feature: MA Experiment 20001906 PARAMETER Experiment Name: At_Drought_Reproduction_P Parameter: Treatment Value: Drought vs. No Drought
  misc_feature: MA Experiment ID: 20001908 Result: Down-regulated in Transcription
  misc_feature: MA Experiment 20001908 PARAMETER Experiment Name: At_Drought_Reproduction_P Parameter: Age (day) Value: 40
  misc_feature: MA Experiment 20001908 PARAMETER Experiment Name: At_Drought_Reproduction_P Parameter: Organism Value: A. thaliana
  misc_feature: MA Experiment 20001908 PARAMETER Experiment Name: At_Drought_Reproduction_P Parameter: Plant Line Value: WS
  misc_feature: MA Experiment 20001908 PARAMETER Experiment Name: At_Drought_Reproduction_P Parameter: Timepoint (day) Value: 10
  misc_feature: MA Experiment 20001908 PARAMETER Experiment Name: At_Drought_Reproduction_P Parameter: Tissue Value: Siliques
  misc_feature: MA Experiment 20001908 PARAMETER Experiment Name: At_Drought_Reproduction_P Parameter: Treatment Value: Drought vs. No Drought
acaacacaacttcagctttaagacagctaaaactaaatacaaagaaacagagatgggtttggttacagaggaggtgagagctaaggcagagatgtacaccggagatgagatatgtagagagaagacaaagtgtttcctcaaggaaatatctatgcccaatggtttattaccattgaaggatatagaagaggttgggtatgacagagagtcaggtgttgtatggctgaagcagaagaagagcatcactcacaagttcacagagatagataagcttgtctcctatggaaccgaagtcacagccattgttgagaccgggaaaatcaagaagctcactggagtcaaagccaaggaacttcttatttgggtcactatcaatgagatctataccgaggaaccccctaccaagatcacgttcaagacaccgaccacactgtccaggactttcccggtctcaacaatggctgtgacttcggttctattggacacatcgttgcttactacatcttggctacttccagcaatggatacgacccaagcttctttggatgattcttttcaatgtcaatctctcgtatatgtatatgtatatgtttgacttgtgttgcaagctatctaatctgttctctatctctgtttcttcttctgttgttgttgttgttgtctaagacttgtccctctttttgcaaatgttttatttctccatttacaaatattggtttgc

SEQ ID NO: 36683 - protein, 197 aa, Arabidopsis thaliana
  peptide (1)..(197): Ceres Seq. ID no. 13646118
  misc_feature (20)..(155): Pfam Name: Protein of unknown function, DUF538 Pfam Description: Protein of unknown function, DUF538
  misc_feature (23)..(155): Homolog of NCBI NO: 34915416 NR Description: hypothetical protein~similar to Arabidopsis
  misc_feature (23)..(155): Homolog of NCBI NO: 34915376 NR Description: hypothetical protein~similar to Oryza sativa
  misc_feature (23)..(155): Homolog of NCBI NO: 33146557 NR Description: unknown protein [Oryza sativa (japonica
  misc_feature (23)..(154): Homolog of NCBI NO: 34903866 NR Description: unnamed protein product [Oryza sativa (japonica
  misc_feature (23)..(155): Homolog of NCBI NO: 34915426 NR Description: hypothetical protein~similar to Arabidopsis
  misc_feature (23)..(155): Homolog of NCBI NO: 34915422 NR Description: hypothetical protein~similar to Arabidopsis
  misc_feature (23)..(155): Homolog of NCBI NO: 34915410 NR Description: hypothetical protein~similar to Arabidopsis
  misc_feature (23)..(172): Homolog of NCBI NO: 34915418 NR Description: hypothetical protein~similar to Arabidopsis
  misc_feature (18)..(158): Homolog of NCBI NO: 18405887 NR Description: expressed protein [Arabidopsis thaliana]
  misc_feature (18)..(155): Homolog of NCBI NO: 18391006 NR Description: expressed protein [Arabidopsis thaliana]
QHNFSFKTAKTKYKETEMGLVTEEVRAKAEMYTGDEICREKTKCFLKEISMPNGLLPLKDIEEVGYDRESGVVWLKQKKSITHKFTEIDKLVSYGTEVTAIVETGKIKKLTGVKAKELLIWVTINEIYTEEPPTKITFKTPTTLSRTFPVSTMAVTSVLLDTSLLTTSWLLPAMDTTQASLDDSFQCQSLVYVYVYV

SEQ ID NO: 36684 - protein, 180 aa, Arabidopsis thaliana
  peptide (1)..(180): Ceres Seq. ID no. 13646119
  misc_feature (3)..(138): Pfam Name: Protein of unknown function, DUF538 Pfam Description: Protein of unknown function, DUF538
  misc_feature (6)..(138): Homolog of NCBI NO: 34915416 NR Description: hypothetical protein~similar to Arabidopsis
  misc_feature (6)..(138): Homolog of NCBI NO: 34915376 NR Description: hypothetical protein~similar to Oryza sativa
  misc_feature (6)..(138): Homolog of NCBI NO: 33146557 NR Description: unknown protein [Oryza sativa (japonica
  misc_feature (6)..(137): Homolog of NCBI NO: 34903866 NR Description: unnamed protein product [Oryza sativa (japonica
  misc_feature (6)..(138): Homolog of NCBI NO: 34915426 NR Description: hypothetical protein~similar to Arabidopsis
  misc_feature (6)..(138): Homolog of NCBI NO: 34915422 NR Description: hypothetical protein~similar to Arabidopsis
  misc_feature (6)..(138): Homolog of NCBI NO: 34915410 NR Description: hypothetical protein~similar to Arabidopsis
  misc_feature (6)..(155): Homolog of NCBI NO: 34915418 NR Description: hypothetical protein~similar to Arabidopsis
  misc_feature (1)..(141): Homolog of NCBI NO: 18405887 NR Description: expressed protein [Arabidopsis thaliana]
  misc_feature (1)..(138): Homolog of NCBI NO: 18391006 NR Description: expressed protein [Arabidopsis thaliana]
MGLVTEEVRAKAEMYTGDEICREKTKCFLKEISMPNGLLPLKDIEEVGYDRESGVVWLKQKKSITHKFTEIDKLVSYGTEVTAIVETGKIKKLTGVKAKELLIWVTINEIYTEEPPTKITFKTPTTLSRTFPVSTMAVTSVLLDTSLLTTSWLLPAMDTTQASLDDSFQCQSLVYVYVYV

SEQ ID NO: 36685 - protein, 167 aa, Arabidopsis thaliana
  peptide (1)..(167): Ceres Seq. ID no. 13646120
  misc_feature (1)..(125): Pfam Name: Protein of unknown function, DUF538 Pfam Description: Protein of unknown function, DUF538
  misc_feature (1)..(125): Homolog of NCBI NO: 34915416 NR Description: hypothetical protein~similar to Arabidopsis
  misc_feature (1)..(125): Homolog of NCBI NO: 34915376 NR Description: hypothetical protein~similar to Oryza sativa
  misc_feature (1)..(125): Homolog of NCBI NO: 33146557 NR Description: unknown protein [Oryza sativa (japonica
  misc_feature (1)..(124): Homolog of NCBI NO: 34903866 NR Description: unnamed protein product [Oryza sativa (japonica
  misc_feature (1)..(125): Homolog of NCBI NO: 34915426 NR Description: hypothetical protein~similar to Arabidopsis
  misc_feature (1)..(125): Homolog of NCBI NO: 34915422 NR Description: hypothetical protein~similar to Arabidopsis
  misc_feature (1)..(125): Homolog of NCBI NO: 34915410 NR Description: hypothetical protein~similar to Arabidopsis
  misc_feature (1)..(142): Homolog of NCBI NO: 34915418 NR Description: hypothetical protein~similar to Arabidopsis
  misc_feature (1)..(128): Homolog of NCBI NO: 18405887 NR Description: expressed protein [Arabidopsis thaliana]
  misc_feature (1)..(125): Homolog of NCBI NO: 18391006 NR Description: expressed protein [Arabidopsis thaliana]
MYTGDEICREKTKCFLKEISMPNGLLPLKDIEEVGYDRESGVVWLKQKKSITHKFTEIDKLVSYGTEVTAIVETGKIKKLTGVKAKELLIWVTINEIYTEEPPTKITFKTPTTLSRTFPVSTMAVTSVLLDTSLLTTSWLLPAMDTTQASLDDSFQCQSLVYVYVYV

SEQ ID NO: 36686 - DNA, 1370 bp, Arabidopsis thaliana
  misc_feature (1)..(1370): Ceres Seq. ID no. 13491770
  misc_feature: MA Experiment ID: 108434 Result: Down-regulated in Transcription
  misc_feature: MA Experiment 108434 PARAMETER Experiment Name: At_Root_Tips_cDNA_P Parameter: Tissue Value: Root Tips
  misc_feature: MA Experiment ID: 108461 Result: Down-regulated in Transcription
  misc_feature: MA Experiment 108461 PARAMETER Experiment Name: At_Germinating_Seeds_cDNA_P Parameter: Age (day) Value: 1 vs. 0
  misc_feature: MA Experiment 108461 PARAMETER Experiment Name: At_Germinating_Seeds_cDNA_P Parameter: Tissue Value: Germinating Seeds
  misc_feature: MA Experiment ID: 108462 Result: Down-regulated in Transcription
  misc_feature: MA Experiment 108462 PARAMETER Experiment Name: At_Germinating_Seeds_cDNA_P Parameter: Age (day) Value: 2 vs. 0
  misc_feature: MA Experiment 108462 PARAMETER Experiment Name: At_Germinating_Seeds_cDNA_P Parameter: Tissue Value: Germinating Seeds
  misc_feature: MA Experiment ID: 108463 Result: Down-regulated in Transcription
  misc_feature: MA Experiment 108463 PARAMETER Experiment Name: At_Germinating_Seeds_cDNA_P Parameter: Age (day) Value: 3 vs. 0
  misc_feature: MA Experiment 108463 PARAMETER Experiment Name: At_Germinating_Seeds_cDNA_P Parameter: Tissue Value: Germinating Seeds
  misc_feature: MA Experiment ID: 108464 Result: Down-regulated in Transcription
  misc_feature: MA Experiment 108464 PARAMETER Experiment Name: At_Germinating_Seeds_cDNA_P Parameter: Age (day) Value: 4 vs. 0
  misc_feature: MA Experiment 108464 PARAMETER Experiment Name: At_Germinating_Seeds_cDNA_P Parameter: Tissue Value: Germinating Seeds
  misc_feature: MA Experiment ID: 108576 Result: Up-regulated in Transcription
  misc_feature: MA Experiment 108576 PARAMETER Experiment Name: At_42deg_Heat_cDNA_P Parameter: Temperature (deg C) Value: 42 vs. 22
  misc_feature: MA Experiment 108576 PARAMETER Experiment Name: At_42deg_Heat_cDNA_P Parameter: Timepoint (hr) Value: 1
  misc_feature: MA Experiment 108576 PARAMETER Experiment Name: At_42deg_Heat_cDNA_P Parameter: Tissue Value: Aerial
  misc_feature: MA Experiment ID: 20000111 Result: Up-regulated in Transcription
  misc_feature: MA Experiment 20000111 PARAMETER Experiment Name: At_42deg_Heat_cDNA_P Parameter: Temperature (deg C) Value: 42 vs. 22
  misc_feature: MA Experiment 20000111 PARAMETER Experiment Name: At_42deg_Heat_cDNA_P Parameter: Timepoint (hr) Value: 6
  misc_feature: MA Experiment 20000111 PARAMETER Experiment Name: At_42deg_Heat_cDNA_P Parameter: Tissue Value: Aerial
  misc_feature: MA Experiment ID: 20000180 Result: Down-regulated in Transcription
  misc_feature: MA Experiment 20000180 PARAMETER Experiment Name: At_Germinating_Seeds_P Parameter: Age (hr) Value: 24 vs. 0
  misc_feature: MA Experiment 20000180 PARAMETER Experiment Name: At_Germinating_Seeds_P Parameter: Tissue Value: Germinating Seeds
  misc_feature: MA Experiment ID: 20000264 Result: Up-regulated in Transcription
  misc_feature: MA Experiment 20000264 PARAMETER Experiment Name: At_Open_Flower_P Parameter: Age (day) Value: 21
  misc_feature: MA Experiment 20000264 PARAMETER Experiment Name: At_Open_Flower_P Parameter: Plant Line Value: WS
  misc_feature: MA Experiment 20000264 PARAMETER Experiment Name: At_Open_Flower_P Parameter: Tissue Value: Open Flower vs. Whole Plant
  misc_feature: MA Experiment ID: 20000527 Result: Down-regulated in Transcription
  misc_feature: MA Experiment 20000527 PARAMETER Experiment Name: At_10percent_PEG_P Parameter: Age (day) Value: 20
  misc_feature: MA Experiment 20000527 PARAMETER Experiment Name: At_10percent_PEG_P Parameter: Organism Value: A. thaliana
  misc_feature: MA Experiment 20000527 PARAMETER Experiment Name: At_10percent_PEG_P Parameter: Plant Line Value: WS
  misc_feature: MA Experiment 20000527 PARAMETER Experiment Name: At_10percent_PEG_P Parameter: Timepoint (day) Value: 20
  misc_feature: MA Experiment 20000527 PARAMETER Experiment Name: At_10percent_PEG_P Parameter: Tissue Value: Whole Plant
  misc_feature: MA Experiment 20000527 PARAMETER Experiment Name: At_10percent_PEG_P Parameter: Treatment Value: 10percent PEG vs. No Treatment
  misc_feature: MA Experiment ID: 20000794 Result: Up-regulated in Transcription
  misc_feature: MA Experiment 20000794 PARAMETER Experiment Name: At_Petals_P Parameter: Age (day) Value: 23-25 days
  misc_feature: MA Experiment 20000794 PARAMETER Experiment Name: At_Petals_P Parameter: Plant Line Value: WS
  misc_feature: MA Experiment 20000794 PARAMETER Experiment Name: At_Petals_P Parameter: Tissue Value: Petals vs. Whole plant
  misc_feature: MA Experiment ID: 20001557 Result: Up-regulated in Transcription
  misc_feature: MA Experiment 20001557 PARAMETER Experiment Name: At_Drought_Soil_Dry_P Parameter: Age (day) Value: 27
  misc_feature: MA Experiment 20001557 PARAMETER Experiment Name: At_Drought_Soil_Dry_P Parameter: Organism Value: A. thaliana
  misc_feature: MA Experiment 20001557 PARAMETER Experiment Name: At_Drought_Soil_Dry_P Parameter: Plant Line Value: WS
  misc_feature: MA Experiment 20001557 PARAMETER Experiment Name: At_Drought_Soil_Dry_P Parameter: Post Timepoint (hr) Value: 3
  misc_feature: MA Experiment 20001557 PARAMETER Experiment Name: At_Drought_Soil_Dry_P Parameter: Post-Treatment Value: Re-Water vs. No Drought
  misc_feature: MA Experiment 20001557 PARAMETER Experiment Name: At_Drought_Soil_Dry_P Parameter: Timepoint (day) Value: 13
  misc_feature: MA Experiment 20001557 PARAMETER Experiment Name: At_Drought_Soil_Dry_P Parameter: Treatment Value: Drought vs. No Drought
aattaaccgtcacgagctacatgctctgtatcttcagatttcctaaatacttacaattcccattccaattctgatttggttaatccaaaacaaaaaaaaaggaaactttcttttaccctaaatctataaaaacgaaacccttcttcacaaatctttgttcttcgtaatctctcttaaaagcttttgtttcaatttcaatggagtgggttcgaggagaaacaattgggttcggaaccttctctactgtcagtacagcgacaaagtctagaaactccggcgactttcctgcacttatcgctgtgaagtcgacgggttcttacggcgccgcttcactctccaacgagaaatcggtgttggattcactccgtgattgtcctgagatcatacggtgttacggcgaggattcaactgtggagaacggagaagagatgcataacttgttcttagagtacgcttcgagaggaagcttagcgaggtacatgaagaaacttggcggtgagggtttaccggagtccaccgtacgtcgctacacaggatcggtgcttcgagggttacgtcatattcacgctaaagggtttgcacactgcgatataaaactcgggaatattctgttattcaacgacggctctgttaaaattgccgattttggtttggcgatgagagttcacggagatttaacggcgttaagaaaaagtgaggagattagagggactccgttatacatggcaccggaatctgttaatgataatgagtatggatcagcggctgacgtgtgggctttaggatgtgctgtagttgagatgttgagtggcaaaacggcatggagtgttaaagaaggatcacacttcatgtcgcttttgatacgtatcggtgttggtgatgagttaccgaagattccagagatgttgtccgaagaaggcaaggatttcttgtcgaagtgttttgttaaagatcaagcgaaaagatggacggctgagatgcttttaaaccattcattcgtagccattgatcttgaagatgatcaccgagaagacttcgttgtgaaggttaaggaagaggataaagtattgatgtctccaaagtgtccctttgagtttgatgattgggattcttttacattggattcaaacccatcgttggattctccggtggagagacttgggagtttggttagtggttcgatccctgattggtctgtcggtgagagttgggtttcagtccggtgatgaaagtgatatgaaaacagaggaaaaacagagtgtttggaaggctaggttttttttagcacctagttagacccattctacgattcttgttcgtattctttaggtgtaattgatttgttaatacaattcattctagtgttcctc

SEQ ID NO: 36687 - protein, 342 aa, Arabidopsis thaliana
  peptide (1)..(342): Ceres Seq. ID no. 13491771
  misc_feature (3)..(268): Pfam Name: Protein kinase domain Pfam Description: Protein kinase domain
  misc_feature (1)..(342): Homolog of NCBI NO: 19423926 NR Description: unknown protein [Arabidopsis thaliana]
  misc_feature (1)..(342): Homolog of NCBI NO: 15236903 NR Description: protein kinase family [Arabidopsis thaliana]
  misc_feature (1)..(342): Homolog of NCBI NO: 15227689 NR Description: protein kinase family [Arabidopsis thaliana]
  misc_feature (1)..(269): Homolog of NCBI NO: 15222311 NR Description: protein kinase family [Arabidopsis thaliana]
  misc_feature (1)..(341): Homolog of NCBI NO: 34911472 NR Description: NPK1-related protein kinase-like protein
  misc_feature (1)..(341): Homolog of NCBI NO: 25407778 NR Description: MAP3K-like protein kinase [imported] -
  misc_feature (1)..(342): Homolog of NCBI NO: 17979279 NR Description: unknown protein [Arabidopsis thaliana]
  misc_feature (1)..(342): Homolog of NCBI NO: 15240194 NR Description: protein kinase family [Arabidopsis thaliana]
  misc_feature (1)..(342): Homolog of NCBI NO: 15229715 NR Description: protein kinase-related [Arabidopsis thaliana]
  misc_feature (1)..(342): Homolog of NCBI NO: 21554379 NR Description: protein kinase-like protein [Arabidopsis thaliana]
MEWVRGETIGFGTFSTVSTATKSRNSGDFPALIAVKSTGSYGAASLSNEKSVLDSLRDCPEIIRCYGEDSTVENGEEMHNLFLEYASRGSLARYMKKLGGEGLPESTVRRYTGSVLRGLRHIHAKGFAHCDIKLGNILLFNDGSVKIADFGLAMRVHGDLTALRKSEEIRGTPLYMAPESVNDNEYGSAADVWALGCAVVEMLSGKTAWSVKEGSHFMSLLIRIGVGDELPKIPEMLSEEGKDFLSKCFVKDQAKRWTAEMLLNHSFVAIDLEDDHREDFVVKVKEEDKVLMSPKCPFEFDDWDSFTLDSNPSLDSPVERLGSLVSGSIPDWSVGESWVSVR

SEQ ID NO: 36688 - protein, 265 aa, Arabidopsis thaliana
  peptide (1)..(265): Ceres Seq. ID no. 13491772
  misc_feature (1)..(191): Pfam Name: Protein kinase domain Pfam Description: Protein kinase domain
  misc_feature (1)..(265): Homolog of NCBI NO: 19423926 NR Description: unknown protein [Arabidopsis thaliana]
  misc_feature (1)..(265): Homolog of NCBI NO: 15236903 NR Description: protein kinase family [Arabidopsis thaliana]
  misc_feature (1)..(265): Homolog of NCBI NO: 15227689 NR Description: protein kinase family [Arabidopsis thaliana]
  misc_feature (1)..(192): Homolog of NCBI NO: 15222311 NR Description: protein kinase family [Arabidopsis thaliana]
  misc_feature (1)..(264): Homolog of NCBI NO: 34911472 NR Description: NPK1-related protein kinase-like protein
  misc_feature (1)..(264): Homolog of NCBI NO: 25407778 NR Description: MAP3K-like protein kinase [imported] -
  misc_feature (1)..(265): Homolog of NCBI NO: 17979279 NR Description: unknown protein [Arabidopsis thaliana]
  misc_feature (1)..(265): Homolog of NCBI NO: 15240194 NR Description: protein kinase family [Arabidopsis thaliana]
  misc_feature (1)..(265): Homolog of NCBI NO: 15229715 NR Description: protein kinase-related [Arabidopsis thaliana]
  misc_feature (1)..(265): Homolog of NCBI NO: 21554379 NR Description: protein kinase-like protein [Arabidopsis thaliana]
MHNLFLEYASRGSLARYMKKLGGEGLPESTVRRYTGSVLRGLRHIHAKGFAHCDIKLGNILLFNDGSVKIADFGLAMRVHGDLTALRKSEEIRGTPLYMAPESVNDNEYGSAADVWALGCAVVEMLSGKTAWSVKEGSHFMSLLIRIGVGDELPKIPEMLSEEGKDFLSKCFVKDQAKRWTAEMLLNHSFVAIDLEDDHREDFVVKVKEEDKVLMSPKCPFEFDDWDSFTLDSNPSLDSPVERLGSLVSGSIPDWSVGESWVSVR

SEQ ID NO: 36689 - protein, 248 aa, Arabidopsis thaliana
  peptide (1)..(248): Ceres Seq. ID no. 13491773
  misc_feature (1)..(174): Pfam Name: Protein kinase domain Pfam Description: Protein kinase domain
  misc_feature (1)..(248): Homolog of NCBI NO: 19423926 NR Description: unknown protein [Arabidopsis thaliana]
  misc_feature (1)..(248): Homolog of NCBI NO: 15236903 NR Description: protein kinase family [Arabidopsis thaliana]
  misc_feature (1)..(248): Homolog of NCBI NO: 15227689 NR Description: protein kinase family [Arabidopsis thaliana]
  misc_feature (1)..(175): Homolog of NCBI NO: 15222311 NR Description: protein kinase family [Arabidopsis thaliana]
  misc_feature (1)..(247): Homolog of NCBI NO: 34911472 NR Description: NPK1-related protein kinase-like protein
  misc_feature (1)..(247): Homolog of NCBI NO: 25407778 NR Description: MAP3K-like protein kinase [imported] -
  misc_feature (1)..(248): Homolog of NCBI NO: 17979279 NR Description: unknown protein [Arabidopsis thaliana]
  misc_feature (1)..(248): Homolog of NCBI NO: 15240194 NR Description: protein kinase family [Arabidopsis thaliana]
  misc_feature (1)..(248): Homolog of NCBI NO: 15229715 NR Description: protein kinase-related [Arabidopsis thaliana]
  misc_feature (1)..(248): Homolog of NCBI NO: 21554379 NR Description: protein kinase-like protein [Arabidopsis thaliana]
MKKLGGEGLPESTVRRYTGSVLRGLRHIHAKGFAHCDIKLGNILLFNDGSVKIADFGLAMRVHGDLTALRKSEEIRGTPLYMAPESVNDNEYGSAADVWALGCAVVEMLSGKTAWSVKEGSHFMSLLIRIGVGDELPKIPEMLSEEGKDFLSKCFVKDQAKRWTAEMLLNHSFVAIDLEDDHREDFVVKVKEEDKVLMSPKCPFEFDDWDSFTLDSNPSLDSPVERLGSLVSGSIPDWSVGESWVSVR

SEQ ID NO: 36690 - DNA, 1659 bp, Arabidopsis thaliana
  misc_feature (1)..(1659): Ceres Seq. ID no. 13491319
  misc_feature: MA Experiment ID: 108434 Result: Down-regulated in Transcription
  misc_feature: MA Experiment 108434 PARAMETER Experiment Name: At_Root_Tips_cDNA_P Parameter: Tissue Value: Root Tips
  misc_feature: MA Experiment ID: 108461 Result: Down-regulated in Transcription
  misc_feature: MA Experiment 108461 PARAMETER Experiment Name: At_Germinating_Seeds_cDNA_P Parameter: Age (day) Value: 1 vs. 0
  misc_feature: MA Experiment 108461 PARAMETER Experiment Name: At_Germinating_Seeds_cDNA_P Parameter: Tissue Value: Germinating Seeds
  misc_feature: MA Experiment ID: 108464 Result: Up-regulated in Transcription
  misc_feature: MA Experiment 108464 PARAMETER Experiment Name: At_Germinating_Seeds_cDNA_P Parameter: Age (day) Value: 4 vs. 0
  misc_feature: MA Experiment 108464 PARAMETER Experiment Name: At_Germinating_Seeds_cDNA_P Parameter: Tissue Value: Germinating Seeds
  misc_feature: MA Experiment ID: 108489 Result: Up-regulated in Transcription
  misc_feature: MA Experiment ID: 108501 Result: Down-regulated in Transcription
  misc_feature: MA Experiment 108501 PARAMETER Experiment Name: At_ap2_floral_buds_cDNA_P Parameter: Plant Line Value: ap2 (Ler.)
  misc_feature: MA Experiment 108501 PARAMETER Experiment Name: At_ap2_floral_buds_cDNA_P Parameter: Tissue Value: Closed Flower
  misc_feature: MA Experiment ID: 108573 Result: Up-regulated in Transcription
  misc_feature: MA Experiment 108573 PARAMETER Experiment Name: At_Drought_cDNA_P Parameter: Timepoint (hr) Value: 6
  misc_feature: MA Experiment 108573 PARAMETER Experiment Name: At_Drought_cDNA_P Parameter: Tissue Value: Aerial
  misc_feature: MA Experiment 108573 PARAMETER Experiment Name: At_Drought_cDNA_P Parameter: Treatment Value: Drought vs. No Drought
  misc_feature: MA Experiment ID: 108585 Result: Up-regulated in Transcription
  misc_feature: MA Experiment 108585 PARAMETER Experiment Name: At_5mM_NaNP_cDNA_P Parameter: Timepoint (hr) Value: 6
  misc_feature: MA Experiment 108585 PARAMETER Experiment Name: At_5mM_NaNP_cDNA_P Parameter: Tissue Value: Aerial
  misc_feature: MA Experiment 108585 PARAMETER Experiment Name: At_5mM_NaNP_cDNA_P Parameter: Treatment Value: null
  misc_feature: MA Experiment ID: 108594 Result: Down-regulated in Transcription
  misc_feature: MA Experiment 108594 PARAMETER Experiment Name: At_Ler-rhl_Root_cDNA_P Parameter: Plant Line Value: null
  misc_feature: MA Experiment ID: 108595 Result: Up-regulated in Transcription
  misc_feature: MA Experiment 108595 PARAMETER Experiment Name: At_Ler-pi_Ovule_cDNA_P Parameter: Plant Line Value: null
  misc_feature: MA Experiment ID: 108608 Result: Up-regulated in Transcription
  misc_feature: MA Experiment 108608 PARAMETER Experiment Name: At_100uM_ABA_cDNA_P Parameter: Timepoint (hr) Value: 1
  misc_feature: MA Experiment 108608 PARAMETER Experiment Name: At_100uM_ABA_cDNA_P Parameter: Tissue Value: Aerial
  misc_feature: MA Experiment 108608 PARAMETER Experiment Name: At_100uM_ABA_cDNA_P Parameter: Treatment Value: 100uM ABA vs. No Treatment
  misc_feature: MA Experiment ID: 108609 Result: Up-regulated in Transcription
  misc_feature: MA Experiment 108609 PARAMETER Experiment Name: At_100uM_ABA_cDNA_P Parameter: Timepoint (hr) Value: 24
  misc_feature: MA Experiment 108609 PARAMETER Experiment Name: At_100uM_ABA_cDNA_P Parameter: Tissue Value: Aerial
  misc_feature: MA Experiment 108609 PARAMETER Experiment Name: At_100uM_ABA_cDNA_P Parameter: Treatment Value: 100uM ABA vs. No Treatment
  misc_feature: MA Experiment ID: 108668 Result: Up-regulated in Transcription
  misc_feature: MA Experiment 108668 PARAMETER Experiment Name: At_2mM_SA_cDNA_P Parameter: Plant Line Value: WS
  misc_feature: MA Experiment 108668 PARAMETER Experiment Name: At_2mM_SA_cDNA_P Parameter: Timepoint (hr) Value: 6
  misc_feature: MA Experiment 108668 PARAMETER Experiment Name: At_2mM_SA_cDNA_P Parameter: Treatment Value: 2mM SA vs. No Treatment
  misc_feature: MA Experiment ID: 20000069 Result: Up-regulated in Transcription
  misc_feature: MA Experiment 20000069 PARAMETER Experiment Name: At_100uM_ABA_Mutants_cDNA_P Parameter: Plant Line Value: CS23
  misc_feature: MA Experiment 20000069 PARAMETER Experiment Name: At_100uM_ABA_Mutants_cDNA_P Parameter: Timepoint (hr) Value: 6
  misc_feature: MA Experiment 20000069 PARAMETER Experiment Name: At_100uM_ABA_Mutants_cDNA_P Parameter: Tissue Value: Aerial
  misc_feature: MA Experiment 20000069 PARAMETER Experiment Name: At_100uM_ABA_Mutants_cDNA_P Parameter: Treatment Value: 100uM ABA vs. No Treatment
  misc_feature: MA Experiment ID: 20000071 Result: Up-regulated in Transcription
  misc_feature: MA Experiment 20000071 PARAMETER Experiment Name: At_100uM_ABA_Mutants_cDNA_P Parameter: Plant Line Value: CS8104
  misc_feature: MA Experiment 20000071 PARAMETER Experiment Name: At_100uM_ABA_Mutants_cDNA_P Parameter: Timepoint (hr) Value: 6
  misc_feature: MA Experiment 20000071 PARAMETER Experiment Name: At_100uM_ABA_Mutants_cDNA_P Parameter: Tissue Value: Aerial
  misc_feature: MA Experiment 20000071 PARAMETER Experiment Name: At_100uM_ABA_Mutants_cDNA_P Parameter: Treatment Value: 100uM ABA vs. No Treatment
  misc_feature: MA Experiment ID: 20000072 Result: Up-regulated in Transcription
  misc_feature: MA Experiment 20000072 PARAMETER Experiment Name: At_100uM_ABA_Mutants_cDNA_P Parameter: Plant Line Value: CS8105
  misc_feature: MA Experiment 20000072 PARAMETER Experiment Name: At_100uM_ABA_Mutants_cDNA_P Parameter: Timepoint (hr) Value: 6
  misc_feature: MA Experiment 20000072 PARAMETER Experiment Name: At_100uM_ABA_Mutants_cDNA_P Parameter: Tissue Value: Aerial
  misc_feature: MA Experiment 20000072 PARAMETER Experiment Name: At_100uM_ABA_Mutants_cDNA_P Parameter: Treatment Value: 100uM ABA vs. No Treatment
  misc_feature: MA Experiment ID: 20000086 Result: Up-regulated in Transcription
  misc_feature: MA Experiment 20000086 PARAMETER Experiment Name: At_100uM_ABA_Mutants_cDNA_P Parameter: Plant Line Value: CS22
  misc_feature: MA Experiment 20000086 PARAMETER Experiment Name: At_100uM_ABA_Mutants_cDNA_P Parameter: Timepoint (hr) Value: 6
  misc_feature: MA Experiment 20000086 PARAMETER Experiment Name: At_100uM_ABA_Mutants_cDNA_P Parameter: Tissue Value: Aerial
  misc_feature: MA Experiment 20000086 PARAMETER Experiment Name: At_100uM_ABA_Mutants_cDNA_P Parameter: Treatment Value: 100uM ABA vs. No Treatment
  misc_feature: MA Experiment ID: 20000087 Result: Up-regulated in Transcription
  misc_feature: MA Experiment 20000087 PARAMETER Experiment Name: At_100uM_ABA_Mutants_cDNA_P Parameter: Plant Line Value: WS
  misc_feature: MA Experiment 20000087 PARAMETER Experiment Name: At_100uM_ABA_Mutants_cDNA_P Parameter: Timepoint (hr) Value: 6
  misc_feature: MA Experiment 20000087 PARAMETER Experiment Name: At_100uM_ABA_Mutants_cDNA_P Parameter: Tissue Value: Aerial
  misc_feature: MA Experiment 20000087 PARAMETER Experiment Name: At_100uM_ABA_Mutants_cDNA_P Parameter: Treatment Value: 100uM ABA vs. No Treatment
  misc_feature: MA Experiment ID: 20000088 Result: Up-regulated in Transcription
  misc_feature: MA Experiment 20000088 PARAMETER Experiment Name: At_100uM_ABA_Mutants_cDNA_P Parameter: Plant Line Value: Landsberg
  misc_feature: MA Experiment 20000088 PARAMETER Experiment Name: At_100uM_ABA_Mutants_cDNA_P Parameter: Timepoint (hr) Value: 6
  misc_feature: MA Experiment 20000088 PARAMETER Experiment Name: At_100uM_ABA_Mutants_cDNA_P Parameter: Tissue Value: Aerial
  misc_feature: MA Experiment 20000088 PARAMETER Experiment Name: At_100uM_ABA_Mutants_cDNA_P Parameter: Treatment Value: 100uM ABA vs. No Treatment
  misc_feature: MA Experiment ID: 20000117 Result: Up-regulated in Transcription
  misc_feature: MA Experiment 20000117 PARAMETER Experiment Name: At_100uM_ABA_Mutants_cDNA_P Parameter: Plant Line Value: Columbia
  misc_feature: MA Experiment 20000117 PARAMETER Experiment Name: At_100uM_ABA_Mutants_cDNA_P Parameter: Timepoint (hr) Value: 6
  misc_feature: MA Experiment 20000117 PARAMETER Experiment Name: At_100uM_ABA_Mutants_cDNA_P Parameter: Tissue Value: Aerial
  misc_feature: MA Experiment 20000117 PARAMETER Experiment Name: At_100uM_ABA_Mutants_cDNA_P Parameter: Treatment Value: 100uM ABA vs. No Treatment
  misc_feature: MA Experiment ID: 20000166 Result: Up-regulated in Transcription
  misc_feature: MA Experiment 20000166 PARAMETER Experiment Name: At_100uM_ABA_P Parameter: Age (day) Value: 14
  misc_feature: MA Experiment 20000166 PARAMETER Experiment Name: At_100uM_ABA_P Parameter: Organism Value: A. thaliana
  misc_feature: MA Experiment 20000166 PARAMETER Experiment Name: At_100uM_ABA_P Parameter: Plant Line Value: WS
  misc_feature: MA Experiment 20000166 PARAMETER Experiment Name: At_100uM_ABA_P Parameter: Timepoint (hr) Value: 1
  misc_feature: MA Experiment 20000166 PARAMETER Experiment Name: At_100uM_ABA_P Parameter: Tissue Value: Aerial
  misc_feature: MA Experiment 20000166 PARAMETER Experiment Name: At_100uM_ABA_P Parameter: Treatment Value: 100uM ABA vs. No Treatment
  misc_feature: MA Experiment ID: 20000180 Result: Down-regulated in Transcription
  misc_feature: MA Experiment 20000180 PARAMETER Experiment Name: At_Germinating_Seeds_P Parameter: Age (hr) Value: 24 vs. 0
  misc_feature: MA Experiment 20000180 PARAMETER Experiment Name: At_Germinating_Seeds_P Parameter: Tissue Value: Germinating Seeds
  misc_feature: MA Experiment ID: 20000182 Result: Up-regulated in Transcription
  misc_feature: MA Experiment 20000182 PARAMETER Experiment Name: At_2mM_SA_P Parameter: Age (day) Value: 14
  misc_feature: MA Experiment 20000182 PARAMETER Experiment Name: At_2mM_SA_P Parameter: Organism Value: A. thaliana
  misc_feature: MA Experiment 20000182 PARAMETER Experiment Name: At_2mM_SA_P Parameter: Plant Line Value: WS
  misc_feature: MA Experiment 20000182 PARAMETER Experiment Name: At_2mM_SA_P Parameter: Timepoint (hr) Value: 6
  misc_feature: MA Experiment 20000182 PARAMETER Experiment Name: At_2mM_SA_P Parameter: Tissue Value: Aerial
  misc_feature: MA Experiment 20000182 PARAMETER Experiment Name: At_2mM_SA_P Parameter: Treatment Value: 2mM SA vs. No Treatment
  misc_feature: MA Experiment ID: 20000184 Result: Down-regulated in Transcription
  misc_feature: MA Experiment 20000184 PARAMETER Experiment Name: At_Shoots__P Parameter: Age (day) Value: 7
  misc_feature: MA Experiment 20000184 PARAMETER Experiment Name: At_Shoots__P Parameter: Tissue Value: Shoots vs. Whole Plant
  misc_feature: MA Experiment ID: 20000185 Result: Down-regulated in Transcription
  misc_feature: MA Experiment 20000185 PARAMETER Experiment Name: At_Roots__P Parameter: Age (day) Value: 7 vs. 21
  misc_feature: MA Experiment 20000185 PARAMETER Experiment Name: At_Roots__P Parameter: Organism Value: A. thaliana
  misc_feature: MA Experiment 20000185 PARAMETER Experiment Name: At_Roots__P Parameter: Tissue Value: Roots vs. Whole Plant
  misc_feature: MA Experiment ID: 20000234 Result: Down-regulated in Transcription
  misc_feature: MA Experiment 20000234 PARAMETER Experiment Name: At_Siliques_P Parameter: Age (day) Value: 21
  misc_feature: MA Experiment 20000234 PARAMETER Experiment Name: At_Siliques_P Parameter: Organism Value: A. thaliana
  misc_feature: MA Experiment 20000234 PARAMETER Experiment Name: At_Siliques_P Parameter: Plant Line Value: WS
  misc_feature: MA Experiment 20000234 PARAMETER Experiment Name: At_Siliques_P Parameter: Tissue Value: Less Than 5mm Siliques vs. Whole Plant
  misc_feature: MA Experiment ID: 20000235 Result: Down-regulated in Transcription
  misc_feature: MA Experiment 20000235 PARAMETER Experiment Name: At_Siliques_P Parameter: Age (day) Value: 21
  misc_feature: MA Experiment 20000235 PARAMETER Experiment Name: At_Siliques_P Parameter: Organism Value: A. thaliana
  misc_feature: MA Experiment 20000235 PARAMETER Experiment Name: At_Siliques_P Parameter: Plant Line Value: WS
  misc_feature: MA Experiment 20000235 PARAMETER Experiment Name: At_Siliques_P Parameter: Tissue Value: 5-10mm Siliques vs. Whole Plant
  misc_feature: MA Experiment ID: 20000264 Result: Down-regulated in Transcription
  misc_feature: MA Experiment 20000264 PARAMETER Experiment Name: At_Open_Flower_P Parameter: Age (day) Value: 21
  misc_feature: MA Experiment 20000264 PARAMETER Experiment Name: At_Open_Flower_P Parameter: Plant Line Value: WS
  misc_feature: MA Experiment 20000264 PARAMETER Experiment Name: At_Open_Flower_P Parameter: Tissue Value: Open Flower vs. Whole Plant
  misc_feature: MA Experiment ID: 20000265 Result: Down-regulated in Transcription
  misc_feature: MA Experiment 20000265 PARAMETER Experiment Name: At_Open_Flower_P Parameter: Age (day) Value: 21
  misc_feature: MA Experiment 20000265 PARAMETER Experiment Name: At_Open_Flower_P Parameter: Plant Line Value: WS
  misc_feature: MA Experiment 20000265 PARAMETER Experiment Name: At_Open_Flower_P Parameter: Tissue Value: Closed Flower vs. Whole Plant
  misc_feature: MA Experiment ID: 20000286 Result: Down-regulated in Transcription
  misc_feature: MA Experiment 20000286 PARAMETER Experiment Name: At_Open_Flower_P Parameter: Age (day) Value: 21
  misc_feature: MA Experiment 20000286 PARAMETER Experiment Name: At_Open_Flower_P Parameter: Plant Line Value: WS
  misc_feature: MA Experiment 20000286 PARAMETER Experiment Name: At_Open_Flower_P Parameter: Tissue Value: Half Open vs. Whole Plant
  misc_feature: MA Experiment ID: 20000288 Result: Up-regulated in Transcription
  misc_feature: MA Experiment 20000288 PARAMETER Experiment Name: At_Drought_P Parameter: Age (day) Value: 7
  misc_feature: MA Experiment 20000288 PARAMETER Experiment Name: At_Drought_P Parameter: Organism Value: A. thaliana
  misc_feature: MA Experiment 20000288 PARAMETER Experiment Name: At_Drought_P Parameter: Plant Line Value: WS
  misc_feature: MA Experiment 20000288 PARAMETER Experiment Name: At_Drought_P Parameter: Timepoint (hr) Value: 1
  misc_feature: MA Experiment 20000288 PARAMETER Experiment Name: At_Drought_P Parameter: Tissue Value: Whole Plant
  misc_feature: MA Experiment 20000288 PARAMETER Experiment Name: At_Drought_P Parameter: Treatment Value: Drought vs. No Drought
  misc_feature: MA Experiment ID: 20000308 Result: Up-regulated in Transcription
  misc_feature: MA Experiment 20000308 PARAMETER Experiment Name: At_100mM_NaCl__P Parameter: Age (day) Value: 17
  misc_feature: MA Experiment 20000308 PARAMETER Experiment Name: At_100mM_NaCl__P Parameter: Organism Value: A. thaliana
  misc_feature: MA Experiment 20000308 PARAMETER Experiment Name: At_100mM_NaCl__P Parameter: Plant Line Value: WS
  misc_feature: MA Experiment 20000308 PARAMETER Experiment Name: At_100mM_NaCl__P Parameter: Timepoint (hr) Value: 72
  misc_feature: MA Experiment 20000308 PARAMETER Experiment Name: At_100mM_NaCl__P Parameter: Tissue Value: Whole Plant
  misc_feature: MA Experiment 20000308 PARAMETER Experiment Name: At_100mM_NaCl__P Parameter: Treatment Value: 100mM NaCl vs. No Treatment
  misc_feature: MA Experiment ID: 20000436 Result: Up-regulated in Transcription
  misc_feature: MA Experiment 20000436 PARAMETER Experiment Name: At_Drought_P Parameter: Age (day) Value: 7
  misc_feature: MA Experiment 20000436 PARAMETER Experiment Name: At_Drought_P Parameter: Organism Value: A. thaliana
  misc_feature: MA Experiment 20000436 PARAMETER Experiment Name: At_Drought_P Parameter: Plant Line Value: WS
  misc_feature: MA Experiment 20000436 PARAMETER Experiment Name: At_Drought_P Parameter: Timepoint (hr) Value: 12
  misc_feature: MA Experiment 20000436 PARAMETER Experiment Name: At_Drought_P Parameter: Tissue Value: Whole Plant
  misc_feature: MA Experiment 20000436 PARAMETER Experiment Name: At_Drought_P Parameter: Treatment Value: Drought vs. No Drought
  misc_feature: MA Experiment ID: 20000437 Result: Up-regulated in Transcription
  misc_feature: MA Experiment 20000437 PARAMETER Experiment Name: At_Drought_P Parameter: Age (day) Value: 8
  misc_feature: MA Experiment 20000437 PARAMETER Experiment Name: At_Drought_P Parameter: Organism Value: A. thaliana
  misc_feature: MA Experiment 20000437 PARAMETER Experiment Name: At_Drought_P Parameter: Plant Line Value: WS
  misc_feature: MA Experiment 20000437 PARAMETER Experiment Name: At_Drought_P Parameter: Timepoint (hr) Value: 24
  misc_feature: MA Experiment 20000437 PARAMETER Experiment Name: At_Drought_P Parameter: Tissue Value: Whole Plant
  misc_feature: MA Experiment 20000437 PARAMETER Experiment Name: At_Drought_P Parameter: Treatment Value: Drought vs. No Drought
  misc_feature: MA Experiment ID: 20000438 Result: Down-regulated in Transcription
  misc_feature: MA Experiment 20000438 PARAMETER Experiment Name: At_Shoots__P Parameter: Age (day) Value: 14
  misc_feature: MA Experiment 20000438 PARAMETER Experiment Name: At_Shoots__P Parameter: Tissue Value: Shoots vs. Whole Plant
  misc_feature: MA Experiment ID: 20000439 Result: Down-regulated in Transcription
  misc_feature: MA Experiment 20000439 PARAMETER Experiment Name: At_Roots__P Parameter: Age (day) Value: 14 vs. 21
  misc_feature: MA Experiment 20000439 PARAMETER Experiment Name: At_Roots__P Parameter: Organism Value: A. thaliana
  misc_feature: MA Experiment 20000439 PARAMETER Experiment Name: At_Roots__P Parameter: Tissue Value: Roots vs. Whole Plant
  misc_feature: MA Experiment ID: 20000445 Result: Up-regulated in Transcription
  misc_feature: MA Experiment 20000445 PARAMETER Experiment Name: At_100uM_NAA__P Parameter: Age (day) Value: 14
  misc_feature: MA Experiment 20000445 PARAMETER Experiment Name: At_100uM_NAA__P Parameter: Organism Value: A. thaliana
  misc_feature: MA Experiment 20000445 PARAMETER Experiment Name: At_100uM_NAA__P Parameter: Plant Line Value: WS
  misc_feature: MA Experiment 20000445 PARAMETER Experiment Name: At_100uM_NAA__P Parameter: Timepoint (hr) Value: 6
  misc_feature: MA Experiment 20000445 PARAMETER Experiment Name: At_100uM_NAA__P Parameter: Tissue Value: Aerial
  misc_feature: MA Experiment 20000445 PARAMETER Experiment Name: At_100uM_NAA__P Parameter: Treatment Value: 100uM NAA vs. No Treatment
  misc_feature: MA Experiment ID: 20000451 Result: Up-regulated in Transcription
  misc_feature: MA Experiment 20000451 PARAMETER Experiment Name: At_CS6879_Shoots-Roots_P Parameter: Age (day) Value: 14
  misc_feature: MA Experiment 20000451 PARAMETER Experiment Name: At_CS6879_Shoots-Roots_P Parameter: Organism Value: A. thaliana
  misc_feature: MA Experiment 20000451 PARAMETER Experiment Name: At_CS6879_Shoots-Roots_P Parameter: Plant Line Value: CS6879 vs. WS
  misc_feature: MA Experiment 20000451 PARAMETER Experiment Name: At_CS6879_Shoots-Roots_P Parameter: Tissue Value: Roots
  misc_feature: MA Experiment ID: 20000453 Result: Up-regulated in Transcription
  misc_feature: MA Experiment 20000453 PARAMETER Experiment Name: At_100uM_ABA_P Parameter: Age (day) Value: 15
  misc_feature: MA Experiment 20000453 PARAMETER Experiment Name: At_100uM_ABA_P Parameter: Organism Value: A. thaliana
  misc_feature: MA Experiment 20000453 PARAMETER Experiment Name: At_100uM_ABA_P Parameter: Plant Line Value: WS
  misc_feature: MA Experiment 20000453 PARAMETER Experiment Name: At_100uM_ABA_P Parameter: Timepoint (hr) Value: 24
  misc_feature: MA Experiment 20000453 PARAMETER Experiment Name: At_100uM_ABA_P Parameter: Tissue Value: Aerial
  misc_feature: MA Experiment 20000453 PARAMETER Experiment Name: At_100uM_ABA_P Parameter: Treatment Value: 100uM ABA vs. No Treatment
  misc_feature: MA Experiment ID: 20000456 Result: Up-regulated in Transcription
  misc_feature: MA Experiment 20000456 PARAMETER Experiment Name: At_100uM_BA_P Parameter: Age (day) Value: 14
  misc_feature: MA Experiment 20000456 PARAMETER Experiment Name: At_100uM_BA_P Parameter: Organism Value: A. thaliana
  misc_feature: MA Experiment 20000456 PARAMETER Experiment Name: At_100uM_BA_P Parameter: Plant Line Value: WS
  misc_feature: MA Experiment 20000456 PARAMETER Experiment Name: At_100uM_BA_P Parameter: Timepoint (hr) Value: 6
  misc_feature: MA Experiment 20000456 PARAMETER Experiment Name: At_100uM_BA_P Parameter: Tissue Value: Aerial
  misc_feature: MA Experiment 20000456 PARAMETER Experiment Name: At_100uM_BA_P Parameter: Treatment Value: 100uM BA vs. No Treatment
  misc_feature: MA Experiment ID: 20000573 Result: Up-regulated in Transcription
  misc_feature: MA Experiment 20000573 PARAMETER Experiment Name: At_100uM_ABA_Mutants__P Parameter: Organism Value: A. thaliana
  misc_feature: MA Experiment 20000573 PARAMETER Experiment Name: At_100uM_ABA_Mutants__P Parameter: Plant Line Value: CS22 vs. Ler wt
  misc_feature: MA Experiment 20000573 PARAMETER Experiment Name: At_100uM_ABA_Mutants__P Parameter: Timepoint (hr) Value: N/A
  misc_feature: MA Experiment 20000573 PARAMETER Experiment Name: At_100uM_ABA_Mutants__P Parameter: Tissue Value: Whole Plant
  misc_feature: MA Experiment 20000573 PARAMETER Experiment Name: At_100uM_ABA_Mutants__P Parameter: Treatment Value: None
  misc_feature: MA Experiment ID: 20000574 Result: Up-regulated in Transcription
  misc_feature: MA Experiment 20000574 PARAMETER Experiment Name: At_100uM_ABA_Mutants__P Parameter: Organism Value: A. thaliana
  misc_feature: MA Experiment 20000574 PARAMETER Experiment Name: At_100uM_ABA_Mutants__P Parameter: Plant Line Value: CS23 vs. Ler wt
  misc_feature: MA Experiment 20000574 PARAMETER Experiment Name: At_100uM_ABA_Mutants__P Parameter: Timepoint (hr) Value: N/A
  misc_feature: MA Experiment 20000574 PARAMETER Experiment Name: At_100uM_ABA_Mutants__P Parameter: Tissue Value: Whole Plant
  misc_feature: MA Experiment 20000574 PARAMETER Experiment Name: At_100uM_ABA_Mutants__P Parameter: Treatment Value: None
  misc_feature: MA Experiment ID: 20000709 Result: Up-regulated in Transcription
  misc_feature: MA Experiment 20000709 PARAMETER Experiment Name: At_15mM_NH4NO3_L-to-H_P Parameter: Age (hr) Value: 14
  misc_feature: MA Experiment 20000709 PARAMETER Experiment Name: At_15mM_NH4NO3_L-to-H_P Parameter: Organism Value: A. thaliana
  misc_feature: MA Experiment 20000709 PARAMETER Experiment Name: At_15mM_NH4NO3_L-to-H_P Parameter: Plant Line Value: WS
  misc_feature: MA Experiment 20000709 PARAMETER Experiment Name: At_15mM_NH4NO3_L-to-H_P Parameter: Timepoint (hr) Value: 4
  misc_feature: MA Experiment 20000709 PARAMETER Experiment Name: At_15mM_NH4NO3_L-to-H_P Parameter: Tissue Value: Aerial
  misc_feature: MA Experiment 20000709 PARAMETER Experiment Name: At_15mM_NH4NO3_L-to-H_P Parameter: Treatment Value: 15mM NH4NO3 vs. 30mM Mannitol
  misc_feature: MA Experiment ID: 20000794 Result: Down-regulated in Transcription
  misc_feature: MA Experiment 20000794 PARAMETER Experiment Name: At_Petals_P Parameter: Age (day) Value: 23-25 days
  misc_feature: MA Experiment 20000794 PARAMETER Experiment Name: At_Petals_P Parameter: Plant Line Value: WS
  misc_feature: MA Experiment 20000794 PARAMETER Experiment Name: At_Petals_P Parameter: Tissue Value: Petals vs. Whole plant
  misc_feature: MA Experiment ID: 20001248 Result: Up-regulated in Transcription
  misc_feature: MA Experiment 20001248 PARAMETER Experiment Name: At_Far-red-induction_P Parameter: Age (day) Value: 7
  misc_feature: MA Experiment 20001248 PARAMETER Experiment Name: At_Far-red-induction_P Parameter: Light Value: Far-red vs. White
  misc_feature: MA Experiment 20001248 PARAMETER Experiment Name: At_Far-red-induction_P Parameter: Organism Value: A. thaliana
  misc_feature: MA Experiment 20001248 PARAMETER Experiment Name: At_Far-red-induction_P Parameter: Plant Line Value: Columbia
  misc_feature: MA Experiment 20001248 PARAMETER Experiment Name: At_Far-red-induction_P Parameter: Timepoint (hr) Value: 4
  misc_feature: MA Experiment 20001248 PARAMETER Experiment Name: At_Far-red-induction_P Parameter: Tissue Value: Whole Plant
  misc_feature: MA Experiment ID: 20001557 Result: Up-regulated in Transcription
  misc_feature: MA Experiment 20001557 PARAMETER Experiment Name: At_Drought_Soil_Dry_P Parameter: Age (day) Value: 27
  misc_feature: MA Experiment 20001557 PARAMETER Experiment Name: At_Drought_Soil_Dry_P Parameter: Organism Value: A. thaliana
  misc_feature: MA Experiment 20001557 PARAMETER Experiment Name: At_Drought_Soil_Dry_P Parameter: Plant Line Value: WS
  misc_feature: MA Experiment 20001557 PARAMETER Experiment Name: At_Drought_Soil_Dry_P Parameter: Post Timepoint (hr) Value: 3
  misc_feature: MA Experiment 20001557 PARAMETER Experiment Name: At_Drought_Soil_Dry_P Parameter: Post-Treatment Value: Re-Water vs. No Drought
  misc_feature: MA Experiment 20001557 PARAMETER Experiment Name: At_Drought_Soil_Dry_P Parameter: Timepoint (day) Value: 13
  misc_feature: MA Experiment 20001557 PARAMETER Experiment Name: At_Drought_Soil_Dry_P Parameter: Treatment Value: Drought vs. No Drought
  misc_feature: MA Experiment ID: 20001772 Result: Down-regulated in Transcription
  misc_feature: MA Experiment 20001772 PARAMETER Experiment Name: At_Far-red-enriched-adult_P Parameter: Age (day) Value: 29
  misc_feature: MA Experiment 20001772 PARAMETER Experiment Name: At_Far-red-enriched-adult_P Parameter: Light Value: Far-red enriched vs. White
  misc_feature: MA Experiment 20001772 PARAMETER Experiment Name: At_Far-red-enriched-adult_P Parameter: Organism Value: A. thaliana
  misc_feature: MA Experiment 20001772 PARAMETER Experiment Name: At_Far-red-enriched-adult_P Parameter: Plant Line Value: Columbia
  misc_feature: MA Experiment 20001772 PARAMETER Experiment Name: At_Far-red-enriched-adult_P Parameter: Timepoint (hr) Value: 24
  misc_feature: MA Experiment 20001772 PARAMETER Experiment Name: At_Far-red-enriched-adult_P Parameter: Tissue Value: Aerial
  misc_feature: MA Experiment ID: 20001773 Result: Down-regulated in Transcription
  misc_feature: MA Experiment 20001773 PARAMETER Experiment Name: At_Far-red-enriched-adult_P Parameter: Age (day) Value: 30
  misc_feature: MA Experiment 20001773 PARAMETER Experiment Name: At_Far-red-enriched-adult_P Parameter: Light Value: Far-red enriched vs. White
  misc_feature: MA Experiment 20001773 PARAMETER Experiment Name: At_Far-red-enriched-adult_P Parameter: Organism Value: A. thaliana
  misc_feature: MA Experiment 20001773 PARAMETER Experiment Name: At_Far-red-enriched-adult_P Parameter: Plant Line Value: Columbia
  misc_feature: MA Experiment 20001773 PARAMETER Experiment Name: At_Far-red-enriched-adult_P Parameter: Timepoint (hr) Value: 48
  misc_feature: MA Experiment 20001773 PARAMETER Experiment Name: At_Far-red-enriched-adult_P Parameter: Tissue Value: Aerial
ttcactcaccaaaatagatctaaaacatggaaaccaaaaccctaattttctcaattctcttcgttgttctctctctcatttacttaattggaaaactcaagcgaaagccaaatctacctccgagtccggcatggtcattaccggtgattggtcatctccgccttctcaaaccaccgattcatcgcacattcctctccctctctcaatccctaaacaatgctccgatcttctccctccgactcggtaaccgactcgttttcgtgaactcgtcacactcgatcgccgaggaatgtttcaccaaaaacgacgtcgtactggcgaacagaccaaacttcatcctcgctaaacacgttgcgtacgattacacaaccatgatcgcagcttcctacggtgaccactggcgtaacctccgccgcatcggctccgtcgagatattctccaatcaccgtctcaatagctttttgtctattcgtaaagacgagatccgacgacttgtgtttcgtctttctcggaacttttcacaagagtttgtgaaagtggatatgaaatcaatgttatctgacttaacattcaacaacattttaagaatggtggccggaaaacgttactacggagacggtgttgaggatgatccggaggctaaacgtgtccggcagcttatagcggatgtggtggcttgtgctggtgctggaaacgctgttgattacttaccggttttgcggttggtttcagattacgagacacgggttaagaagttggcgggtaggctcgacgagttcttgcaaggattggttgatgagaaacgagaagctaaggagaaaggaaacactatgatcgatcacttgcttactctgcaagaatcccaaccggattacttcacggatcgtatcattaaaggaaacatgctcgctttgatactagcagggaccgacacatcagcggttacgttagaatgggcattgtcgaacgtgttgaaccatccggatgtattgaacaaggcgagagatgaaatcgatagaaagataggtttagacaggcttatggatgaatcagatatctcaaacctgccttatctccaaaacattgtgtctgaaacgttgcgcctttatcctgcggctcccatgcttcttcctcacgttgcctcggaagattgtaaagttgcaggatacgatatgccgcgtggcacgatactattgaccaatgtgtgggctatacacagagatcctcagctatgggatgatccaatgagcttcaagccagagaggtttgagaaagaaggagaagctcagaagctaatgccgtttgggttaggaagaagggcgtgtcctggttctggactggctcatcggcttataaacctgactcttggatcattgattcagtgtttggaatgggagaagattggagaagaagtggatatgagtgaaggcaaaggtgttacaatgcctaaagccaagcctttggaagccatgtgcagagcacgtccctctgttgttaaaatcttcaacgagtccgtttgacgtttagacttttggtaatggctatgtatacattagataactagttatgtttgtatgttttctttttttttggtgaaaatattatgtttgtatgttatatgagaatattttaccaatattcctagatgatattttgggc

SEQ ID NO: 36691 - protein, 497 aa, Arabidopsis thaliana
  peptide (1)..(497): Ceres Seq. ID no. 13491320
  misc_feature (7)..(494): Homolog of NCBI NO: 30692923 NR Description: cytochrome P450 91A1 [Arabidopsis thaliana]
  misc_feature (6)..(492): Homolog of NCBI NO: 15235533 NR Description: cytochrome P450 family [Arabidopsis thaliana]
  misc_feature (1)..(496): Homolog of NCBI NO: 15228472 NR Description: cytochrome P450 family [Arabidopsis thaliana]
  misc_feature (3)..(491): Homolog of NCBI NO: 15235517 NR Description: cytochrome P450 family [Arabidopsis thaliana]
  misc_feature (2)..(101): Homolog of NCBI NO: 25282574 NR Description: probable cytochrome P450 F28G11.4
  misc_feature (97)..(496): Homolog of NCBI NO: 25282574 NR Description: probable cytochrome P450 F28G11.4
  misc_feature (1)..(496): Homolog of NCBI NO: 15235534 NR Description: cytochrome P450 family [Arabidopsis thaliana]
  misc_feature (1)..(496): Homolog of NCBI NO: 15235535 NR Description: cytochrome P450 family [Arabidopsis thaliana]
  misc_feature (1)..(494): Homolog of NCBI NO: 21554381 NR Description: cytochrome P450-like protein [Arabidopsis
  misc_feature (1)..(497): Homolog of NCBI NO: 15235536 NR Description: cytochrome P450, putative [Arabidopsis thaliana]
METKTLIFSILFVVLSLIYLIGKLKRKPNLPPSPAWSLPVIGHLRLLKPPIHRTFLSLSQSLNNAPIFSLRLGNRLVFVNSSHSIAEECFTKNDVVLANRPNFILAKHVAYDYTTMIAASYGDHWRNLRRIGSVEIFSNHRLNSFLSIRKDEIRRLVFRLSRNFSQEFVKVDMKSMLSDLTFNNILRMVAGKRYYGDGVEDDPEAKRVRQLIADVVACAGAGNAVDYLPVLRLVSDYETRVKKLAGRLDEFLQGLVDEKREAKEKGNTMIDHLLTLQESQPDYFTDRIIKGNMLALILAGTDTSAVTLEWALSNVLNHPDVLNKARDEIDRKIGLDRLMDESDISNLPYLQNIVSETLRLYPAAPMLLPHVASEDCKVAGYDMPRGTILLTNVWAIHRDPQLWDDPMSFKPERFEKEGEAQKLMPFGLGRRACPGSGLAHRLINLTLGSLIQCLEWEKIGEEVDMSEGKGVTMPKAKPLEAMCRARPSVVKIFNESV

SEQ ID NO: 36692 - protein, 382 aa, Arabidopsis thaliana
  peptide (1)..(382): Ceres Seq. ID no. 13491321
  misc_feature (1)..(379): Homolog of NCBI NO: 25282604 NR Description: cytochrome P450 monooxygenase
  misc_feature (1)..(379): Homolog of NCBI NO: 30692923 NR Description: cytochrome P450 91A1 [Arabidopsis thaliana]
  misc_feature (1)..(377): Homolog of NCBI NO: 15235533 NR Description: cytochrome P450 family [Arabidopsis thaliana]
  misc_feature (1)..(381): Homolog of NCBI NO: 15228472 NR Description: cytochrome P450 family [Arabidopsis thaliana]
  misc_feature (1)..(376): Homolog of NCBI NO: 15235517 NR Description: cytochrome P450 family [Arabidopsis thaliana]
  misc_feature (1)..(381): Homolog of NCBI NO: 25282574 NR Description: probable cytochrome P450 F28G11.4
  misc_feature (1)..(381): Homolog of NCBI NO: 15235534 NR Description: cytochrome P450 family [Arabidopsis thaliana]
  misc_feature (1)..(381): Homolog of NCBI NO: 15235535 NR Description: cytochrome P450 family [Arabidopsis thaliana]
  misc_feature (1)..(379): Homolog of NCBI NO: 21554381 NR Description: cytochrome P450-like protein [Arabidopsis
  misc_feature (1)..(382): Homolog of NCBI NO: 15235536 NR Description: cytochrome P450, putative [Arabidopsis thaliana]
MIAASYGDHWRNLRRIGSVEIFSNHRLNSFLSIRKDEIRRLVFRLSRNFSQEFVKVDMKSMLSDLTFNNILRMVAGKRYYGDGVEDDPEAKRVRQLIADVVACAGAGNAVDYLPVLRLVSDYETRVKKLAGRLDEFLQGLVDEKREAKEKGNTMIDHLLTLQESQPDYFTDRIIKGNMLALILAGTDTSAVTLEWALSNVLNHPDVLNKARDEIDRKIGLDRLMDESDISNLPYLQNIVSETLRLYPAAPMLLPHVASEDCKVAGYDMPRGTILLTNVWAIHRDPQLWDDPMSFKPERFEKEGEAQKLMPFGLGRRACPGSGLAHRLINLTLGSLIQCLEWEKIGEEVDMSEGKGVTMPKAKPLEAMCRARPSVVKIFNESV

SEQ ID NO: 36693 - protein, 325 aa, Arabidopsis thaliana
  peptide (1)..(325): Ceres Seq. ID no. 13491322
  misc_feature (1)..(322): Homolog of NCBI NO: 25282604 NR Description: cytochrome P450 monooxygenase
  misc_feature (1)..(322): Homolog of NCBI NO: 30692923 NR Description: cytochrome P450 91A1 [Arabidopsis thaliana]
  misc_feature (1)..(320): Homolog of NCBI NO: 15235533 NR Description: cytochrome P450 family [Arabidopsis thaliana]
  misc_feature (1)..(324): Homolog of NCBI NO: 15228472 NR Description: cytochrome P450 family [Arabidopsis thaliana]
  misc_feature (1)..(319): Homolog of NCBI NO: 15235517 NR Description: cytochrome P450 family [Arabidopsis thaliana]
  misc_feature (1)..(324): Homolog of NCBI NO: 25282574 NR Description: probable cytochrome P450 F28G11.4
  misc_feature (1)..(324): Homolog of NCBI NO: 15235534 NR Description: cytochrome P450 family [Arabidopsis thaliana]
  misc_feature (1)..(324): Homolog of NCBI NO: 15235535 NR Description: cytochrome P450 family [Arabidopsis thaliana]
  misc_feature (1)..(322): Homolog of NCBI NO: 21554381 NR Description: cytochrome P450-like protein [Arabidopsis
  misc_feature (1)..(325): Homolog of NCBI NO: 15235536 NR Description: cytochrome P450, putative [Arabidopsis thaliana]
MKSMLSDLTFNNILRMVAGKRYYGDGVEDDPEAKRVRQLIADVVACAGAGNAVDYLPVLRLVSDYETRVKKLAGRLDEFLQGLVDEKREAKEKGNTMIDHLLTLQESQPDYFTDRIIKGNMLALILAGTDTSAVTLEWALSNVLNHPDVLNKARDEIDRKIGLDRLMDESDISNLPYLQNIVSETLRLYPAAPMLLPHVASEDCKVAGYDMPRGTILLTNVWAIHRDPQLWDDPMSFKPERFEKEGEAQKLMPFGLGRRACPGSGLAHRLINLTLGSLIQCLEWEKIGEEVDMSEGKGVTMPKAKPLEAMCRARPSVVKIFNESV

SEQ ID NO: 36694 - DNA, 1205 bp, Arabidopsis thaliana
  misc_feature (1)..(1205): Ceres Seq. ID no. 12603454
  misc_feature: MA Experiment ID: 20000184 Result: Up-regulated in Transcription
  misc_feature: MA Experiment 20000184 PARAMETER Experiment Name: At_Shoots__P Parameter: Age (day) Value: 7
  misc_feature: MA Experiment 20000184 PARAMETER Experiment Name: At_Shoots__P Parameter: Tissue Value: Shoots vs. Whole Plant
aattttccttttgggactcggactctctctctagtctctatatatatttatgcaattcccggaaaatctgtttttttctttctctattgtcatcatcccacacactaaccaaattaaccatgaaccgtaatcaacacaaaccaatgtttgttacattcctcatcaatattcttctcctccaacttctaaaccttaccaatgcatcaccatccccaccaataacagccctatacgccttcggcgactccacagtggactccggtaacaacaattacattcccactcttttccagagcaaccatcctccctatggtaaatcctttccgtccaaactctccaccggaaggttctccgacggaaaactcgccaccgacttcatagtctcctctctaggactcaaacccactctaccagcttacctcaacccttcggtcaaacctgtagatcttttgaccggcgttagtttcgcctcggccggaggtggtttagatgatcggacggcaaagtcatcattgactattaccatggacaagcaatggagttacttcgaagaggcgctgggtaaaatgaagagtttggttggagactcggagactaatcgggtgattaagaatgctgtgttcgtcattagtgcggggactaatgatatgatctttaatgtttacgatcatgttcttgggagtttgatctccgtttcggattatcaagattctctactaaccaaagtcgaagtttttgtccagagactatacgaggcaggagcacgaaggattacaatagctggactaccaccaatcggatgccttccggtgcaagtaacacttactagcatcaatactcctcgcatcttccatcatcggatctgtacggaacatcagaacgatgattctcgggtttacaatcaaaagctacagaagctaatcttcggtctcagtcagaggtttcgaggttccaaagttctttaccttgatatctactctccgttaatagacatgatcaaacatcctcgtaaatacggactagaggaaacattgagaggatgttgtgggacagggctacttgaggcaggacctctatgccaaccattgtctcggacttgtgacgatgtttccaagtatttattctttgattctgtgcatccttcacagacggcttattctgtcatcgctagtttcgccttacaaaaattgtttcctctcctctaa

SEQ ID NO: 36695 - protein, 400 aa, Arabidopsis thaliana
  peptide (1)..(400): Ceres Seq. ID no. 12603455
  misc_feature (76)..(392): Pfam Name: GDSL-like Lipase/Acylhydrolase Pfam Description: GDSL-like Lipase/Acylhydrolase
  misc_feature (46)..(390): Homolog of NCBI NO: 25336283 NR Description: hypothetical protein RXF26 [imported] -
  misc_feature (46)..(390): Homolog of NCBI NO: 15217963 NR Description: proline-rich protein, putative; protein id:
  misc_feature (46)..(391): Homolog of NCBI NO: 15227734 NR Description: putative GDSL-motif lipase/hydrolase; protein id:
  misc_feature (61)..(400): Homolog of NCBI NO: 25336267 NR Description: hypothetical protein [imported] - Arabidopsis
  misc_feature (61)..(400): Homolog of NCBI NO: 18390708 NR Description: expressed protein
  misc_feature (46)..(390): Homolog of NCBI NO: 21592974 NR Description: proline-rich protein, putative [Arabidopsis
  misc_feature (46)..(390): Homolog of NCBI NO: 15225096 NR Description: putative GDSL-motif lipase/hydrolase
  misc_feature (46)..(400): Homolog of NCBI NO: 21537117 NR Description: putative GDSL-motif lipase/hydrolase [Arabidopsis
  misc_feature (48)..(400): Homolog of NCBI NO: 4587999 NR Description: hypothetical APG protein [Arabidopsis thaliana]
  misc_feature (40)..(400): Homolog of NCBI NO: 15225668 NR Description: putative GDSL-motif lipase hydrolase; protein id:
FSFWDSDSLSSLYIYLCNSRKICFFLSLLSSSHTLTKLTMNRNQHKPMFVTFLINILLLQLLNLTNASPSPPITALYAFGDSTVDSGNNNYIPTLFQSNHPPYGKSFPSKLSTGRFSDGKLATDFIVSSLGLKPTLPAYLNPSVKPVDLLTGVSFASAGGGLDDRTAKSSLTITMDKQWSYFEEALGKMKSLVGDSETNRVIKNAVFVISAGTNDMIFNVYDHVLGSLISVSDYQDSLLTKVEVFVQRLYEAGARRITIAGLPPIGCLPVQVTLTSINTPRIFHHRICTEHQNDDSRVYNQKLQKLIFGLSQRFRGSKVLYLDIYSPLIDMIKHPRKYGLEETLRGCCGTGLLEAGPLCQPLSRTCDDVSKYLFFDSVHPSQTAYSVIASFALQKLFPLL

SEQ ID NO: 36696 - protein, 361 aa, Arabidopsis thaliana
  peptide (1)..(361): Ceres Seq. ID no. 12603456
  misc_feature (37)..(353): Pfam Name: GDSL-like Lipase/Acylhydrolase Pfam Description: GDSL-like Lipase/Acylhydrolase
  misc_feature (7)..(351): Homolog of NCBI NO: 25336283 NR Description: hypothetical protein RXF26 [imported] -
  misc_feature (7)..(351): Homolog of NCBI NO: 15217963 NR Description: proline-rich protein, putative; protein id:
  misc_feature (7)..(352): Homolog of NCBI NO: 15227734 NR Description: putative GDSL-motif lipase/hydrolase; protein id:
  misc_feature (22)..(361): Homolog of NCBI NO: 25336267 NR Description: hypothetical protein [imported] - Arabidopsis
  misc_feature (22)..(361): Homolog of NCBI NO: 18390708 NR Description: expressed protein
  misc_feature (7)..(351): Homolog of NCBI NO: 21592974 NR Description: proline-rich protein, putative [Arabidopsis
  misc_feature (7)..(351): Homolog of NCBI NO: 15225096 NR Description: putative GDSL-motif lipase/hydrolase
  misc_feature (7)..(361): Homolog of NCBI NO: 21537117 NR Description: putative GDSL-motif lipase/hydrolase [Arabidopsis
  misc_feature (9)..(361): Homolog of NCBI NO: 4587999 NR Description: hypothetical APG protein [Arabidopsis thaliana]
  misc_feature (1)..(361): Homolog of NCBI NO: 15225668 NR Description: putative GDSL-motif lipase hydrolase; protein id:
MNRNQHKPMFVTFLINILLLQLLNLTNASPSPPITALYAFGDSTVDSGNNNYIPTLFQSNHPPYGKSFPSKLSTGRFSDGKLATDFIVSSLGLKPTLPAYLNPSVKPVDLLTGVSFASAGGGLDDRTAKSSLTITMDKQWSYFEEALGKMKSLVGDSETNRVIKNAVFVISAGTNDMIFNVYDHVLGSLISVSDYQDSLLTKVEVFVQRLYEAGARRITIAGLPPIGCLPVQVTLTSINTPRIFHHRICTEHQNDDSRVYNQKLQKLIFGLSQRFRGSKVLYLDIYSPLIDMIKHPRKYGLEETLRGCCGTGLLEAGPLCQPLSRTCDDVSKYLFFDSVHPSQTAYSVIASFALQKLFPLL

SEQ ID NO: 36697 - protein, 353 aa, Arabidopsis thaliana
  peptide (1)..(353): Ceres Seq. ID no. 12603457
  misc_feature (29)..(345): Pfam Name: GDSL-like Lipase/Acylhydrolase Pfam Description: GDSL-like Lipase/Acylhydrolase
  misc_feature (1)..(343): Homolog of NCBI NO: 25336283 NR Description: hypothetical protein RXF26 [imported] -
  misc_feature (1)..(343): Homolog of NCBI NO: 15217963 NR Description: proline-rich protein, putative; protein id:
  misc_feature (1)..(344): Homolog of NCBI NO: 15227734 NR Description: putative GDSL-motif lipase/hydrolase; protein id:
  misc_feature (14)..(353): Homolog of NCBI NO: 25336267 NR Description: hypothetical protein [imported] - Arabidopsis
  misc_feature (14)..(353): Homolog of NCBI NO: 18390708 NR Description: expressed protein
  misc_feature (1)..(343): Homolog of NCBI NO: 21592974 NR Description: proline-rich protein, putative [Arabidopsis
  misc_feature (1)..(343): Homolog of NCBI NO: 15225096 NR Description: putative GDSL-motif lipase/hydrolase
  misc_feature (1)..(353): Homolog of NCBI NO: 21537117 NR Description: putative GDSL-motif lipase/hydrolase [Arabidopsis
  misc_feature (1)..(353): Homolog of NCBI NO: 4587999 NR Description: hypothetical APG protein [Arabidopsis thaliana]
  misc_feature (1)..(353): Homolog of NCBI NO: 15225668 NR Description: putative GDSL-motif lipase hydrolase; protein id:
MFVTFLINILLLQLLNLTNASPSPPITALYAFGDSTVDSGNNNYIPTLFQSNHPPYGKSFPSKLSTGRFSDGKLATDFIVSSLGLKPTLPAYLNPSVKPVDLLTGVSFASAGGGLDDRTAKSSLTITMDKQWSYFEEALGKMKSLVGDSETNRVIKNAVFVISAGTNDMIFNVYDHVLGSLISVSDYQDSLLTKVEVFVQRLYEAGARRITIAGLPPIGCLPVQVTLTSINTPRIFHHRICTEHQNDDSRVYNQKLQKLIFGLSQRFRGSKVLYLDIYSPLIDMIKHPRKYGLEETLRGCCGTGLLEAGPLCQPLSRTCDDVSKYLFFDSVHPSQTAYSVIASFALQKLFPLL

SEQ ID NO: 36698 - DNA, 1520 bp, Arabidopsis thaliana
  misc_feature (1)..(1520): Ceres Seq. ID no. 12336366
  misc_feature: MA Experiment ID: 108569 Result: Up-regulated in Transcription
  misc_feature: MA Experiment 108569 PARAMETER Experiment Name: At_0.001%_MeJA__cDNA_P Parameter: Timepoint (hr) Value: 6
  misc_feature: MA Experiment 108569 PARAMETER Experiment Name: At_0.001%_MeJA__cDNA_P Parameter: Tissue Value: Aerial
  misc_feature: MA Experiment 108569 PARAMETER Experiment Name: At_0.001%_MeJA__cDNA_P Parameter: Treatment Value: 0.001% MeJA vs. No Treatment
  misc_feature: MA Experiment ID: 20000030 Result: Down-regulated in Transcription
  misc_feature: MA Experiment 20000030 PARAMETER Experiment Name: At_CS6630_Roots_cDNA_P Parameter: Plant Line Value: CS6630 vs. WS
  misc_feature: MA Experiment 20000030 PARAMETER Experiment Name: At_CS6630_Roots_cDNA_P Parameter: Tissue Value: Roots
  misc_feature: MA Experiment ID: 20000111 Result: Down-regulated in Transcription
  misc_feature: MA Experiment 20000111 PARAMETER Experiment Name: At_42deg_Heat_cDNA_P Parameter: Temperature (deg C) Value: 42 vs. 22
  misc_feature: MA Experiment 20000111 PARAMETER Experiment Name: At_42deg_Heat_cDNA_P Parameter: Timepoint (hr) Value: 6
  misc_feature: MA Experiment 20000111 PARAMETER Experiment Name: At_42deg_Heat_cDNA_P Parameter: Tissue Value: Aerial
  misc_feature: MA Experiment ID: 20000173 Result: Down-regulated in Transcription
  misc_feature: MA Experiment 20000173 PARAMETER Experiment Name: At_42deg_Heat_P Parameter: Age (day) Value: 14
  misc_feature: MA Experiment 20000173 PARAMETER Experiment Name: At_42deg_Heat_P Parameter: Organism Value: A. thaliana
  misc_feature: MA Experiment 20000173 PARAMETER Experiment Name: At_42deg_Heat_P Parameter: Plant Line Value: WS
  misc_feature: MA Experiment 20000173 PARAMETER Experiment Name: At_42deg_Heat_P Parameter: Temperature (deg C) Value: 42 vs. 22
  misc_feature: MA Experiment 20000173 PARAMETER Experiment Name: At_42deg_Heat_P Parameter: Timepoint (hr) Value: 6
  misc_feature: MA Experiment 20000173 PARAMETER Experiment Name: At_42deg_Heat_P Parameter: Tissue Value: Aerial
  misc_feature: MA Experiment ID: 20000185 Result: Down-regulated in Transcription
  misc_feature: MA Experiment 20000185 PARAMETER Experiment Name: At_Roots__P Parameter: Age (day) Value: 7 vs. 21
  misc_feature: MA Experiment 20000185 PARAMETER Experiment Name: At_Roots__P Parameter: Organism Value: A. thaliana
  misc_feature: MA Experiment 20000185 PARAMETER Experiment Name: At_Roots__P Parameter: Tissue Value: Roots vs. Whole Plant
  misc_feature: MA Experiment ID: 20000224 Result: Up-regulated in Transcription
  misc_feature: MA Experiment ID: 20000234 Result: Down-regulated in Transcription
  misc_feature: MA Experiment 20000234 PARAMETER Experiment Name: At_Siliques_P Parameter: Age (day) Value: 21
  misc_feature: MA Experiment 20000234 PARAMETER Experiment Name: At_Siliques_P Parameter: Organism Value: A. thaliana
  misc_feature: MA Experiment 20000234 PARAMETER Experiment Name: At_Siliques_P Parameter: Plant Line Value: WS
  misc_feature: MA Experiment 20000234 PARAMETER Experiment Name: At_Siliques_P Parameter: Tissue Value: Less Than 5mm Siliques vs. Whole Plant
  misc_feature: MA Experiment ID: 20000439 Result: Down-regulated in Transcription
  misc_feature: MA Experiment 20000439 PARAMETER Experiment Name: At_Roots__P Parameter: Age (day) Value: 14 vs. 21
  misc_feature: MA Experiment 20000439 PARAMETER Experiment Name: At_Roots__P Parameter: Organism Value: A. thaliana
  misc_feature: MA Experiment 20000439 PARAMETER Experiment Name: At_Roots__P Parameter: Tissue Value: Roots vs. Whole Plant
  misc_feature: MA Experiment ID: 20001248 Result: Down-regulated in Transcription
  misc_feature: MA Experiment 20001248 PARAMETER Experiment Name: At_Far-red-induction_P Parameter: Age (day) Value: 7
  misc_feature: MA Experiment 20001248 PARAMETER Experiment Name: At_Far-red-induction_P Parameter: Light Value: Far-red vs. White
  misc_feature: MA Experiment 20001248 PARAMETER Experiment Name: At_Far-red-induction_P Parameter: Organism Value: A. thaliana
  misc_feature: MA Experiment 20001248 PARAMETER Experiment Name: At_Far-red-induction_P Parameter: Plant Line Value: Columbia
  misc_feature: MA Experiment 20001248 PARAMETER Experiment Name: At_Far-red-induction_P Parameter: Timepoint (hr) Value: 4
  misc_feature: MA Experiment 20001248 PARAMETER Experiment Name: At_Far-red-induction_P Parameter: Tissue Value: Whole Plant
gtattaaaagaaagaaagaaaaaaaaaggagaggagaagaagcagtggagagagagcatgtgaataaaaagcgtgaagctttttgatatctctttctcttcctcttcctttctcctccgatagatttcgccggcgatggcggtggactccttagaaacggagattgacacggcggtgcgtgttgtccacctcgcttcttctctctgtgttaaagttcaagagaagcttcatcttcctaacggtggtcacgttaagtctaaagacgatgattcccctgtcaccgtcgctgattttggtgtacaagcaattgtgagctgggttttagctgaagtgtttggtgatcaaaacctttcaattgttgctgaagaagacactgagacactctctgaggctgattctttaggtcttttaggagctgtgtcgaatgcggttaatgaagcattgtccgaagctcagaactacgggcttccgaagccagttaagccattggggtctagtgaaattcttaaggctattagtagatgtaactctgttggaggacctaaaggaaggcattgggttcttgatcctgttgatggaacgttagggtttgttcgtggggatcagtatgctgttgctttagctttgatagagaatggtaaagttcttttgggtgtactaggatgtcctaattatccggttaagaaagaatgtttaagtaatggttgtaaccaagctatgaagacgaaagctgttgctggttcagtatcgaaaggatgtgttatgtatgcaaagagaggtagtggtcaagcttggatgcaacctttgatcgttggaggaataccagaatctgcaacacttcttaaggtttcttcagttgatgatccggttttagctacagtttgtgagccagtagagagagcaaactcaaaccacttgttcactgcaggacttgccaatagcatgggagttagaaagcagcctatgcgagtgtatagcatggtgaaatatgcagcgattgcacgtggagacgctgaagtgtttatgaagtttgcacagtcaagttacaaagagaagatatgggatcacgcagctggagttgttattgtggaagaagctggtggtgtggtgactgatgcgggagggagaaacttagacttctcgaaaggtgtttacttggaaggtcttgaccgtggaatcatcgcatgttctggtcaagttttacatgagaagattataggtgctgtttatgctagttgggaatcttccagtctctgaaaaagcttatccacaatccgtagtttggtgcagcatcatcgagccaaagcaaaggaggaacaagggccattacggtttaggatgagcaagggccagtttcaatgaatgtgaatggcggagaagtaaatatagtcgaggaagcagcggtaaaagtaagaatctagtttatttacctatctaagagtaataaagctgctgcatttcacgaacccttatgttctatgatctttaatggatgatatcatttttaatcttcgtcctgt

SEQ ID NO: 36699 - protein, 373 aa, Arabidopsis thaliana
  peptide (1)..(373): Ceres Seq. ID no. 12336367
  misc_feature (117)..(373): Homolog of NCBI NO: 15237589 NR Description: 3(2),5-bisphosphate nucleotidase (emb|CAB05889.1)
  misc_feature (123)..(356): Homolog of NCBI NO: 3913517 NR Description: 3'(2'),5'-BISPHOSPHATE NUCLEOTIDASE
  misc_feature (123)..(356): Homolog of NCBI NO: 14268820 NR Description: diphosphonucleotide phosphatase 1 [Zea mays]
  misc_feature (5)..(364): Homolog of NCBI NO: 40744789 NR Description: hypothetical protein AN1769.2 [Aspergillus
  misc_feature (5)..(342): Homolog of NCBI NO: 21618152 NR Description: 3(2),5-bisphosphate nucleotidase [Arabidopsis
  misc_feature (5)..(342): Homolog of NCBI NO: 18424775 NR Description: 3(2),5-bisphosphate nucleotidase
  misc_feature (20)..(356): Homolog of NCBI NO: 15237567 NR Description: 3(2),5-bisphosphate nucleotidase
  misc_feature (9)..(373): Homolog of NCBI NO: 15451579 NR Description: Putative PAP-specific phosphatase [Oryza sativa]
  misc_feature (1)..(373): Homolog of NCBI NO: 2736075 NR Description: PAP-specific phosphatase; HAL2-like protein
  misc_feature (1)..(373): Homolog of NCBI NO: 15239631 NR Description: putative protein
MAVDSLETEIDTAVRVVHLASSLCVKVQEKLHLPNGGHVKSKDDDSPVTVADFGVQAIVSWVLAEVFGDQNLSIVAEEDTETLSEADSLGLLGAVSNAVNEALSEAQNYGLPKPVKPLGSSEILKAISRCNSVGGPKGRHWVLDPVDGTLGFVRGDQYAVALALIENGKVLLGVLGCPNYPVKKECLSNGCNQAMKTKAVAGSVSKGCVMYAKRGSGQAWMQPLIVGGIPESATLLKVSSVDDPVLATVCEPVERANSNHLFTAGLANSMGVRKQPMRVYSMVKYAAIARGDAEVFMKFAQSSYKEKIWDHAAGVVIVEEAGGVVTDAGGRNLDFSKGVYLEGLDRGIIACSGQVLHEKIIGAVYASWESSSL

SEQ ID NO: 36700 - DNA, 1257 bp, Arabidopsis thaliana
  misc_feature (1)..(1257): Ceres Seq. ID no. 12481865
  misc_feature: MA Experiment ID: 108433 Result: Down-regulated in Transcription
  misc_feature: MA Experiment 108433 PARAMETER Experiment Name: At_rhl_Mutant2_cDNA_P Parameter: Age (day) Value: 7
  misc_feature: MA Experiment 108433 PARAMETER Experiment Name: At_rhl_Mutant2_cDNA_P Parameter: Organism Value: A. thaliana
  misc_feature: MA Experiment 108433 PARAMETER Experiment Name: At_rhl_Mutant2_cDNA_P Parameter: Plant Line Value: rhl Mutant vs. wt landsburg
  misc_feature: MA Experiment 108433 PARAMETER Experiment Name: At_rhl_Mutant2_cDNA_P Parameter: Tissue Value: Roots
  misc_feature: MA Experiment ID: 108434 Result: Up-regulated in Transcription
  misc_feature: MA Experiment 108434 PARAMETER Experiment Name: At_Root_Tips_cDNA_P Parameter: Tissue Value: Root Tips
  misc_feature: MA Experiment ID: 108461 Result: Up-regulated in Transcription
  misc_feature: MA Experiment 108461 PARAMETER Experiment Name: At_Germinating_Seeds_cDNA_P Parameter: Age (day) Value: 1 vs. 0
  misc_feature: MA Experiment 108461 PARAMETER Experiment Name: At_Germinating_Seeds_cDNA_P Parameter: Tissue Value: Germinating Seeds
  misc_feature: MA Experiment ID: 108561 Result: Down-regulated in Transcription
  misc_feature: MA Experiment 108561 PARAMETER Experiment Name: At_100uM_ABA_cDNA_P Parameter: Timepoint (hr) Value: 6
  misc_feature: MA Experiment 108561 PARAMETER Experiment Name: At_100uM_ABA_cDNA_P Parameter: Tissue Value: Aerial
  misc_feature: MA Experiment 108561 PARAMETER Experiment Name: At_100uM_ABA_cDNA_P Parameter: Treatment Value: 100uM ABA vs. No Treatment
  misc_feature: MA Experiment ID: 108595 Result: Down-regulated in Transcription
  misc_feature: MA Experiment 108595 PARAMETER Experiment Name: At_Ler-pi_Ovule_cDNA_P Parameter: Plant Line Value: null
  misc_feature: MA Experiment ID: 20000069 Result: Down-regulated in Transcription
  misc_feature: MA Experiment 20000069 PARAMETER Experiment Name: At_100uM_ABA_Mutants_cDNA_P Parameter: Plant Line Value: CS23
  misc_feature: MA Experiment 20000069 PARAMETER Experiment Name: At_100uM_ABA_Mutants_cDNA_P Parameter: Timepoint (hr) Value: 6
  misc_feature: MA Experiment 20000069 PARAMETER Experiment Name: At_100uM_ABA_Mutants_cDNA_P Parameter: Tissue Value: Aerial
  misc_feature: MA Experiment 20000069 PARAMETER Experiment Name: At_100uM_ABA_Mutants_cDNA_P Parameter: Treatment Value: 100uM ABA vs. No Treatment
  misc_feature: MA Experiment ID: 20000071 Result: Down-regulated in Transcription
  misc_feature: MA Experiment 20000071 PARAMETER Experiment Name: At_100uM_ABA_Mutants_cDNA_P Parameter: Plant Line Value: CS8104
  misc_feature: MA Experiment 20000071 PARAMETER Experiment Name: At_100uM_ABA_Mutants_cDNA_P Parameter: Timepoint (hr) Value: 6
  misc_feature: MA Experiment 20000071 PARAMETER Experiment Name: At_100uM_ABA_Mutants_cDNA_P Parameter: Tissue Value: Aerial
  misc_feature: MA Experiment 20000071 PARAMETER Experiment Name: At_100uM_ABA_Mutants_cDNA_P Parameter: Treatment Value: 100uM ABA vs. No Treatment
  misc_feature: MA Experiment ID: 20000112 Result: Down-regulated in Transcription
  misc_feature: MA Experiment 20000112 PARAMETER Experiment Name: At_42deg_Heat_cDNA_P Parameter: Temperature (deg C) Value: 42 vs. 22
  misc_feature: MA Experiment 20000112 PARAMETER Experiment Name: At_42deg_Heat_cDNA_P Parameter: Timepoint (hr) Value: 2
  misc_feature: MA Experiment 20000112 PARAMETER Experiment Name: At_42deg_Heat_cDNA_P Parameter: Tissue Value: Aerial
  misc_feature: MA Experiment ID: 20000113 Result: Down-regulated in Transcription
  misc_feature: MA Experiment 20000113 PARAMETER Experiment Name: At_42deg_Heat_cDNA_P Parameter: Temperature (deg C) Value: 42 vs. 22
  misc_feature: MA Experiment 20000113 PARAMETER Experiment Name: At_42deg_Heat_cDNA_P Parameter: Timepoint (hr) Value: 8
  misc_feature: MA Experiment 20000113 PARAMETER Experiment Name: At_42deg_Heat_cDNA_P Parameter: Tissue Value: Aerial
  misc_feature: MA Experiment ID: 20000117 Result: Down-regulated in Transcription
  misc_feature: MA Experiment 20000117 PARAMETER Experiment Name: At_100uM_ABA_Mutants_cDNA_P Parameter: Plant Line Value: Columbia
  misc_feature: MA Experiment 20000117 PARAMETER Experiment Name: At_100uM_ABA_Mutants_cDNA_P Parameter: Timepoint (hr) Value: 6
  misc_feature: MA Experiment 20000117 PARAMETER Experiment Name: At_100uM_ABA_Mutants_cDNA_P Parameter: Tissue Value: Aerial
  misc_feature: MA Experiment 20000117 PARAMETER Experiment Name: At_100uM_ABA_Mutants_cDNA_P Parameter: Treatment Value: 100uM ABA vs. No Treatment
  misc_feature: MA Experiment ID: 20000144 Result: Down-regulated in Transcription
  misc_feature: MA Experiment 20000144 PARAMETER Experiment Name: At_42deg_Heat_cDNA_P Parameter: Temperature (deg C) Value: 42 vs. 22
  misc_feature: MA Experiment 20000144 PARAMETER Experiment Name: At_42deg_Heat_cDNA_P Parameter: Timepoint (hr) Value: 1
  misc_feature: MA Experiment 20000144 PARAMETER Experiment Name: At_42deg_Heat_cDNA_P Parameter: Tissue Value: Aerial
  misc_feature: MA Experiment ID: 20000180 Result: Up-regulated in Transcription
  misc_feature: MA Experiment 20000180 PARAMETER Experiment Name: At_Germinating_Seeds_P Parameter: Age (hr) Value: 24 vs. 0
  misc_feature: MA Experiment 20000180 PARAMETER Experiment Name: At_Germinating_Seeds_P Parameter: Tissue Value: Germinating Seeds
  misc_feature: MA Experiment ID: 20001911 Result: Down-regulated in Transcription
  misc_feature: MA Experiment 20001911 PARAMETER Experiment Name: At_Drought_Reproduction_P Parameter: Age (day) Value: 40
  misc_feature: MA Experiment 20001911 PARAMETER Experiment Name: At_Drought_Reproduction_P Parameter: Organism Value: A. thaliana
  misc_feature: MA Experiment 20001911 PARAMETER Experiment Name: At_Drought_Reproduction_P Parameter: Plant Line Value: WS
  misc_feature: MA Experiment 20001911 PARAMETER Experiment Name: At_Drought_Reproduction_P Parameter: Timepoint (day) Value: 10
  misc_feature: MA Experiment 20001911 PARAMETER Experiment Name: At_Drought_Reproduction_P Parameter: Tissue Value: Flowers
  misc_feature: MA Experiment 20001911 PARAMETER Experiment Name: At_Drought_Reproduction_P Parameter: Treatment Value: Drought vs. No Drought
aaggacctgatttctctctctcattctctcaacgaaatctcgatctcgtcgaggaagaagaagaacccagatcagaaaacataacaacaatgtcgtcgtctgcgaagaaacaaaccctgttcatatcgacattaatcatctcatggtactcttcaaacatcggtgttcttctcctcaacaagttccttctctcgaattacggattcaaattcccgatttttctcacaatgtgtcacatgtccgcttgcgctatccttagctacatctccattgttttcctcaagcttgttcctctccaacatctcaaatctcgttctcaattccttaaggttgctactctcagcatcgtcttttgtgcttccgtcgtcggtggtaacatctcccttcgttaccttcctgtctctttcaatcaagccgtcggtgctacgacgccgtttttcacggctctgtttgcttatcttatgacctttaagagagaagcttgggttacttatggtgctctcgtccctgtcgtcgccggtgtcgtcatcgccagtgggggtgagccaggatttcactggtttgggttcataatgtgcattagtgctactgcggcaagagcctttaaatctgttcttcaaggcatcttactttcttcagagggggaaaaattgaactcaatgaatttgatgttgtatatgtctcccatagctgtcattgctcttcttcccgttacgctatttatggaaccagacgtgatcagtgtgaccttgacgcttgcaaaacaacatcagtacatgtggatacttcttctggttaactctgtcatggcttattcagccaatctgttgaattttctggttaccaaacacacaagcgccctcaccctccaggttcttggaaatgctaaaggagcagttgcagtggtgatttctatcttgatctttcaaaacccggttacggttatgggaattggcgggtactccataaccgtccttggggtggttgcttatggagagacaaaacgcagatttagatgaactctcagacattagcaagtgagacaacatagcttctctatgtttgtttcttcatctgttcaagactcatccttaggacctgaaatttttgggcatttaggagatgagaatttatcaatagtgattttttgtaactattttatacgcactttatcatgtaatatgtatttggactatgttagatttgatggtgagataatcatttttgtgtgtttcctggttgaaataccattttggc

SEQ ID NO: 36701 - protein, 338 aa, Arabidopsis thaliana
  peptide (1)..(338): Ceres Seq. ID no. 12481866
  misc_feature (55)..(178): Pfam Name: Integral membrane protein DUF6 Pfam Description: Integral membrane protein DUF6
  misc_feature (35)..(331): Homolog of NCBI NO: 15219121 NR Description: glucose 6 phosphate/phosphate translocator,
  misc_feature (30)..(336): Homolog of NCBI NO: 15221371 NR Description: hypothetical protein; protein id: At1g12500.1
  misc_feature (40)..(182): Homolog of NCBI NO: 15229717 NR Description: integral membrane protein, putative; protein id:
  misc_feature (181)..(336): Homolog of NCBI NO: 15229717 NR Description: integral membrane protein, putative; protein id:
  misc_feature (40)..(336): Homolog of NCBI NO: 30681126 NR Description: phosphate translocator-related [Arabidopsis
  misc_feature (40)..(336): Homolog of NCBI NO: 9759107 NR Description: phosphate/phosphoenolpyruvate translocator
  misc_feature (40)..(336): Homolog of NCBI NO: 27476065 NR Description: Putative phosphate/phosphoenolpyruvate
  misc_feature (2)..(338): Homolog of NCBI NO: 15228248 NR Description: unknown protein; protein id: At3g10290.1
  misc_feature (30)..(338): Homolog of NCBI NO: 17064798 NR Description: phosphate/phosphoenolpyruvate translocator-like
  misc_feature (30)..(338): Homolog of NCBI NO: 15237644 NR Description: phosphate/phosphoenolpyruvate translocator - like
GPDFSLSFSQRNLDLVEEEEEPRSENITTMSSSAKKQTLFISTLIISWYSSNIGVLLLNKFLLSNYGFKFPIFLTMCHMSACAILSYISIVFLKLVPLQHLKSRSQFLKVATLSIVFCASVVGGNISLRYLPVSFNQAVGATTPFFTALFAYLMTFKREAWVTYGALVPVVAGVVIASGGEPGFHWFGFIMCISATAARAFKSVLQGILLSSEGEKLNSMNLMLYMSPIAVIALLPVTLFMEPDVISVTLTLAKQHQYMWILLLVNSVMAYSANLLNFLVTKHTSALTLQVLGNAKGAVAVVISILIFQNPVTVMGIGGYSITVLGVVAYGETKRRFR

SEQ ID NO: 36702 - protein, 309 aa, Arabidopsis thaliana
  peptide (1)..(309): Ceres Seq. ID no. 12481867
  misc_feature (26)..(149): Pfam Name: Integral membrane protein DUF6 Pfam Description: Integral membrane protein DUF6
  misc_feature (6)..(302): Homolog of NCBI NO: 15219121 NR Description: glucose 6 phosphate/phosphate translocator,
  misc_feature (1)..(307): Homolog of NCBI NO: 15221371 NR Description: hypothetical protein; protein id: At1g12500.1
  misc_feature (11)..(153): Homolog of NCBI NO: 15229717 NR Description: integral membrane protein, putative; protein id:
  misc_feature (152)..(307): Homolog of NCBI NO: 15229717 NR Description: integral membrane protein, putative; protein id:
  misc_feature (11)..(307): Homolog of NCBI NO: 30681126 NR Description: phosphate translocator-related [Arabidopsis
  misc_feature (11)..(307): Homolog of NCBI NO: 9759107 NR Description: phosphate/phosphoenolpyruvate translocator
  misc_feature (11)..(307): Homolog of NCBI NO: 27476065 NR Description: Putative phosphate/phosphoenolpyruvate
  misc_feature (1)..(309): Homolog of NCBI NO: 15228248 NR Description: unknown protein; protein id: At3g10290.1
  misc_feature (1)..(309): Homolog of NCBI NO: 17064798 NR Description: phosphate/phosphoenolpyruvate translocator-like
  misc_feature (1)..(309): Homolog of NCBI NO: 15237644 NR Description: phosphate/phosphoenolpyruvate translocator - like
MSSSAKKQTLFISTLIISWYSSNIGVLLLNKFLLSNYGFKFPIFLTMCHMSACAILSYISIVFLKLVPLQHLKSRSQFLKVATLSIVFCASVVGGNISLRYLPVSFNQAVGATTPFFTALFAYLMTFKREAWVTYGALVPVVAGVVIASGGEPGFHWFGFIMCISATAARAFKSVLQGILLSSEGEKLNSMNLMLYMSPIAVIALLPVTLFMEPDVISVTLTLAKQHQYMWILLLVNSVMAYSANLLNFLVTKHTSALTLQVLGNAKGAVAVVISILIFQNPVTVMGIGGYSITVLGVVAYGETKRRFR

SEQ ID NO: 36703 - protein, 263 aa, Arabidopsis thaliana
  peptide (1)..(263): Ceres Seq. ID no. 12481868
  misc_feature (1)..(103): Pfam Name: Integral membrane protein DUF6 Pfam Description: Integral membrane protein DUF6
  misc_feature (1)..(256): Homolog of NCBI NO: 15219121 NR Description: glucose 6 phosphate/phosphate translocator,
  misc_feature (1)..(261): Homolog of NCBI NO: 15221371 NR Description: hypothetical protein; protein id: At1g12500.1
  misc_feature (1)..(107): Homolog of NCBI NO: 15229717 NR Description: integral membrane protein, putative; protein id:
  misc_feature (106)..(261): Homolog of NCBI NO: 15229717 NR Description: integral membrane protein, putative; protein id:
  misc_feature (1)..(261): Homolog of NCBI NO: 30681126 NR Description: phosphate translocator-related [Arabidopsis
  misc_feature (1)..(261): Homolog of NCBI NO: 9759107 NR Description: phosphate/phosphoenolpyruvate translocator
  misc_feature (1)..(261): Homolog of NCBI NO: 27476065 NR Description: Putative phosphate/phosphoenolpyruvate
  misc_feature (1)..(263): Homolog of NCBI NO: 15228248 NR Description: unknown protein; protein id: At3g10290.1
  misc_feature (1)..(263): Homolog of NCBI NO: 17064798 NR Description: phosphate/phosphoenolpyruvate translocator-like
  misc_feature (1)..(263): Homolog of NCBI NO: 15237644 NR Description: phosphate/phosphoenolpyruvate translocator - like
MCHMSACAILSYISIVFLKLVPLQHLKSRSQFLKVATLSIVFCASVVGGNISLRYLPVSFNQAVGATTPFFTALFAYLMTFKREAWVTYGALVPVVAGVVIASGGEPGFHWFGFIMCISATAARAFKSVLQGILLSSEGEKLNSMNLMLYMSPIAVIALLPVTLFMEPDVISVTLTLAKQHQYMWILLLVNSVMAYSANLLNFLVTKHTSALTLQVLGNAKGAVAVVISILIFQNPVTVMGIGGYSITVLGVVAYGETKRRFR

SEQ ID NO: 36704 - DNA, 1611 bp, Arabidopsis thaliana
  misc_feature (1)..(1611): Ceres Seq. ID no. 13499676
  misc_feature: MA Experiment ID: 108433 Result: Down-regulated in Transcription
  misc_feature: MA Experiment 108433 PARAMETER Experiment Name: At_rhl_Mutant2_cDNA_P Parameter: Age (day) Value: 7
  misc_feature: MA Experiment 108433 PARAMETER Experiment Name: At_rhl_Mutant2_cDNA_P Parameter: Organism Value: A. thaliana
  misc_feature: MA Experiment 108433 PARAMETER Experiment Name: At_rhl_Mutant2_cDNA_P Parameter: Plant Line Value: rhl Mutant vs. wt landsburg
  misc_feature: MA Experiment 108433 PARAMETER Experiment Name: At_rhl_Mutant2_cDNA_P Parameter: Tissue Value: Roots
  misc_feature: MA Experiment ID: 108573 Result: Up-regulated in Transcription
  misc_feature: MA Experiment 108573 PARAMETER Experiment Name: At_Drought_cDNA_P Parameter: Timepoint (hr) Value: 6
  misc_feature: MA Experiment 108573 PARAMETER Experiment Name: At_Drought_cDNA_P Parameter: Tissue Value: Aerial
  misc_feature: MA Experiment 108573 PARAMETER Experiment Name: At_Drought_cDNA_P Parameter: Treatment Value: Drought vs. No Drought
  misc_feature: MA Experiment ID: 108585 Result: Up-regulated in Transcription
  misc_feature: MA Experiment 108585 PARAMETER Experiment Name: At_5mM_NaNP_cDNA_P Parameter: Timepoint (hr) Value: 6
  misc_feature: MA Experiment 108585 PARAMETER Experiment Name: At_5mM_NaNP_cDNA_P Parameter: Tissue Value: Aerial
  misc_feature: MA Experiment 108585 PARAMETER Experiment Name: At_5mM_NaNP_cDNA_P Parameter: Treatment Value: null
  misc_feature: MA Experiment ID: 20000184 Result: Up-regulated in Transcription
  misc_feature: MA Experiment 20000184 PARAMETER Experiment Name: At_Shoots__P Parameter: Age (day) Value: 7
  misc_feature: MA Experiment 20000184 PARAMETER Experiment Name: At_Shoots__P Parameter: Tissue Value: Shoots vs. Whole Plant
  misc_feature: MA Experiment ID: 20000224 Result: Down-regulated in Transcription
  misc_feature: MA Experiment ID: 20000437 Result: Up-regulated in Transcription
  misc_feature: MA Experiment 20000437 PARAMETER Experiment Name: At_Drought_P Parameter: Age (day) Value: 8
  misc_feature: MA Experiment 20000437 PARAMETER Experiment Name: At_Drought_P Parameter: Organism Value: A. thaliana
  misc_feature: MA Experiment 20000437 PARAMETER Experiment Name: At_Drought_P Parameter: Plant Line Value: WS
  misc_feature: MA Experiment 20000437 PARAMETER Experiment Name: At_Drought_P Parameter: Timepoint (hr) Value: 24
  misc_feature: MA Experiment 20000437 PARAMETER Experiment Name: At_Drought_P Parameter: Tissue Value: Whole Plant
  misc_feature: MA Experiment 20000437 PARAMETER Experiment Name: At_Drought_P Parameter: Treatment Value: Drought vs. No Drought
  misc_feature: MA Experiment ID: 20001247 Result: Up-regulated in Transcription
  misc_feature: MA Experiment 20001247 PARAMETER Experiment Name: At_Far-red-induction_P Parameter: Age (day) Value: 7
  misc_feature: MA Experiment 20001247 PARAMETER Experiment Name: At_Far-red-induction_P Parameter: Light Value: Far-red vs. White
  misc_feature: MA Experiment 20001247 PARAMETER Experiment Name: At_Far-red-induction_P Parameter: Organism Value: A. thaliana
  misc_feature: MA Experiment 20001247 PARAMETER Experiment Name: At_Far-red-induction_P Parameter: Plant Line Value: Columbia
  misc_feature: MA Experiment 20001247 PARAMETER Experiment Name: At_Far-red-induction_P Parameter: Timepoint (hr) Value: 1
  misc_feature: MA Experiment 20001247 PARAMETER Experiment Name: At_Far-red-induction_P Parameter: Tissue Value: Whole Plant
aaattaaaagtcaatcatatcaaatcccaaatcctcccagatgtttttatcatcttcttcttcctgaagatttgatttcattttcctctctttcagatccctattctcatggcttctggatcttactggtgctatagttgtagccgattcgtttgggtttccgattcaatctcttgccctgattgcgacggtggtttcctcgaactcatccaagagcctctcgatttcacaccttccgattccttcaccaccaccaccaccactcaacatcgcagccccactcgcttccctcctccttcttcttcttcctccaccccatccgcttctatgcacgccgataacagtcccactcctaccatcgttactcgtacacgaagcaatcgatctcctaatccagttattgttctccgtggatctgctgctgctccttcttctgatgttgtttccgaaggtttagatcgatctgcttttcagatgtattacgatgatggtactgattctggtcttagacctttaccaccgagtatgactgagtttttgttaggttctggatttgatcgtttgttagatcagatctctcagatcgagcttaacaccaatcggaatcttcgttcttgtgaacatccaccggcttctaaatcggccattgaagctttgcctctgattgaaatcgatccgactcatctcttatcggattctcaatctcattgcgctgtttgcaaagagaatttcgttttgaaatcatctgctcgcgagatgccttgtaatcacatctatcatcctgattgtattcttccttggcttgcgattcgtaactcttgtccggtttgccgtcatgagctaccggcggaggatctcaccgacggaaccggtgctgctttgactgctgttaccgctactgcagaggaagaggaagactcagctgcggggttaacgatttggaggttaccaggtggaggattcgctgtagggagaatccctggtggttggagaggtggagatagaatgatgccggtggtttacacggaggttgatggtggtagactcggtgatgagagacttccgagaagagtagcttggggttcgagaagaggtggaagagatggtggaggtagtagagagagaggtggtggctttgcgggtcggatcatgaggcttttcggatgttttagtggatcatctggatccattgctgctgctgctgctgcatcatccgggtccgggtccagaattcgggttactcgtagaaccaggtcgttctctatgttcagtacggcgtcgtcttcgtcaaggagacgaaattggctagcgtgattactagaattaccaagctctcttctcaggtgaaaactaaacacgaaagaacacactcttcttctgtttaaatttttcctatgttccttattaagtttttgtctatttcagtgtaatgattatattcattcctaaaatttgaatctatgcgagtaaattgatacaaaattaggtgacatagtgtcttcagtggcaaatttaggaggatatgttactgtgagtctgtgactagataagtgagagtgtagatgaattgaagaatgtactctgaaggagattcatagttgttctatttgt

SEQ ID NO: 36705 - protein, 401 aa, Arabidopsis thaliana
  peptide (1)..(401): Ceres Seq. ID no. 13499677
  misc_feature (201)..(241): Pfam Name: Zinc finger, C3HC4 type (RING finger) Pfam Description: Zinc finger, C3HC4 type (RING finger)
  misc_feature (5)..(273): Homolog of NCBI NO: 18405518 NR Description: RING-H2 finger protein (RHC1a) [Arabidopsis
  misc_feature (6)..(249): Homolog of NCBI NO: 15231003 NR Description: expressed protein [Arabidopsis thaliana]
  misc_feature (6)..(249): Homolog of NCBI NO: 11994207 NR Description: gene_id:MPN9.20~unknown protein [Arabidopsis
  misc_feature (149)..(311): Homolog of NCBI NO: 34906008 NR Description: putative RING-H2 finger protein RHC2a
  misc_feature (102)..(295): Homolog of NCBI NO: 34902106 NR Description: unknown protein [Oryza sativa (japonica
  misc_feature (83)..(360): Homolog of NCBI NO: 15232595 NR Description: expressed protein [Arabidopsis thaliana]
  misc_feature (61)..(369): Homolog of NCBI NO: 14719329 NR Description: putative RING-H2 finger protein [Oryza sativa]
  misc_feature (3)..(398): Homolog of NCBI NO: 18424254 NR Description: expressed protein [Arabidopsis thaliana]
  misc_feature (3)..(398): Homolog of NCBI NO: 8885559 NR Description: emb|CAB62332.1~gene_id:F2O15.22~strong similarity
  misc_feature (1)..(401): Homolog of NCBI NO: 18405141 NR Description: RING-H2 finger protein (RHC2a) [Arabidopsis
MASGSYWCYSCSRFVWVSDSISCPDCDGGFLELIQEPLDFTPSDSFTTTTTTQHRSPTRFPPPSSSSSTPSASMHADNSPTPTIVTRTRSNRSPNPVIVLRGSAAAPSSDVVSEGLDRSAFQMYYDDGTDSGLRPLPPSMTEFLLGSGFDRLLDQISQIELNTNRNLRSCEHPPASKSAIEALPLIEIDPTHLLSDSQSHCAVCKENFVLKSSAREMPCNHIYHPDCILPWLAIRNSCPVCRHELPAEDLTDGTGAALTAVTATAEEEEDSAAGLTIWRLPGGGFAVGRIPGGWRGGDRMMPVVYTEVDGGRLGDERLPRRVAWGSRRGGRDGGGSRERGGGFAGRIMRLFGCFSGSSGSIAAAAAASSGSGSRIRVTRRTRSFSMFSTASSSSRRRNWLA

SEQ ID NO: 36706 - protein, 328 aa, Arabidopsis thaliana
  peptide (1)..(328): Ceres Seq. ID no. 13499678
  misc_feature (128)..(168): Pfam Name: Zinc finger, C3HC4 type (RING finger) Pfam Description: Zinc finger, C3HC4 type (RING finger)
  misc_feature (1)..(200): Homolog of NCBI NO: 18405518 NR Description: RING-H2 finger protein (RHC1a) [Arabidopsis
  misc_feature (1)..(176): Homolog of NCBI NO: 15231003 NR Description: expressed protein [Arabidopsis thaliana]
  misc_feature (1)..(176): Homolog of NCBI NO: 11994207 NR Description: gene_id:MPN9.20~unknown protein [Arabidopsis
  misc_feature (76)..(238): Homolog of NCBI NO: 34906008 NR Description: putative RING-H2 finger protein RHC2a
  misc_feature (29)..(222): Homolog of NCBI NO: 34902106 NR Description: unknown protein [Oryza sativa (japonica
  misc_feature (10)..(287): Homolog of NCBI NO: 15232595 NR Description: expressed protein [Arabidopsis thaliana]
  misc_feature (1)..(296): Homolog of NCBI NO: 14719329 NR Description: putative RING-H2 finger protein [Oryza sativa]
  misc_feature (1)..(325): Homolog of NCBI NO: 18424254 NR Description: expressed protein [Arabidopsis thaliana]
  misc_feature (1)..(325): Homolog of NCBI NO: 8885559 NR Description: emb|CAB62332.1~gene_id:F2O15.22~strong similarity
  misc_feature (1)..(328): Homolog of NCBI NO: 18405141 NR Description: RING-H2 finger protein (RHC2a) [Arabidopsis
MHADNSPTPTIVTRTRSNRSPNPVIVLRGSAAAPSSDVVSEGLDRSAFQMYYDDGTDSGLRPLPPSMTEFLLGSGFDRLLDQISQIELNTNRNLRSCEHPPASKSAIEALPLIEIDPTHLLSDSQSHCAVCKENFVLKSSAREMPCNHIYHPDCILPWLAIRNSCPVCRHELPAEDLTDGTGAALTAVTATAEEEEDSAAGLTIWRLPGGGFAVGRIPGGWRGGDRMMPVVYTEVDGGRLGDERLPRRVAWGSRRGGRDGGGSRERGGGFAGRIMRLFGCFSGSSGSIAAAAAASSGSGSRIRVTRRTRSFSMFSTASSSSRRRNWLA

SEQ ID NO: 36707 - protein, 279 aa, Arabidopsis thaliana
  peptide (1)..(279): Ceres Seq. ID no. 13499679
  misc_feature (79)..(119): Pfam Name: Zinc finger, C3HC4 type (RING finger) Pfam Description: Zinc finger, C3HC4 type (RING finger)
  misc_feature (1)..(151): Homolog of NCBI NO: 18405518 NR Description: RING-H2 finger protein (RHC1a) [Arabidopsis
  misc_feature (1)..(127): Homolog of NCBI NO: 15231003 NR Description: expressed protein [Arabidopsis thaliana]
  misc_feature (1)..(127): Homolog of NCBI NO: 11994207 NR Description: gene_id:MPN9.20~unknown protein [Arabidopsis
  misc_feature (27)..(189): Homolog of NCBI NO: 34906008 NR Description: putative RING-H2 finger protein RHC2a
  misc_feature (1)..(173): Homolog of NCBI NO: 34902106 NR Description: unknown protein [Oryza sativa (japonica
  misc_feature (1)..(238): Homolog of NCBI NO: 15232595 NR Description: expressed protein [Arabidopsis thaliana]
  misc_feature (1)..(247): Homolog of NCBI NO: 14719329 NR Description: putative RING-H2 finger protein [Oryza sativa]
  misc_feature (1)..(276): Homolog of NCBI NO: 18424254 NR Description: expressed protein [Arabidopsis thaliana]
  misc_feature (1)..(276): Homolog of NCBI NO: 8885559 NR Description: emb|CAB62332.1~gene_id:F2O15.22~strong similarity
  misc_feature (1)..(279): Homolog of NCBI NO: 18405141 NR Description: RING-H2 finger protein (RHC2a) [Arabidopsis
MYYDDGTDSGLRPLPPSMTEFLLGSGFDRLLDQISQIELNTNRNLRSCEHPPASKSAIEALPLIEIDPTHLLSDSQSHCAVCKENFVLKSSAREMPCNHIYHPDCILPWLAIRNSCPVCRHELPAEDLTDGTGAALTAVTATAEEEEDSAAGLTIWRLPGGGFAVGRIPGGWRGGDRMMPVVYTEVDGGRLGDERLPRRVAWGSRRGGRDGGGSRERGGGFAGRIMRLFGCFSGSSGSIAAAAAASSGSGSRIRVTRRTRSFSMFSTASSSSRRRNWLA

SEQ ID NO: 36708 - DNA, 1232 bp, Arabidopsis thaliana
  misc_feature (1)..(1232): Ceres Seq. ID no. 13489097
  misc_feature: MA Experiment ID: 20000180 Result: Up-regulated in Transcription
  misc_feature: MA Experiment 20000180 PARAMETER Experiment Name: At_Germinating_Seeds_P Parameter: Age (hr) Value: 24 vs. 0
  misc_feature: MA Experiment 20000180 PARAMETER Experiment Name: At_Germinating_Seeds_P Parameter: Tissue Value: Germinating Seeds
  misc_feature: MA Experiment ID: 20000184 Result: Up-regulated in Transcription
  misc_feature: MA Experiment 20000184 PARAMETER Experiment Name: At_Shoots__P Parameter: Age (day) Value: 7
  misc_feature: MA Experiment 20000184 PARAMETER Experiment Name: At_Shoots__P Parameter: Tissue Value: Shoots vs. Whole Plant
  misc_feature: MA Experiment ID: 20000185 Result: Up-regulated in Transcription
  misc_feature: MA Experiment 20000185 PARAMETER Experiment Name: At_Roots__P Parameter: Age (day) Value: 7 vs. 21
  misc_feature: MA Experiment 20000185 PARAMETER Experiment Name: At_Roots__P Parameter: Organism Value: A. thaliana
  misc_feature: MA Experiment 20000185 PARAMETER Experiment Name: At_Roots__P Parameter: Tissue Value: Roots vs. Whole Plant
  misc_feature: MA Experiment ID: 20000227 Result: Up-regulated in Transcription
  misc_feature: MA Experiment 20000227 PARAMETER Experiment Name: At_Root-Tips-vs-Tops_P Parameter: Tissue Value: Root Tips vs. Root Tops
  misc_feature: MA Experiment ID: 20000265 Result: Up-regulated in Transcription
  misc_feature: MA Experiment 20000265 PARAMETER Experiment Name: At_Open_Flower_P Parameter: Age (day) Value: 21
  misc_feature: MA Experiment 20000265 PARAMETER Experiment Name: At_Open_Flower_P Parameter: Plant Line Value: WS
  misc_feature: MA Experiment 20000265 PARAMETER Experiment Name: At_Open_Flower_P Parameter: Tissue Value: Closed Flower vs. Whole Plant
  misc_feature: MA Experiment ID: 20000286 Result: Up-regulated in Transcription
  misc_feature: MA Experiment 20000286 PARAMETER Experiment Name: At_Open_Flower_P Parameter: Age (day) Value: 21
  misc_feature: MA Experiment 20000286 PARAMETER Experiment Name: At_Open_Flower_P Parameter: Plant Line Value: WS
  misc_feature: MA Experiment 20000286 PARAMETER Experiment Name: At_Open_Flower_P Parameter: Tissue Value: Half Open vs. Whole Plant
  misc_feature: MA Experiment ID: 20000439 Result: Up-regulated in Transcription
  misc_feature: MA Experiment 20000439 PARAMETER Experiment Name: At_Roots__P Parameter: Age (day) Value: 14 vs. 21
  misc_feature: MA Experiment 20000439 PARAMETER Experiment Name: At_Roots__P Parameter: Organism Value: A. thaliana
  misc_feature: MA Experiment 20000439 PARAMETER Experiment Name: At_Roots__P Parameter: Tissue Value: Roots vs. Whole Plant
  misc_feature: MA Experiment ID: 20000451 Result: Down-regulated in Transcription
  misc_feature: MA Experiment 20000451 PARAMETER Experiment Name: At_CS6879_Shoots-Roots_P Parameter: Age (day) Value: 14
  misc_feature: MA Experiment 20000451 PARAMETER Experiment Name: At_CS6879_Shoots-Roots_P Parameter: Organism Value: A. thaliana
  misc_feature: MA Experiment 20000451 PARAMETER Experiment Name: At_CS6879_Shoots-Roots_P Parameter: Plant Line Value: CS6879 vs. WS
  misc_feature: MA Experiment 20000451 PARAMETER Experiment Name: At_CS6879_Shoots-Roots_P Parameter: Tissue Value: Roots
  misc_feature: MA Experiment ID: 20000453 Result: Up-regulated in Transcription
  misc_feature: MA Experiment 20000453 PARAMETER Experiment Name: At_100uM_ABA_P Parameter: Age (day) Value: 15
  misc_feature: MA Experiment 20000453 PARAMETER Experiment Name: At_100uM_ABA_P Parameter: Organism Value: A. thaliana
  misc_feature: MA Experiment 20000453 PARAMETER Experiment Name: At_100uM_ABA_P Parameter: Plant Line Value: WS
  misc_feature: MA Experiment 20000453 PARAMETER Experiment Name: At_100uM_ABA_P Parameter: Timepoint (hr) Value: 24
  misc_feature: MA Experiment 20000453 PARAMETER Experiment Name: At_100uM_ABA_P Parameter: Tissue Value: Aerial
  misc_feature: MA Experiment 20000453 PARAMETER Experiment Name: At_100uM_ABA_P Parameter: Treatment Value: 100uM ABA vs. No Treatment
  misc_feature: MA Experiment ID: 20000460 Result: Up-regulated in Transcription
  misc_feature: MA Experiment 20000460 PARAMETER Experiment Name: At_10percent_PEG_P Parameter: Age (day) Value: 12
  misc_feature: MA Experiment 20000460 PARAMETER Experiment Name: At_10percent_PEG_P Parameter: Organism Value: A. thaliana
  misc_feature: MA Experiment 20000460 PARAMETER Experiment Name: At_10percent_PEG_P Parameter: Plant Line Value: WS
  misc_feature: MA Experiment 20000460 PARAMETER Experiment Name: At_10percent_PEG_P Parameter: Timepoint (day) Value: 12
  misc_feature: MA Experiment 20000460 PARAMETER Experiment Name: At_10percent_PEG_P Parameter: Tissue Value: Whole Plant
  misc_feature: MA Experiment 20000460 PARAMETER Experiment Name: At_10percent_PEG_P Parameter: Treatment Value: 10percent PEG vs. No Treatment
  misc_feature: MA Experiment ID: 20001450 Result: Down-regulated in Transcription
  misc_feature: MA Experiment 20001450 PARAMETER Experiment Name: At_Far-red-induction_P Parameter: Age (day) Value: 7
  misc_feature: MA Experiment 20001450 PARAMETER Experiment Name: At_Far-red-induction_P Parameter: Light Value: Far-red vs. White
  misc_feature: MA Experiment 20001450 PARAMETER Experiment Name: At_Far-red-induction_P Parameter: Organism Value: A. thaliana
  misc_feature: MA Experiment 20001450 PARAMETER Experiment Name: At_Far-red-induction_P Parameter: Plant Line Value: Columbia
  misc_feature: MA Experiment 20001450 PARAMETER Experiment Name: At_Far-red-induction_P Parameter: Timepoint (hr) Value: 8
  misc_feature: MA Experiment 20001450 PARAMETER Experiment Name: At_Far-red-induction_P Parameter: Tissue Value: Whole Plant
  misc_feature: MA Experiment ID: 20001554 Result: Up-regulated in Transcription
  misc_feature: MA Experiment 20001554 PARAMETER Experiment Name: At_Drought_Soil_Dry_P Parameter: Age (day) Value: 21
  misc_feature: MA Experiment 20001554 PARAMETER Experiment Name: At_Drought_Soil_Dry_P Parameter: Organism Value: A. thaliana
  misc_feature: MA Experiment 20001554 PARAMETER Experiment Name: At_Drought_Soil_Dry_P Parameter: Plant Line Value: WS
  misc_feature: MA Experiment 20001554 PARAMETER Experiment Name: At_Drought_Soil_Dry_P Parameter: Post Timepoint (hr) Value: None
  misc_feature: MA Experiment 20001554 PARAMETER Experiment Name: At_Drought_Soil_Dry_P Parameter: Post-Treatment Value: None
  misc_feature: MA Experiment 20001554 PARAMETER Experiment Name: At_Drought_Soil_Dry_P Parameter: Timepoint (day) Value: 7
  misc_feature: MA Experiment 20001554 PARAMETER Experiment Name: At_Drought_Soil_Dry_P Parameter: Treatment Value: Drought vs. No Drought
  misc_feature: MA Experiment ID: 20001557 Result: Down-regulated in Transcription
  misc_feature: MA Experiment 20001557 PARAMETER Experiment Name: At_Drought_Soil_Dry_P Parameter: Age (day) Value: 27
  misc_feature: MA Experiment 20001557 PARAMETER Experiment Name: At_Drought_Soil_Dry_P Parameter: Organism Value: A. thaliana
  misc_feature: MA Experiment 20001557 PARAMETER Experiment Name: At_Drought_Soil_Dry_P Parameter: Plant Line Value: WS
  misc_feature: MA Experiment 20001557 PARAMETER Experiment Name: At_Drought_Soil_Dry_P Parameter: Post Timepoint (hr) Value: 3
  misc_feature: MA Experiment 20001557 PARAMETER Experiment Name: At_Drought_Soil_Dry_P Parameter: Post-Treatment Value: Re-Water vs. No Drought
  misc_feature: MA Experiment 20001557 PARAMETER Experiment Name: At_Drought_Soil_Dry_P Parameter: Timepoint (day) Value: 13
  misc_feature: MA Experiment 20001557 PARAMETER Experiment Name: At_Drought_Soil_Dry_P Parameter: Treatment Value: Drought vs. No Drought
  misc_feature: MA Experiment ID: 20001904 Result: Up-regulated in Transcription
  misc_feature: MA Experiment 20001904 PARAMETER Experiment Name: At_Drought_Reproduction_P Parameter: Age (day) Value: 37
  misc_feature: MA Experiment 20001904 PARAMETER Experiment Name: At_Drought_Reproduction_P Parameter: Organism Value: A. thaliana
  misc_feature: MA Experiment 20001904 PARAMETER Experiment Name: At_Drought_Reproduction_P Parameter: Plant Line Value: WS
  misc_feature: MA Experiment 20001904 PARAMETER Experiment Name: At_Drought_Reproduction_P Parameter: Timepoint (day) Value: 7
  misc_feature: MA Experiment 20001904 PARAMETER Experiment Name: At_Drought_Reproduction_P Parameter: Tissue Value: Rosettes
  misc_feature: MA Experiment 20001904 PARAMETER Experiment Name: At_Drought_Reproduction_P Parameter: Treatment Value: Drought vs. No Drought
attgatataggcgaactaattaataagactttaaaatgtctctctatcactctcttagcattttcctcctcctatctctctgccatggctcttacagtcttcaaccacgtcgagttcctcatctagacgggattctcccaaatggaaacttcgagataacccctctcaaatcaaacatgaagggtcgacaaataatcggggctaactctcttcctcattgggaaatcgccgggcacgtggagctagtctccggtggacctcagcctggaggattctatttccccgttccacgtggagtccacgcggttagactcggaaacttgggcaccatctctcagaacgtgagggtgaagagtggtttggtctactctctaacgttcggagctacgaggacttgtgctcaggatgagaacatcaaagtctctgtgcctggtcaggccaatgagcttccgctccagaccgtctttagctccgacggtggagacacttacgcttgggctttcaaggcaacttctgatgtggttaaggtcactttccataaccctggtgttcaagaagaccgcacgtgtggacctctcttagatgttgtcgcaatcaaggagattcttcctctccggtataccagaggaaacttggtgaaaaatggaggattcgagatcggtccacatgttttcgctaatttctcaaccggaatcttgattccagcaagaatccaagacttcatctctcctcttccgggatggatcgtcgaatcccttaaaccagtgaagtatatcgatagacgtcatttcaaagttccttatggacaaggggccgtcgagctagttgccggaagagaaagcgcaatagctcagatcatccgaaccatcgctggtaaagcctatatgctctcattcgcggttggtgatgcacaaaacggttgccacgggtcgatgatggtggaagcgttcgcaggaagagaaccgtttaagctttcttttatgtcagaaggtaaaggagcgttcaaaacagggcattttaggtttgttgctgattcggatcgaacgaggctaacgttttatagtgcgttttatcatacaaagcttcatgacttcggccatctttgtgggcctgttcttgatagcgttgttgttaccctggcccgttaacaatttgtggcttttaattcttattagactgaatattcgaaacactatactctattcgtaacgaatttgtggttgcactaaaag

SEQ ID NO: 36709 - protein, 370 aa, Arabidopsis thaliana
  peptide (1)..(370): Ceres Seq. ID no. 13489098
  misc_feature (48)..(370): Pfam Name: Protein of unknown function, DUF642 Pfam Description: Protein of unknown function, DUF642
  misc_feature (31)..(370): Homolog of NCBI NO: 23397043 NR Description: unknown protein [Arabidopsis thaliana]
  misc_feature (31)..(370): Homolog of NCBI NO: 21554402 NR Description: unknown [Arabidopsis thaliana]
  misc_feature (31)..(370): Homolog of NCBI NO: 18418018 NR Description: expressed protein [Arabidopsis thaliana]
  misc_feature (31)..(370): Homolog of NCBI NO: 15239049 NR Description: expressed protein [Arabidopsis thaliana]
  misc_feature (7)..(370): Homolog of NCBI NO: 7488898 NR Description: hypothetical protein - castor bean
  misc_feature (24)..(366): Homolog of NCBI NO: 30102997 NR Description: unknown protein [Oryza sativa (japonica
  misc_feature (48)..(367): Homolog of NCBI NO: 12321555 NR Description: unknown protein, 5' partial [Arabidopsis thaliana]
  misc_feature (1)..(367): Homolog of NCBI NO: 18398135 NR Description: expressed protein [Arabidopsis thaliana]
  misc_feature (1)..(369): Homolog of NCBI NO: 15227439 NR Description: expressed protein [Arabidopsis thaliana]
  misc_feature (1)..(370): Homolog of NCBI NO: 15227437 NR Description: expressed protein [Arabidopsis thaliana]
MSLYHSLSIFLLLSLCHGSYSLQPRRVPHLDGILPNGNFEITPLKSNMKGRQIIGANSLPHWEIAGHVELVSGGPQPGGFYFPVPRGVHAVRLGNLGTISQNVRVKSGLVYSLTFGATRTCAQDENIKVSVPGQANELPLQTVFSSDGGDTYAWAFKATSDVVKVTFHNPGVQEDRTCGPLLDVVAIKEILPLRYTRGNLVKNGGFEIGPHVFANFSTGILIPARIQDFISPLPGWIVESLKPVKYIDRRHFKVPYGQGAVELVAGRESAIAQIIRTIAGKAYMLSFAVGDAQNGCHGSMMVEAFAGREPFKLSFMSEGKGAFKTGHFRFVADSDRTRLTFYSAFYHTKLHDFGHLCGPVLDSVVVTLAR

SEQ ID NO: 36710 - protein, 323 aa, Arabidopsis thaliana
  peptide (1)..(323): Ceres Seq. ID no. 13489099
  misc_feature (1)..(323): Pfam Name: Protein of unknown function, DUF642 Pfam Description: Protein of unknown function, DUF642
  misc_feature (1)..(323): Homolog of NCBI NO: 23397043 NR Description: unknown protein [Arabidopsis thaliana]
  misc_feature (1)..(323): Homolog of NCBI NO: 21554402 NR Description: unknown [Arabidopsis thaliana]
  misc_feature (1)..(323): Homolog of NCBI NO: 18418018 NR Description: expressed protein [Arabidopsis thaliana]
  misc_feature (1)..(323): Homolog of NCBI NO: 15239049 NR Description: expressed protein [Arabidopsis thaliana]
  misc_feature (1)..(323): Homolog of NCBI NO: 7488898 NR Description: hypothetical protein - castor bean
  misc_feature (1)..(319): Homolog of NCBI NO: 30102997 NR Description: unknown protein [Oryza sativa (japonica
  misc_feature (1)..(320): Homolog of NCBI NO: 12321555 NR Description: unknown protein, 5' partial [Arabidopsis thaliana]
  misc_feature (1)..(320): Homolog of NCBI NO: 18398135 NR Description: expressed protein [Arabidopsis thaliana]
  misc_feature (1)..(322): Homolog of NCBI NO: 15227439 NR Description: expressed protein [Arabidopsis thaliana]
  misc_feature (1)..(323): Homolog of NCBI NO: 15227437 NR Description: expressed protein [Arabidopsis thaliana]
MKGRQIIGANSLPHWEIAGHVELVSGGPQPGGFYFPVPRGVHAVRLGNLGTISQNVRVKSGLVYSLTFGATRTCAQDENIKVSVPGQANELPLQTVFSSDGGDTYAWAFKATSDVVKVTFHNPGVQEDRTCGPLLDVVAIKEILPLRYTRGNLVKNGGFEIGPHVFANFSTGILIPARIQDFISPLPGWIVESLKPVKYIDRRHFKVPYGQGAVELVAGRESAIAQIIRTIAGKAYMLSFAVGDAQNGCHGSMMVEAFAGREPFKLSFMSEGKGAFKTGHFRFVADSDRTRLTFYSAFYHTKLHDFGHLCGPVLDSVVVTLAR

SEQ ID NO: 36711 - DNA, 1220 bp, Arabidopsis thaliana
  misc_feature (1)..(1220): Ceres Seq. ID no. 12329420
  misc_feature: MA Experiment ID: 20000171 Result: Up-regulated in Transcription
  misc_feature: MA Experiment 20000171 PARAMETER Experiment Name: At_42deg_Heat_P Parameter: Age (day) Value: 14
  misc_feature: MA Experiment 20000171 PARAMETER Experiment Name: At_42deg_Heat_P Parameter: Organism Value: A. thaliana
  misc_feature: MA Experiment 20000171 PARAMETER Experiment Name: At_42deg_Heat_P Parameter: Plant Line Value: WS
  misc_feature: MA Experiment 20000171 PARAMETER Experiment Name: At_42deg_Heat_P Parameter: Temperature (deg C) Value: 42 vs. 22
  misc_feature: MA Experiment 20000171 PARAMETER Experiment Name: At_42deg_Heat_P Parameter: Timepoint (hr) Value: 1
  misc_feature: MA Experiment 20000171 PARAMETER Experiment Name: At_42deg_Heat_P Parameter: Tissue Value: Aerial
  misc_feature: MA Experiment ID: 20000184 Result: Down-regulated in Transcription
  misc_feature: MA Experiment 20000184 PARAMETER Experiment Name: At_Shoots__P Parameter: Age (day) Value: 7
  misc_feature: MA Experiment 20000184 PARAMETER Experiment Name: At_Shoots__P Parameter: Tissue Value: Shoots vs. Whole Plant
  misc_feature: MA Experiment ID: 20000227 Result: Up-regulated in Transcription
  misc_feature: MA Experiment 20000227 PARAMETER Experiment Name: At_Root-Tips-vs-Tops_P Parameter: Tissue Value: Root Tips vs. Root Tops
  misc_feature: MA Experiment ID: 20000264 Result: Down-regulated in Transcription
  misc_feature: MA Experiment 20000264 PARAMETER Experiment Name: At_Open_Flower_P Parameter: Age (day) Value: 21
  misc_feature: MA Experiment 20000264 PARAMETER Experiment Name: At_Open_Flower_P Parameter: Plant Line Value: WS
  misc_feature: MA Experiment 20000264 PARAMETER Experiment Name: At_Open_Flower_P Parameter: Tissue Value: Open Flower vs. Whole Plant
  misc_feature: MA Experiment ID: 20000265 Result: Down-regulated in Transcription
  misc_feature: MA Experiment 20000265 PARAMETER Experiment Name: At_Open_Flower_P Parameter: Age (day) Value: 21
  misc_feature: MA Experiment 20000265 PARAMETER Experiment Name: At_Open_Flower_P Parameter: Plant Line Value: WS
  misc_feature: MA Experiment 20000265 PARAMETER Experiment Name: At_Open_Flower_P Parameter: Tissue Value: Closed Flower vs. Whole Plant
  misc_feature: MA Experiment ID: 20000286 Result: Down-regulated in Transcription
  misc_feature: MA Experiment 20000286 PARAMETER Experiment Name: At_Open_Flower_P Parameter: Age (day) Value: 21
  misc_feature: MA Experiment 20000286 PARAMETER Experiment Name: At_Open_Flower_P Parameter: Plant Line Value: WS
  misc_feature: MA Experiment 20000286 PARAMETER Experiment Name: At_Open_Flower_P Parameter: Tissue Value: Half Open vs. Whole Plant
  misc_feature: MA Experiment ID: 20000438 Result: Down-regulated in Transcription
  misc_feature: MA Experiment 20000438 PARAMETER Experiment Name: At_Shoots__P Parameter: Age (day) Value: 14
  misc_feature: MA Experiment 20000438 PARAMETER Experiment Name: At_Shoots__P Parameter: Tissue Value: Shoots vs. Whole Plant
  misc_feature: MA Experiment ID: 20000527 Result: Down-regulated in Transcription
  misc_feature: MA Experiment 20000527 PARAMETER Experiment Name: At_10percent_PEG_P Parameter: Age (day) Value: 20
  misc_feature: MA Experiment 20000527 PARAMETER Experiment Name: At_10percent_PEG_P Parameter: Organism Value: A. thaliana
  misc_feature: MA Experiment 20000527 PARAMETER Experiment Name: At_10percent_PEG_P Parameter: Plant Line Value: WS
  misc_feature: MA Experiment 20000527 PARAMETER Experiment Name: At_10percent_PEG_P Parameter: Timepoint (day) Value: 20
  misc_feature: MA Experiment 20000527 PARAMETER Experiment Name: At_10percent_PEG_P Parameter: Tissue Value: Whole Plant
  misc_feature: MA Experiment 20000527 PARAMETER Experiment Name: At_10percent_PEG_P Parameter: Treatment Value: 10percent PEG vs. No Treatment
  misc_feature: MA Experiment ID: 20000794 Result: Down-regulated in Transcription
  misc_feature: MA Experiment 20000794 PARAMETER Experiment Name: At_Petals_P Parameter: Age (day) Value: 23-25 days
  misc_feature: MA Experiment 20000794 PARAMETER Experiment Name: At_Petals_P Parameter: Plant Line Value: WS
  misc_feature: MA Experiment 20000794 PARAMETER Experiment Name: At_Petals_P Parameter: Tissue Value: Petals vs. Whole plant
  misc_feature: MA Experiment ID: 20001556 Result: Down-regulated in Transcription
  misc_feature: MA Experiment 20001556 PARAMETER Experiment Name: At_Drought_Soil_Dry_P Parameter: Age (day) Value: 26
  misc_feature: MA Experiment 20001556 PARAMETER Experiment Name: At_Drought_Soil_Dry_P Parameter: Organism Value: A. thaliana
  misc_feature: MA Experiment 20001556 PARAMETER Experiment Name: At_Drought_Soil_Dry_P Parameter: Plant Line Value: WS
  misc_feature: MA Experiment 20001556 PARAMETER Experiment Name: At_Drought_Soil_Dry_P Parameter: Post Timepoint (hr) Value: None
  misc_feature: MA Experiment 20001556 PARAMETER Experiment Name: At_Drought_Soil_Dry_P Parameter: Post-Treatment Value: None
  misc_feature: MA Experiment 20001556 PARAMETER Experiment Name: At_Drought_Soil_Dry_P Parameter: Timepoint (day) Value: 12
  misc_feature: MA Experiment 20001556 PARAMETER Experiment Name: At_Drought_Soil_Dry_P Parameter: Treatment Value: Drought vs. No Drought
  misc_feature: MA Experiment ID: 20001557 Result: Down-regulated in Transcription
  misc_feature: MA Experiment 20001557 PARAMETER Experiment Name: At_Drought_Soil_Dry_P Parameter: Age (day) Value: 27
  misc_feature: MA Experiment 20001557 PARAMETER Experiment Name: At_Drought_Soil_Dry_P Parameter: Organism Value: A. thaliana
  misc_feature: MA Experiment 20001557 PARAMETER Experiment Name: At_Drought_Soil_Dry_P Parameter: Plant Line Value: WS
  misc_feature: MA Experiment 20001557 PARAMETER Experiment Name: At_Drought_Soil_Dry_P Parameter: Post Timepoint (hr) Value: 3
  misc_feature: MA Experiment 20001557 PARAMETER Experiment Name: At_Drought_Soil_Dry_P Parameter: Post-Treatment Value: Re-Water vs. No Drought
  misc_feature: MA Experiment 20001557 PARAMETER Experiment Name: At_Drought_Soil_Dry_P Parameter: Timepoint (day) Value: 13
  misc_feature: MA Experiment 20001557 PARAMETER Experiment Name: At_Drought_Soil_Dry_P Parameter: Treatment Value: Drought vs. No Drought
  misc_feature: MA Experiment ID: 20001558 Result: Down-regulated in Transcription
  misc_feature: MA Experiment 20001558 PARAMETER Experiment Name: At_Drought_Soil_Dry_P Parameter: Age (day) Value: 27
  misc_feature: MA Experiment 20001558 PARAMETER Experiment Name: At_Drought_Soil_Dry_P Parameter: Organism Value: A. thaliana
  misc_feature: MA Experiment 20001558 PARAMETER Experiment Name: At_Drought_Soil_Dry_P Parameter: Plant Line Value: WS
  misc_feature: MA Experiment 20001558 PARAMETER Experiment Name: At_Drought_Soil_Dry_P Parameter: Post Timepoint (hr) Value: 6
  misc_feature: MA Experiment 20001558 PARAMETER Experiment Name: At_Drought_Soil_Dry_P Parameter: Post-Treatment Value: Re-Water vs. No Drought
  misc_feature: MA Experiment 20001558 PARAMETER Experiment Name: At_Drought_Soil_Dry_P Parameter: Timepoint (day) Value: 13
  misc_feature: MA Experiment 20001558 PARAMETER Experiment Name: At_Drought_Soil_Dry_P Parameter: Treatment Value: Drought vs. No Drought
  misc_feature: MA Experiment ID: 20001560 Result: Down-regulated in Transcription
  misc_feature: MA Experiment 20001560 PARAMETER Experiment Name: At_Drought_Soil_Dry_P Parameter: Age (day) Value: 28
  misc_feature: MA Experiment 20001560 PARAMETER Experiment Name: At_Drought_Soil_Dry_P Parameter: Organism Value: A. thaliana
  misc_feature: MA Experiment 20001560 PARAMETER Experiment Name: At_Drought_Soil_Dry_P Parameter: Plant Line Value: WS
  misc_feature: MA Experiment 20001560 PARAMETER Experiment Name: At_Drought_Soil_Dry_P Parameter: Post Timepoint (hr) Value: None
  misc_feature: MA Experiment 20001560 PARAMETER Experiment Name: At_Drought_Soil_Dry_P Parameter: Post-Treatment Value: None
  misc_feature: MA Experiment 20001560 PARAMETER Experiment Name: At_Drought_Soil_Dry_P Parameter: Timepoint (day) Value: 14
  misc_feature: MA Experiment 20001560 PARAMETER Experiment Name: At_Drought_Soil_Dry_P Parameter: Treatment Value: Drought vs. No Drought
  misc_feature: MA Experiment ID: 20001768 Result: Up-regulated in Transcription
  misc_feature: MA Experiment 20001768 PARAMETER Experiment Name: At_Far-red-enriched-adult_P Parameter: Age (day) Value: 28
  misc_feature: MA Experiment 20001768 PARAMETER Experiment Name: At_Far-red-enriched-adult_P Parameter: Light Value: Far-red enriched vs. White
  misc_feature: MA Experiment 20001768 PARAMETER Experiment Name: At_Far-red-enriched-adult_P Parameter: Organism Value: A. thaliana
  misc_feature: MA Experiment 20001768 PARAMETER Experiment Name: At_Far-red-enriched-adult_P Parameter: Plant Line Value: Columbia
  misc_feature: MA Experiment 20001768 PARAMETER Experiment Name: At_Far-red-enriched-adult_P Parameter: Timepoint (hr) Value: 1
  misc_feature: MA Experiment 20001768 PARAMETER Experiment Name: At_Far-red-enriched-adult_P Parameter: Tissue Value: Aerial
  misc_feature: MA Experiment ID: 20001769 Result: Down-regulated in Transcription
  misc_feature: MA Experiment 20001769 PARAMETER Experiment Name: At_Far-red-enriched-adult_P Parameter: Age (day) Value: 28
  misc_feature: MA Experiment 20001769 PARAMETER Experiment Name: At_Far-red-enriched-adult_P Parameter: Light Value: Far-red enriched vs. White
  misc_feature: MA Experiment 20001769 PARAMETER Experiment Name: At_Far-red-enriched-adult_P Parameter: Organism Value: A. thaliana
  misc_feature: MA Experiment 20001769 PARAMETER Experiment Name: At_Far-red-enriched-adult_P Parameter: Plant Line Value: Columbia
  misc_feature: MA Experiment 20001769 PARAMETER Experiment Name: At_Far-red-enriched-adult_P Parameter: Timepoint (hr) Value: 4
  misc_feature: MA Experiment 20001769 PARAMETER Experiment Name: At_Far-red-enriched-adult_P Parameter: Tissue Value: Aerial
  misc_feature: MA Experiment ID: 20001771 Result: Up-regulated in Transcription
  misc_feature: MA Experiment 20001771 PARAMETER Experiment Name: At_Far-red-enriched-adult_P Parameter: Age (day) Value: 28
  misc_feature: MA Experiment 20001771 PARAMETER Experiment Name: At_Far-red-enriched-adult_P Parameter: Light Value: Far-red enriched vs. White
  misc_feature: MA Experiment 20001771 PARAMETER Experiment Name: At_Far-red-enriched-adult_P Parameter: Organism Value: A. thaliana
  misc_feature: MA Experiment 20001771 PARAMETER Experiment Name: At_Far-red-enriched-adult_P Parameter: Plant Line Value: Columbia
  misc_feature: MA Experiment 20001771 PARAMETER Experiment Name: At_Far-red-enriched-adult_P Parameter: Timepoint (hr) Value: 16
  misc_feature: MA Experiment 20001771 PARAMETER Experiment Name: At_Far-red-enriched-adult_P Parameter: Tissue Value: Aerial
  misc_feature: MA Experiment ID: 20001773 Result: Up-regulated in Transcription
  misc_feature: MA Experiment 20001773 PARAMETER Experiment Name: At_Far-red-enriched-adult_P Parameter: Age (day) Value: 30
  misc_feature: MA Experiment 20001773 PARAMETER Experiment Name: At_Far-red-enriched-adult_P Parameter: Light Value: Far-red enriched vs. White
  misc_feature: MA Experiment 20001773 PARAMETER Experiment Name: At_Far-red-enriched-adult_P Parameter: Organism Value: A. thaliana
  misc_feature: MA Experiment 20001773 PARAMETER Experiment Name: At_Far-red-enriched-adult_P Parameter: Plant Line Value: Columbia
  misc_feature: MA Experiment 20001773 PARAMETER Experiment Name: At_Far-red-enriched-adult_P Parameter: Timepoint (hr) Value: 48
  misc_feature: MA Experiment 20001773 PARAMETER Experiment Name: At_Far-red-enriched-adult_P Parameter: Tissue Value: Aerial
  misc_feature: MA Experiment ID: 20001905 Result: Down-regulated in Transcription
  misc_feature: MA Experiment 20001905 PARAMETER Experiment Name: At_Drought_Reproduction_P Parameter: Age (day) Value: 40
  misc_feature: MA Experiment 20001905 PARAMETER Experiment Name: At_Drought_Reproduction_P Parameter: Organism Value: A. thaliana
  misc_feature: MA Experiment 20001905 PARAMETER Experiment Name: At_Drought_Reproduction_P Parameter: Plant Line Value: WS
  misc_feature: MA Experiment 20001905 PARAMETER Experiment Name: At_Drought_Reproduction_P Parameter: Timepoint (day) Value: 10
  misc_feature: MA Experiment 20001905 PARAMETER Experiment Name: At_Drought_Reproduction_P Parameter: Tissue Value: Rosettes
  misc_feature: MA Experiment 20001905 PARAMETER Experiment Name: At_Drought_Reproduction_P Parameter: Treatment Value: Drought vs. No Drought
  misc_feature: MA Experiment ID: 20001906 Result: Down-regulated in Transcription
  misc_feature: MA Experiment 20001906 PARAMETER Experiment Name: At_Drought_Reproduction_P Parameter: Age (day) Value: 35
  misc_feature: MA Experiment 20001906 PARAMETER Experiment Name: At_Drought_Reproduction_P Parameter: Organism Value: A. thaliana
  misc_feature: MA Experiment 20001906 PARAMETER Experiment Name: At_Drought_Reproduction_P Parameter: Plant Line Value: WS
  misc_feature: MA Experiment 20001906 PARAMETER Experiment Name: At_Drought_Reproduction_P Parameter: Timepoint (day) Value: 5
  misc_feature: MA Experiment 20001906 PARAMETER Experiment Name: At_Drought_Reproduction_P Parameter: Tissue Value: Siliques
  misc_feature: MA Experiment 20001906 PARAMETER Experiment Name: At_Drought_Reproduction_P Parameter: Treatment Value: Drought vs. No Drought
  misc_feature: MA Experiment ID: 20001908 Result: Down-regulated in Transcription
  misc_feature: MA Experiment 20001908 PARAMETER Experiment Name: At_Drought_Reproduction_P Parameter: Age (day) Value: 40
  misc_feature: MA Experiment 20001908 PARAMETER Experiment Name: At_Drought_Reproduction_P Parameter: Organism Value: A. thaliana
  misc_feature: MA Experiment 20001908 PARAMETER Experiment Name: At_Drought_Reproduction_P Parameter: Plant Line Value: WS
  misc_feature: MA Experiment 20001908 PARAMETER Experiment Name: At_Drought_Reproduction_P Parameter: Timepoint (day) Value: 10
  misc_feature: MA Experiment 20001908 PARAMETER Experiment Name: At_Drought_Reproduction_P Parameter: Tissue Value: Siliques
  misc_feature: MA Experiment 20001908 PARAMETER Experiment Name: At_Drought_Reproduction_P Parameter: Treatment Value: Drought vs. No Drought
  misc_feature: MA Experiment ID: 20001911 Result: Down-regulated in Transcription
  misc_feature: MA Experiment 20001911 PARAMETER Experiment Name: At_Drought_Reproduction_P Parameter: Age (day) Value: 40
  misc_feature: MA Experiment 20001911 PARAMETER Experiment Name: At_Drought_Reproduction_P Parameter: Organism Value: A. thaliana
  misc_feature: MA Experiment 20001911 PARAMETER Experiment Name: At_Drought_Reproduction_P Parameter: Plant Line Value: WS
  misc_feature: MA Experiment 20001911 PARAMETER Experiment Name: At_Drought_Reproduction_P Parameter: Timepoint (day) Value: 10
  misc_feature: MA Experiment 20001911 PARAMETER Experiment Name: At_Drought_Reproduction_P Parameter: Tissue Value: Flowers
  misc_feature: MA Experiment 20001911 PARAMETER Experiment Name: At_Drought_Reproduction_P Parameter: Treatment Value: Drought vs. No Drought
aacccaacaaattcattctaaatacatttcttttcactcaagaaattaaaatttcgaaaagtttgttaaaatgaatgcacacatgctcaatctccttgtcatagtcatttttgtagtttctttcgatgtccaagcactcagtcctcactactacgaccatacttgtccacaagccgaccacattgtaaccaatgcagtcaagaaagccatgtcaaacgaccaaactgtccctgctgcgcttttgaggatgcatttccacgactgtttcgtcagaggatgtgatggctcagttctcttagactctaaggggaagaacaaagcagagaaagatggacctcctaacatctcactccatgcattttatgtgattgacaatgcaaagaaggcattagaagaacaatgtcccggtatcgtctcttgcgccgacattctttcacttgcggcaagagatgctgtcgctctctcaggagggcctacatgggcagtgccaaaagggagaaaagatggaagaatatcaaaggcaatagaaacaagacaactaccagctcctactttcaacatttctcaattgcgtcaaaattttggccaaagaggcctctctatgcatgatcttgttgctctctctggaggtcatacactaggattcgcccactgttcatcgttccagaataggctccataaattcaacacacaaaaggaggttgacccaacactaaacccctcattcgcagccaggttggagggagtgtgcccggcccataacacggtgaagaatgctggatcgaacatggatggaaccgtgacgtcattcgacaatatctactacaagatgcttatccaaggcaagtcactattctcatccgacgaatcgcttcttgcagtaccctctactaagaaactcgtggccaaatatgcaaattccaacgaagagttcgagagggcttttgtgaaatcgatgatcaagatgagtagtatcagtgggaatggcaatgaggtcagacttaactgcagaagggttcgctagaatctcaatctacgcttccaacatcacgttactactacatttttatgtctttcgttttctttcgtcacattgattacttgtgaatgggcctttctaaagattaaggcagaggttcttgtatcagaattatctatcaatctctcgtgtgtgcttgtataggcatttatttacaagtaataagatcttttctctttct

SEQ ID NO: 36712 - protein, 317 aa, Arabidopsis thaliana
  peptide (1)..(317): Ceres Seq. ID no. 12329421
  misc_feature (39)..(284): Pfam Name: Peroxidase Pfam Description: Peroxidase
  misc_feature (1)..(317): Homolog of NCBI NO: 15238309 NR Description: peroxidase, putative
MNAHMLNLLVIVIFVVSFDVQALSPHYYDHTCPQADHIVTNAVKKAMSNDQTVPAALLRMHFHDCFVRGCDGSVLLDSKGKNKAEKDGPPNISLHAFYVIDNAKKALEEQCPGIVSCADILSLAARDAVALSGGPTWAVPKGRKDGRISKAIETRQLPAPTFNISQLRQNFGQRGLSMHDLVALSGGHTLGFAHCSSFQNRLHKFNTQKEVDPTLNPSFAARLEGVCPAHNTVKNAGSNMDGTVTSFDNIYYKMLIQGKSLFSSDESLLAVPSTKKLVAKYANSNEEFERAFVKSMIKMSSISGNGNEVRLNCRRVR

SEQ ID NO: 36713 - protein, 313 aa, Arabidopsis thaliana
  peptide (1)..(313): Ceres Seq. ID no. 12329422
  misc_feature (35)..(280): Pfam Name: Peroxidase Pfam Description: Peroxidase
  misc_feature (1)..(313): Homolog of NCBI NO: 15238309 NR Description: peroxidase, putative
MLNLLVIVIFVVSFDVQALSPHYYDHTCPQADHIVTNAVKKAMSNDQTVPAALLRMHFHDCFVRGCDGSVLLDSKGKNKAEKDGPPNISLHAFYVIDNAKKALEEQCPGIVSCADILSLAARDAVALSGGPTWAVPKGRKDGRISKAIETRQLPAPTFNISQLRQNFGQRGLSMHDLVALSGGHTLGFAHCSSFQNRLHKFNTQKEVDPTLNPSFAARLEGVCPAHNTVKNAGSNMDGTVTSFDNIYYKMLIQGKSLFSSDESLLAVPSTKKLVAKYANSNEEFERAFVKSMIKMSSISGNGNEVRLNCRRVR

SEQ ID NO: 36714 - protein, 271 aa, Arabidopsis thaliana
  peptide (1)..(271): Ceres Seq. ID no. 12329423
  misc_feature (1)..(238): Pfam Name: Peroxidase Pfam Description: Peroxidase
  misc_feature (1)..(271): Homolog of NCBI NO: 15238309 NR Description: peroxidase, putative
MSNDQTVPAALLRMHFHDCFVRGCDGSVLLDSKGKNKAEKDGPPNISLHAFYVIDNAKKALEEQCPGIVSCADILSLAARDAVALSGGPTWAVPKGRKDGRISKAIETRQLPAPTFNISQLRQNFGQRGLSMHDLVALSGGHTLGFAHCSSFQNRLHKFNTQKEVDPTLNPSFAARLEGVCPAHNTVKNAGSNMDGTVTSFDNIYYKMLIQGKSLFSSDESLLAVPSTKKLVAKYANSNEEFERAFVKSMIKMSSISGNGNEVRLNCRRVR

SEQ ID NO: 36715 - DNA, 1136 bp, Arabidopsis thaliana
  misc_feature (1)..(1136): Ceres Seq. ID no. 12562322
  misc_feature: MA Experiment ID: 20000185 Result: Up-regulated in Transcription
  misc_feature: MA Experiment 20000185 PARAMETER Experiment Name: At_Roots__P Parameter: Age (day) Value: 7 vs. 21
  misc_feature: MA Experiment 20000185 PARAMETER Experiment Name: At_Roots__P Parameter: Organism Value: A. thaliana
  misc_feature: MA Experiment 20000185 PARAMETER Experiment Name: At_Roots__P Parameter: Tissue Value: Roots vs. Whole Plant
  misc_feature: MA Experiment ID: 20000439 Result: Up-regulated in Transcription
  misc_feature: MA Experiment 20000439 PARAMETER Experiment Name: At_Roots__P Parameter: Age (day) Value: 14 vs. 21
  misc_feature: MA Experiment 20000439 PARAMETER Experiment Name: At_Roots__P Parameter: Organism Value: A. thaliana
  misc_feature: MA Experiment 20000439 PARAMETER Experiment Name: At_Roots__P Parameter: Tissue Value: Roots vs. Whole Plant
  misc_feature: Phenotype: ROSETTE LEAVES Other
  misc_feature: Phenotype: WHOLE PLANT Color-High Anthocyanin
  misc_feature: Phenotype: WHOLE PLANT Size-Small
  misc_feature: Phenotype: INFLORESCENCE Height-Short
  misc_feature: Phenotype: ROSETTE LEAVES Other
  misc_feature: Phenotype: WHOLE PLANT Size-Small
  misc_feature: Phenotype: ROSETTE LEAVES Other
  misc_feature: Phenotype: WHOLE PLANT Color-High Anthocyanin
  misc_feature: Phenotype: WHOLE PLANT Size-Small
  misc_feature: Phenotype: INFLORESCENCE Height-Short
aattagaatctttcccgacaaagaaatagctctaagcacgacctttttcttcctaagtcgccggcgagacaaaaaaaacataatcccgacggttacacgtaccggataattgtatttaagttgaatccgctttgtactttcctcacagccaaagatttttccttactaggattttcattttctcttctgttttcgtttcaaattcagaaaatcttccgtttcaatccggtttatatcggtttttagcaatgtcgatggtaactgtcaaagttagcaacgtttctcttgaagcaacagaaagagatctcaaggagttcttctctttttccggcgatattgcttacctcgagactcaaagcgagaatgatggttctaaattagcatatgtcacattcaaggatttacaaggagctgaaaccgcagttctcctcaccggatcgacgattgttgattcatcggtcacagttacaatgtcaccagattaccaactacctcctgatgctttagcttccattgaatcattgaaagagagcaataaatcatcatctcctacgcgagaagatgtatcggtatttagaaaagctgaagatgttgtaagtggtatgatttcaaaagggtttgttttaggtaaagacgctatagctaaagcgaagagtcttgatgagaagcatcagttgacatcaacagcttcagctagagttacatctttcgacaaaagaatcggattcacggagaaaatcaacaccgggactacagttgtgagcgaaaaagttaaagaagttgatcagaagtttcaagtcacagagaaaacaaaatcagcaatagctgctgctgagcagacagtgagcaatgctggttctgctataatgaaaaaccggtatgttttaaccggtgccacgtgggttacgggtgcgtttaacagagtgagtaaagctgctgaagaagttggacaaaaggcgaaagagaaagttggtttggctgaggaagaagaagaagagaagaagaaagtggttgatgaagttgctatagttcatctgactgaatcaccaaaggctttagaccaatcagaacaagattcaaaactccctgaatcaaaatcacagccacacaaggagcttaacgcaagtgttgtttga

SEQ ID NO: 36716 - protein, 295 aa, Arabidopsis thaliana
  peptide (1)..(295): Ceres Seq. ID no. 12562323
  misc_feature (6)..(73): Pfam Name: RNA recognition motif. (a.k.a. RRM, RBD, or RNP domain) Pfam Description: RNA recognition motif. (a.k.a. RRM, RBD, or RNP
  misc_feature (1)..(268): Homolog of NCBI NO: 15237419 NR Description: RRM-containing protein
  misc_feature (1)..(268): Homolog of NCBI NO: 21592997 NR Description: unknown [Arabidopsis thaliana]
  misc_feature (1)..(265): Homolog of NCBI NO: 18071362 NR Description: putative splicing regulatory protein
  misc_feature (1)..(249): Homolog of NCBI NO: 34897896 NR Description: ESTs D15336(C0474),C98053(C0474) correspond to a of the predicted gene.~Similar to Arabidopsis thaliana DNA
  misc_feature (5)..(288): Homolog of NCBI NO: 38344181 NR Description: OSJNBa0053K19.20 [Oryza sativa (japonica
  misc_feature (1)..(250): Homolog of NCBI NO: 38347069 NR Description: OSJNBa0006A01.10 [Oryza sativa (japonica
  misc_feature (3)..(282): Homolog of NCBI NO: 7485085 NR Description: hypothetical protein - Arabidopsis thaliana
  misc_feature (1)..(282): Homolog of NCBI NO: 18414951 NR Description: RRM-containing protein
  misc_feature (3)..(295): Homolog of NCBI NO: 8809670 NR Description: gene_id:MSD23.5~pir||C71447~similar to unknown
  misc_feature (1)..(295): Homolog of NCBI NO: 30695063 NR Description: RNA recognition motif (RRM)-containing protein
MSMVTVKVSNVSLEATERDLKEFFSFSGDIAYLETQSENDGSKLAYVTFKDLQGAETAVLLTGSTIVDSSVTVTMSPDYQLPPDALASIESLKESNKSSSPTREDVSVFRKAEDVVSGMISKGFVLGKDAIAKAKSLDEKHQLTSTASARVTSFDKRIGFTEKINTGTTVVSEKVKEVDQKFQVTEKTKSAIAAAEQTVSNAGSAIMKNRYVLTGATWVTGAFNRVSKAAEEVGQKAKEKVGLAEEEEEEKKKVVDEVAIVHLTESPKALDQSEQDSKLPESKSQPHKELNASVV

SEQ ID NO: 36717 - protein, 293 aa, Arabidopsis thaliana
  peptide (1)..(293): Ceres Seq. ID no. 12562324
  misc_feature (4)..(71): Pfam Name: RNA recognition motif. (a.k.a. RRM, RBD, or RNP domain) Pfam Description: RNA recognition motif. (a.k.a. RRM, RBD, or RNP
  misc_feature (1)..(266): Homolog of NCBI NO: 15237419 NR Description: RRM-containing protein
  misc_feature (1)..(266): Homolog of NCBI NO: 21592997 NR Description: unknown [Arabidopsis thaliana]
  misc_feature (1)..(263): Homolog of NCBI NO: 18071362 NR Description: putative splicing regulatory protein
  misc_feature (1)..(247): Homolog of NCBI NO: 34897896 NR Description: ESTs D15336(C0474),C98053(C0474) correspond to a of the predicted gene.~Similar to Arabidopsis thaliana DNA
  misc_feature (3)..(286): Homolog of NCBI NO: 38344181 NR Description: OSJNBa0053K19.20 [Oryza sativa (japonica
  misc_feature (1)..(248): Homolog of NCBI NO: 38347069 NR Description: OSJNBa0006A01.10 [Oryza sativa (japonica
  misc_feature (1)..(280): Homolog of NCBI NO: 7485085 NR Description: hypothetical protein - Arabidopsis thaliana
  misc_feature (1)..(280): Homolog of NCBI NO: 18414951 NR Description: RRM-containing protein
  misc_feature (1)..(293): Homolog of NCBI NO: 8809670 NR Description: gene_id:MSD23.5~pir||C71447~similar to unknown
  misc_feature (1)..(293): Homolog of NCBI NO: 30695063 NR Description: RNA recognition motif (RRM)-containing protein
MVTVKVSNVSLEATERDLKEFFSFSGDIAYLETQSENDGSKLAYVTFKDLQGAETAVLLTGSTIVDSSVTVTMSPDYQLPPDALASIESLKESNKSSSPTREDVSVFRKAEDVVSGMISKGFVLGKDAIAKAKSLDEKHQLTSTASARVTSFDKRIGFTEKINTGTTVVSEKVKEVDQKFQVTEKTKSAIAAAEQTVSNAGSAIMKNRYVLTGATWVTGAFNRVSKAAEEVGQKAKEKVGLAEEEEEEKKKVVDEVAIVHLTESPKALDQSEQDSKLPESKSQPHKELNASVV

SEQ ID NO: 36718 - protein, 221 aa, Arabidopsis thaliana
  peptide (1)..(221): Ceres Seq. ID no. 12562325
  misc_feature (1)..(194): Homolog of NCBI NO: 15237419 NR Description: RRM-containing protein
  misc_feature (1)..(194): Homolog of NCBI NO: 21592997 NR Description: unknown [Arabidopsis thaliana]
  misc_feature (1)..(191): Homolog of NCBI NO: 18071362 NR Description: putative splicing regulatory protein
  misc_feature (1)..(175): Homolog of NCBI NO: 34897896 NR Description: ESTs D15336(C0474),C98053(C0474) correspond to a of the predicted gene.~Similar to Arabidopsis thaliana DNA
  misc_feature (1)..(214): Homolog of NCBI NO: 38344181 NR Description: OSJNBa0053K19.20 [Oryza sativa (japonica
  misc_feature (1)..(176): Homolog of NCBI NO: 38347069 NR Description: OSJNBa0006A01.10 [Oryza sativa (japonica
  misc_feature (1)..(208): Homolog of NCBI NO: 7485085 NR Description: hypothetical protein - Arabidopsis thaliana
  misc_feature (1)..(208): Homolog of NCBI NO: 18414951 NR Description: RRM-containing protein
  misc_feature (1)..(221): Homolog of NCBI NO: 8809670 NR Description: gene_id:MSD23.5~pir||C71447~similar to unknown
  misc_feature (1)..(221): Homolog of NCBI NO: 30695063 NR Description: RNA recognition motif (RRM)-containing protein
MSPDYQLPPDALASIESLKESNKSSSPTREDVSVFRKAEDVVSGMISKGFVLGKDAIAKAKSLDEKHQLTSTASARVTSFDKRIGFTEKINTGTTVVSEKVKEVDQKFQVTEKTKSAIAAAEQTVSNAGSAIMKNRYVLTGATWVTGAFNRVSKAAEEVGQKAKEKVGLAEEEEEEKKKVVDEVAIVHLTESPKALDQSEQDSKLPESKSQPHKELNASVV

SEQ ID NO: 36719 - DNA, 3042 bp, Arabidopsis thaliana
  misc_feature (1)..(3042): Ceres Seq. ID no. 12489473
  misc_feature: MA Experiment ID: 20000235 Result: Down-regulated in Transcription
  misc_feature: MA Experiment 20000235 PARAMETER Experiment Name: At_Siliques_P Parameter: Age (day) Value: 21
  misc_feature: MA Experiment 20000235 PARAMETER Experiment Name: At_Siliques_P Parameter: Organism Value: A. thaliana
  misc_feature: MA Experiment 20000235 PARAMETER Experiment Name: At_Siliques_P Parameter: Plant Line Value: WS
  misc_feature: MA Experiment 20000235 PARAMETER Experiment Name: At_Siliques_P Parameter: Tissue Value: 5-10mm Siliques vs. Whole Plant
  misc_feature: MA Experiment ID: 20000496 Result: Down-regulated in Transcription
  misc_feature: MA Experiment 20000496 PARAMETER Experiment Name: At_Guard_Cells_P Parameter: Harvest Date Value: 7/19/2002
  misc_feature: MA Experiment 20000496 PARAMETER Experiment Name: At_Guard_Cells_P Parameter: Organism Value: Canola
  misc_feature: MA Experiment 20000496 PARAMETER Experiment Name: At_Guard_Cells_P Parameter: Tissue Value: Guard Cells vs. Leaves
  misc_feature: MA Experiment ID: 20001451 Result: Up-regulated in Transcription
  misc_feature: MA Experiment 20001451 PARAMETER Experiment Name: At_Far-red-induction_P Parameter: Age (day) Value: 7
  misc_feature: MA Experiment 20001451 PARAMETER Experiment Name: At_Far-red-induction_P Parameter: Light Value: Far-red vs. White
  misc_feature: MA Experiment 20001451 PARAMETER Experiment Name: At_Far-red-induction_P Parameter: Organism Value: A. thaliana
  misc_feature: MA Experiment 20001451 PARAMETER Experiment Name: At_Far-red-induction_P Parameter: Plant Line Value: Columbia
  misc_feature: MA Experiment 20001451 PARAMETER Experiment Name: At_Far-red-induction_P Parameter: Timepoint (hr) Value: 24
  misc_feature: MA Experiment 20001451 PARAMETER Experiment Name: At_Far-red-induction_P Parameter: Tissue Value: Whole Plant
  misc_feature: MA Experiment ID: 20001911 Result: Up-regulated in Transcription
  misc_feature: MA Experiment 20001911 PARAMETER Experiment Name: At_Drought_Reproduction_P Parameter: Age (day) Value: 40
  misc_feature: MA Experiment 20001911 PARAMETER Experiment Name: At_Drought_Reproduction_P Parameter: Organism Value: A. thaliana
  misc_feature: MA Experiment 20001911 PARAMETER Experiment Name: At_Drought_Reproduction_P Parameter: Plant Line Value: WS
  misc_feature: MA Experiment 20001911 PARAMETER Experiment Name: At_Drought_Reproduction_P Parameter: Timepoint (day) Value: 10
  misc_feature: MA Experiment 20001911 PARAMETER Experiment Name: At_Drought_Reproduction_P Parameter: Tissue Value: Flowers
  misc_feature: MA Experiment 20001911 PARAMETER Experiment Name: At_Drought_Reproduction_P Parameter: Treatment Value: Drought vs. No Drought
aaacaaaaaaaaaaattcacccaaaaaaaaaaaacctcgttgccttcttcttcgccgttacagtcctctttctttcttcaattcgccgtcaaaatcttctctttctcttcccccgccggtccttcaccaatcctctgatctctctacacacgaacctttgattttgaccaacgtcgatgcatgttcatgactagtctcttcctcaatccttcaatttcatcaattcacgtcgatttcgtatccgattcgttgttctagctctttgtgtggtgttagggttttaagattttggaattggggtttggagtttgtgatgtttgaagtcaaaatggggtcaaagatgtgcatgaacgcttcatgtggtacgacttctactgttgaatggaagaaaggttggcctcttcgatctggtcttctcgctgatctctgttatcgttgcggatctgcgtatgagagttctctattctgtgaacaatttcataaggaccaatctggttggagggaatgctatttgtgtagcaagagactacattgtggatgcattgcttctaaggtaacgattgagttaatggactatggtggtgttggttgtagtacatgtgcttgctgccatcaactcaatttgaacacaaggggtgagaatccaggtgtttttagcagattgccaatgaaaacgttagctgataggcaacatgtaaatggcgaaagcggaggaagaaacgaaggcgatctcttttctcagccactagtcatgggcggagataaaagggaagagttcatgcctcaccgtgggtttggtaagctaatgagtccagaaagtacaaccaccgggcataggctggatgctgctggggaaatgcatgaatcatcacctttacagccatctttaaatatgggtttggctgtgaatccgtttagcccatcttttgcaaccgaggctgtcgagggaatgaaacacatcagtccttctcagtccaacatggtccattgctctgcttctaatatactgcaaaagccatcaagacctgctatttcaactcctcctgtggctagtaaatccgctcaggcgcggattggaaggcctcctgtcgaagggcgagggagaggccacttgcttccgcggtattggccaaaatatacggataaagaggttcagcagatctctggaaatttgaatttgaacattgtacctctctttgagaaaactcttagtgccagtgatgctggtcgcattggtcgtctagttcttccaaaagcctgtgcagaggcatattttcctccgattagtcaatccgaaggcattcctttgaaaatccaagatgtgaggggtagggagtggacgttccagttcagatattggcccaataacaatagtagaatgtatgttttagaaggtgtcactccatgcatacagtccatgatgctacaggctggtgatacagtaactttcagtcgggttgatcctggcggaaaactaatcatgggttccaggaaggcagctaatgctggagacatgcagggttgtgggctcaccaacggaacatcaactgaggacacatcatcgtctggtgtaacagaaaacccaccctccataaatggttcctcgtgtatttcactaataccgaaagagttgaatggtatgcctgagaatttgaacagtgagactaacgggggcaggataggtgatgatcctacacgagttaaagagaagaagagaactcgaaccattggtgcaaaaaataagagacttcttttgcatagtgaagaatctatggagctgagactcacttgggaagaagctcaggacttgcttcgtccctctcctagtgtaaagcctaccatcgttgtcattgaggagcaagaaattgaagaatatgacgaacctcctgtctttggaaagaggactatagtcactacaaaaccttcaggtgaacaggaacgatgggcaacttgcgacgactgctctaaatggagaaggttacctgtagatgctcttctttcctttaaatggacatgtatagacaatgtttgggatgtgagtaggtgttcatgttctgcaccggaggagagtctgaaggaacttgagaatgttcttaaagtaggaagagagcacaagaagagaagaactggggaaagccaggcagcaaaaagtcagcaagaaccgtgtggtttggacgcactggcgagtgcagcagtcttaggagacacaataggcgagccagaggtagcgaccacgaccagacatccaaggcacagggctggatgctcttgcatcgtgtgcattcagccaccaagtgggaaaggtaggcacaagcctacatgtggctgcactgtgtgtagcaccgtgaagagaaggttcaagacgcttatgatgaggaggaagaagaagcagttggagcgcgatgtaacagcagcagaagataagaagaagaaggacatggaactggctgagtctgataagagtaaggaggagaaggaagtgaacacagcgagaatagacctgaacagtgatccatacaataaagaagatgttgaagctgttgcggtggagaaagaagagagtcgaaaaagagcaataggacagtgttcgggcgtggtggctcaagacgccagtgatgttttaggagttacagagttagaaggagagggtaagaatgttcgtgaagagccgagagtttcaagctgatatggaaggaaaaagggaaagggtaaaagccaaagtcatagccagttttattaatatgctgagaccaagagtaggagaagaagaagagaaagagagagagagagagagagagagaagtacagttttgtgtttgattctgtcatagttgtaggaaaaataagtttctggttctaaacagcgacaatgtcccatcttttgttttttgtttttgtttttgtatttttatggtatcgtgttgagtttggggtttatagtatgtctccattaatctaggttttgttgtagaaggcaaatggagctttgtgcttggtgatgaaacagttgagttgatttttttttttgtaattgttttcaac

SEQ ID NO: 36720 - protein, 790 aa, Arabidopsis thaliana
  peptide (1)..(790): Ceres Seq. ID no. 12489474
  misc_feature (294)..(398): Pfam Name: B3 DNA binding domain Pfam Description: B3 DNA binding domain
  misc_feature (44)..(97): Homolog of NCBI NO: 15234504 NR Description: VP1 like protein; protein id: At4g21550.1
  misc_feature (628)..(739): Homolog of NCBI NO: 15234504 NR Description: VP1 like protein; protein id: At4g21550.1
  misc_feature (70)..(431): Homolog of NCBI NO: 15234504 NR Description: VP1 like protein; protein id: At4g21550.1
  misc_feature (585)..(784): Homolog of NCBI NO: 15236645 NR Description: similar to putative VP1/ABI3 family regulatory
  misc_feature (70)..(536): Homolog of NCBI NO: 15236645 NR Description: similar to putative VP1/ABI3 family regulatory
  misc_feature (9)..(97): Homolog of NCBI NO: 34898718 NR Description: similar to VP1/ABI3 family regulatory protein
  misc_feature (169)..(697): Homolog of NCBI NO: 34898718 NR Description: similar to VP1/ABI3 family regulatory protein
  misc_feature (6)..(96): Homolog of NCBI NO: 34394741 NR Description: VP1/ABI3 family regulatory protein-like
  misc_feature (211)..(431): Homolog of NCBI NO: 34394741 NR Description: VP1/ABI3 family regulatory protein-like
  misc_feature (396)..(740): Homolog of NCBI NO: 34394741 NR Description: VP1/ABI3 family regulatory protein-like
MFEVKMGSKMCMNASCGTTSTVEWKKGWPLRSGLLADLCYRCGSAYESSLFCEQFHKDQSGWRECYLCSKRLHCGCIASKVTIELMDYGGVGCSTCACCHQLNLNTRGENPGVFSRLPMKTLADRQHVNGESGGRNEGDLFSQPLVMGGDKREEFMPHRGFGKLMSPESTTTGHRLDAAGEMHESSPLQPSLNMGLAVNPFSPSFATEAVEGMKHISPSQSNMVHCSASNILQKPSRPAISTPPVASKSAQARIGRPPVEGRGRGHLLPRYWPKYTDKEVQQISGNLNLNIVPLFEKTLSASDAGRIGRLVLPKACAEAYFPPISQSEGIPLKIQDVRGREWTFQFRYWPNNNSRMYVLEGVTPCIQSMMLQAGDTVTFSRVDPGGKLIMGSRKAANAGDMQGCGLTNGTSTEDTSSSGVTENPPSINGSSCISLIPKELNGMPENLNSETNGGRIGDDPTRVKEKKRTRTIGAKNKRLLLHSEESMELRLTWEEAQDLLRPSPSVKPTIVVIEEQEIEEYDEPPVFGKRTIVTTKPSGEQERWATCDDCSKWRRLPVDALLSFKWTCIDNVWDVSRCSCSAPEESLKELENVLKVGREHKKRRTGESQAAKSQQEPCGLDALASAAVLGDTIGEPEVATTTRHPRHRAGCSCIVCIQPPSGKGRHKPTCGCTVCSTVKRRFKTLMMRRKKKQLERDVTAAEDKKKKDMELAESDKSKEEKEVNTARIDLNSDPYNKEDVEAVAVEKEESRKRAIGQCSGVVAQDASDVLGVTELEGEGKNVREEPRVSS

SEQ ID NO: 36721 - protein, 785 aa, Arabidopsis thaliana
  peptide (1)..(785): Ceres Seq. ID no. 12489475
  misc_feature (289)..(393): Pfam Name: B3 DNA binding domain Pfam Description: B3 DNA binding domain
  misc_feature (39)..(92): Homolog of NCBI NO: 15234504 NR Description: VP1 like protein; protein id: At4g21550.1
  misc_feature (623)..(734): Homolog of NCBI NO: 15234504 NR Description: VP1 like protein; protein id: At4g21550.1
  misc_feature (65)..(426): Homolog of NCBI NO: 15234504 NR Description: VP1 like protein; protein id: At4g21550.1
  misc_feature (580)..(779): Homolog of NCBI NO: 15236645 NR Description: similar to putative VP1/ABI3 family regulatory
  misc_feature (65)..(531): Homolog of NCBI NO: 15236645 NR Description: similar to putative VP1/ABI3 family regulatory
  misc_feature (4)..(92): Homolog of NCBI NO: 34898718 NR Description: similar to VP1/ABI3 family regulatory protein
  misc_feature (164)..(692): Homolog of NCBI NO: 34898718 NR Description: similar to VP1/ABI3 family regulatory protein
  misc_feature (1)..(91): Homolog of NCBI NO: 34394741 NR Description: VP1/ABI3 family regulatory protein-like
  misc_feature (206)..(426): Homolog of NCBI NO: 34394741 NR Description: VP1/ABI3 family regulatory protein-like
  misc_feature (391)..(735): Homolog of NCBI NO: 34394741 NR Description: VP1/ABI3 family regulatory protein-like
MGSKMCMNASCGTTSTVEWKKGWPLRSGLLADLCYRCGSAYESSLFCEQFHKDQSGWRECYLCSKRLHCGCIASKVTIELMDYGGVGCSTCACCHQLNLNTRGENPGVFSRLPMKTLADRQHVNGESGGRNEGDLFSQPLVMGGDKREEFMPHRGFGKLMSPESTTTGHRLDAAGEMHESSPLQPSLNMGLAVNPFSPSFATEAVEGMKHISPSQSNMVHCSASNILQKPSRPAISTPPVASKSAQARIGRPPVEGRGRGHLLPRYWPKYTDKEVQQISGNLNLNIVPLFEKTLSASDAGRIGRLVLPKACAEAYFPPISQSEGIPLKIQDVRGREWTFQFRYWPNNNSRMYVLEGVTPCIQSMMLQAGDTVTFSRVDPGGKLIMGSRKAANAGDMQGCGLTNGTSTEDTSSSGVTENPPSINGSSCISLIPKELNGMPENLNSETNGGRIGDDPTRVKEKKRTRTIGAKNKRLLLHSEESMELRLTWEEAQDLLRPSPSVKPTIVVIEEQEIEEYDEPPVFGKRTIVTTKPSGEQERWATCDDCSKWRRLPVDALLSFKWTCIDNVWDVSRCSCSAPEESLKELENVLKVGREHKKRRTGESQAAKSQQEPCGLDALASAAVLGDTIGEPEVATTTRHPRHRAGCSCIVCIQPPSGKGRHKPTCGCTVCSTVKRRFKTLMMRRKKKQLERDVTAAEDKKKKDMELAESDKSKEEKEVNTARIDLNSDPYNKEDVEAVAVEKEESRKRAIGQCSGVVAQDASDVLGVTELEGEGKNVREEPRVSS

SEQ ID NO: 36722 - protein, 781 aa, Arabidopsis thaliana
  peptide (1)..(781): Ceres Seq. ID no. 12489476
  misc_feature (285)..(389): Pfam Name: B3 DNA binding domain Pfam Description: B3 DNA binding domain
  misc_feature (35)..(88): Homolog of NCBI NO: 15234504 NR Description: VP1 like protein; protein id: At4g21550.1
  misc_feature (619)..(730): Homolog of NCBI NO: 15234504 NR Description: VP1 like protein; protein id: At4g21550.1
  misc_feature (61)..(422): Homolog of NCBI NO: 15234504 NR Description: VP1 like protein; protein id: At4g21550.1
  misc_feature (576)..(775): Homolog of NCBI NO: 15236645 NR Description: similar to putative VP1/ABI3 family regulatory
  misc_feature (61)..(527): Homolog of NCBI NO: 15236645 NR Description: similar to putative VP1/ABI3 family regulatory
  misc_feature (1)..(88): Homolog of NCBI NO: 34898718 NR Description: similar to VP1/ABI3 family regulatory protein
  misc_feature (160)..(688): Homolog of NCBI NO: 34898718 NR Description: similar to VP1/ABI3 family regulatory protein
  misc_feature (1)..(87): Homolog of NCBI NO: 34394741 NR Description: VP1/ABI3 family regulatory protein-like
  misc_feature (202)..(422): Homolog of NCBI NO: 34394741 NR Description: VP1/ABI3 family regulatory protein-like
  misc_feature (387)..(731): Homolog of NCBI NO: 34394741 NR Description: VP1/ABI3 family regulatory protein-like
MCMNASCGTTSTVEWKKGWPLRSGLLADLCYRCGSAYESSLFCEQFHKDQSGWRECYLCSKRLHCGCIASKVTIELMDYGGVGCSTCACCHQLNLNTRGENPGVFSRLPMKTLADRQHVNGESGGRNEGDLFSQPLVMGGDKREEFMPHRGFGKLMSPESTTTGHRLDAAGEMHESSPLQPSLNMGLAVNPFSPSFATEAVEGMKHISPSQSNMVHCSASNILQKPSRPAISTPPVASKSAQARIGRPPVEGRGRGHLLPRYWPKYTDKEVQQISGNLNLNIVPLFEKTLSASDAGRIGRLVLPKACAEAYFPPISQSEGIPLKIQDVRGREWTFQFRYWPNNNSRMYVLEGVTPCIQSMMLQAGDTVTFSRVDPGGKLIMGSRKAANAGDMQGCGLTNGTSTEDTSSSGVTENPPSINGSSCISLIPKELNGMPENLNSETNGGRIGDDPTRVKEKKRTRTIGAKNKRLLLHSEESMELRLTWEEAQDLLRPSPSVKPTIVVIEEQEIEEYDEPPVFGKRTIVTTKPSGEQERWATCDDCSKWRRLPVDALLSFKWTCIDNVWDVSRCSCSAPEESLKELENVLKVGREHKKRRTGESQAAKSQQEPCGLDALASAAVLGDTIGEPEVATTTRHPRHRAGCSCIVCIQPPSGKGRHKPTCGCTVCSTVKRRFKTLMMRRKKKQLERDVTAAEDKKKKDMELAESDKSKEEKEVNTARIDLNSDPYNKEDVEAVAVEKEESRKRAIGQCSGVVAQDASDVLGVTELEGEGKNVREEPRVSS

SEQ ID NO: 36723 - DNA, 1020 bp, Arabidopsis thaliana; identical to SEQ ID NO: 36124
  misc_feature (1)..(1020): Ceres Seq. ID no. 12562601
  misc_feature: MA Experiment ID: 108434 Result: Up-regulated in Transcription
  misc_feature: MA Experiment 108434 PARAMETER Experiment Name: At_Root_Tips_cDNA_P Parameter: Tissue Value: Root Tips
  misc_feature: MA Experiment ID: 108462 Result: Down-regulated in Transcription
  misc_feature: MA Experiment 108462 PARAMETER Experiment Name: At_Germinating_Seeds_cDNA_P Parameter: Age (day) Value: 2 vs. 0
  misc_feature: MA Experiment 108462 PARAMETER Experiment Name: At_Germinating_Seeds_cDNA_P Parameter: Tissue Value: Germinating Seeds
  misc_feature: MA Experiment ID: 108463 Result: Down-regulated in Transcription
  misc_feature: MA Experiment 108463 PARAMETER Experiment Name: At_Germinating_Seeds_cDNA_P Parameter: Age (day) Value: 3 vs. 0
  misc_feature: MA Experiment 108463 PARAMETER Experiment Name: At_Germinating_Seeds_cDNA_P Parameter: Tissue Value: Germinating Seeds
  misc_feature: MA Experiment ID: 108573 Result: Up-regulated in Transcription
  misc_feature: MA Experiment 108573 PARAMETER Experiment Name: At_Drought_cDNA_P Parameter: Timepoint (hr) Value: 6
  misc_feature: MA Experiment 108573 PARAMETER Experiment Name: At_Drought_cDNA_P Parameter: Tissue Value: Aerial
  misc_feature: MA Experiment 108573 PARAMETER Experiment Name: At_Drought_cDNA_P Parameter: Treatment Value: Drought vs. No Drought
  misc_feature: MA Experiment ID: 108585 Result: Up-regulated in Transcription
  misc_feature: MA Experiment 108585 PARAMETER Experiment Name: At_5mM_NaNP_cDNA_P Parameter: Timepoint (hr) Value: 6
  misc_feature: MA Experiment 108585 PARAMETER Experiment Name: At_5mM_NaNP_cDNA_P Parameter: Tissue Value: Aerial
  misc_feature: MA Experiment 108585 PARAMETER Experiment Name: At_5mM_NaNP_cDNA_P Parameter: Treatment Value: null
  misc_feature: MA Experiment ID: 20000179 Result: Down-regulated in Transcription
  misc_feature: MA Experiment 20000179 PARAMETER Experiment Name: At_Germinating_Seeds_P Parameter: Age (hr) Value: 6 vs. 0
  misc_feature: MA Experiment 20000179 PARAMETER Experiment Name: At_Germinating_Seeds_P Parameter: Tissue Value: Germinating Seeds

SEQ ID NO: 36724 - protein, 223 aa, Arabidopsis thaliana; identical to SEQ ID NO: 36125
  peptide (1)..(223): Ceres Seq. ID no. 12562602
  misc_feature (12)..(208): Pfam Name: Proteasome A-type and B-type Pfam Description: Proteasome A-type and B-type
  misc_feature (12)..(208): Pfam Name: Proteasome A-type and B-type Pfam Description: Proteasome A-type and B-type
  misc_feature (8)..(223): Homolog of NCBI NO: 38174388 NR Description: Unknown (protein for MGC:75736) [Silurana
  misc_feature (8)..(223): Homolog of NCBI NO: 27694605 NR Description: Unknown (protein for MGC:52861) [Xenopus laevis]
  misc_feature (4)..(223): Homolog of NCBI NO: 17380207 NR Description: Proteasome subunit beta type 1-A (20S proteasome
  misc_feature (4)..(223): Homolog of NCBI NO: 17380206 NR Description: Proteasome subunit beta type 1-B (20S proteasome
  misc_feature (5)..(223): Homolog of NCBI NO: 28829610 NR Description: similar to Petunia hybrida (Petunia). Proteasome beta type 1 (EC 3.4.99.46) (20S proteasome alpha subunit F) (20S
  misc_feature (8)..(223): Homolog of NCBI NO: 38174388 NR Description: Unknown (protein for MGC:75736) [Silurana
  misc_feature (4)..(223): Homolog of NCBI NO: 17380207 NR Description: Proteasome subunit beta type 1-A (20S proteasome
  misc_feature (5)..(223): Homolog of NCBI NO: 28829610 NR Description: similar to Petunia hybrida (Petunia). Proteasome beta type 1 (EC 3.4.99.46) (20S proteasome alpha subunit F) (20S
  misc_feature (1)..(223): Homolog of NCBI NO: 600387 NR Description: proteosome subunit [Arabidopsis thaliana]
  misc_feature (1)..(223): Homolog of NCBI NO: 15232965 NR Description: 20S proteasome beta subunit F1 (PBF1)
  misc_feature (1)..(223): Homolog of NCBI NO: 17380185 NR Description: Proteasome subunit beta type 1 (20S proteasome
  misc_feature (4)..(223): Homolog of NCBI NO: 17380182 NR Description: Proteasome subunit beta type 1 (20S proteasome
  misc_feature (9)..(200): Homolog of NCBI NO: 14594933 NR Description: putative beta6 proteasome subunit [Nicotiana
  misc_feature (4)..(223): Homolog of NCBI NO: 17380206 NR Description: Proteasome subunit beta type 1-B (20S proteasome
  misc_feature (8)..(223): Homolog of NCBI NO: 27694605 NR Description: Unknown (protein for MGC:52861) [Xenopus laevis]
  misc_feature (9)..(200): Homolog of NCBI NO: 14594933 NR Description: putative beta6 proteasome subunit [Nicotiana
  misc_feature (4)..(223): Homolog of NCBI NO: 17380182 NR Description: Proteasome subunit beta type 1 (20S proteasome
  misc_feature (1)..(223): Homolog of NCBI NO: 17380185 NR Description: Proteasome subunit beta type 1 (20S proteasome
  misc_feature (1)..(223): Homolog of NCBI NO: 15232965 NR Description: 20S proteasome beta subunit F1 (PBF1)
  misc_feature (1)..(223): Homolog of NCBI NO: 600387 NR Description: proteosome subunit [Arabidopsis thaliana]

SEQ ID NO: 36725 - protein, 189 aa, Arabidopsis thaliana; identical to SEQ ID NO: 36126
  peptide (1)..(189): Ceres Seq. ID no. 12562603
  misc_feature (1)..(174): Pfam Name: Proteasome A-type and B-type Pfam Description: Proteasome A-type and B-type
  misc_feature (1)..(174): Pfam Name: Proteasome A-type and B-type Pfam Description: Proteasome A-type and B-type
  misc_feature (1)..(189): Homolog of NCBI NO: 38174388 NR Description: Unknown (protein for MGC:75736) [Silurana
  misc_feature (1)..(189): Homolog of NCBI NO: 27694605 NR Description: Unknown (protein for MGC:52861) [Xenopus laevis]
  misc_feature (1)..(189): Homolog of NCBI NO: 17380207 NR Description: Proteasome subunit beta type 1-A (20S proteasome
  misc_feature (1)..(189): Homolog of NCBI NO: 17380206 NR Description: Proteasome subunit beta type 1-B (20S proteasome
  misc_feature (1)..(189): Homolog of NCBI NO: 28829610 NR Description: similar to Petunia hybrida (Petunia). Proteasome beta type 1 (EC 3.4.99.46) (20S proteasome alpha subunit F) (20S
  misc_feature (1)..(189): Homolog of NCBI NO: 38174388 NR Description: Unknown (protein for MGC:75736) [Silurana
  misc_feature (1)..(189): Homolog of NCBI NO: 17380207 NR Description: Proteasome subunit beta type 1-A (20S proteasome
  misc_feature (1)..(189): Homolog of NCBI NO: 28829610 NR Description: similar to Petunia hybrida (Petunia). Proteasome beta type 1 (EC 3.4.99.46) (20S proteasome alpha subunit F) (20S
  misc_feature (1)..(189): Homolog of NCBI NO: 600387 NR Description: proteosome subunit [Arabidopsis thaliana]
  misc_feature (1)..(189): Homolog of NCBI NO: 15232965 NR Description: 20S proteasome beta subunit F1 (PBF1)
  misc_feature (1)..(189): Homolog of NCBI NO: 17380185 NR Description: Proteasome subunit beta type 1 (20S proteasome
  misc_feature (1)..(189): Homolog of NCBI NO: 17380182 NR Description: Proteasome subunit beta type 1 (20S proteasome
  misc_feature (1)..(166): Homolog of NCBI NO: 14594933 NR Description: putative beta6 proteasome subunit [Nicotiana
  misc_feature (1)..(189): Homolog of NCBI NO: 17380206 NR Description: Proteasome subunit beta type 1-B (20S proteasome
  misc_feature (1)..(189): Homolog of NCBI NO: 27694605 NR Description: Unknown (protein for MGC:52861) [Xenopus laevis]
  misc_feature (1)..(166): Homolog of NCBI NO: 14594933 NR Description: putative beta6 proteasome subunit [Nicotiana
  misc_feature (1)..(189): Homolog of NCBI NO: 17380182 NR Description: Proteasome subunit beta type 1 (20S proteasome
  misc_feature (1)..(189): Homolog of NCBI NO: 17380185 NR Description: Proteasome subunit beta type 1 (20S proteasome
  misc_feature (1)..(189): Homolog of NCBI NO: 15232965 NR Description: 20S proteasome beta subunit F1 (PBF1)
  misc_feature (1)..(189): Homolog of NCBI NO: 600387 NR Description: proteosome subunit [Arabidopsis thaliana]

SEQ ID NO: 36726 - protein, 135 aa, Arabidopsis thaliana; identical to SEQ ID NO: 22828
  peptide (1)..(135): Ceres Seq. ID no. 12562604
  misc_feature (1)..(120): Pfam Name: Proteasome A-type and B-type Pfam Description: Proteasome A-type and B-type
  misc_feature (1)..(120): Pfam Name: Proteasome A-type and B-type Pfam Description: Proteasome A-type and B-type
  misc_feature (1)..(135): Homolog of NCBI NO: 38174388 NR Description: Unknown (protein for MGC:75736) [Silurana
  misc_feature (1)..(135): Homolog of NCBI NO: 27694605 NR Description: Unknown (protein for MGC:52861) [Xenopus laevis]
  misc_feature (1)..(135): Homolog of NCBI NO: 17380207 NR Description: Proteasome subunit beta type 1-A (20S proteasome
  misc_feature (1)..(135): Homolog of NCBI NO: 17380206 NR Description: Proteasome subunit beta type 1-B (20S proteasome
  misc_feature (1)..(135): Homolog of NCBI NO: 28829610 NR Description: similar to Petunia hybrida (Petunia). Proteasome beta type 1 (EC 3.4.99.46) (20S proteasome alpha subunit F) (20S
  misc_feature (1)..(135): Homolog of NCBI NO: 38174388 NR Description: Unknown (protein for MGC:75736) [Silurana
  misc_feature (1)..(135): Homolog of NCBI NO: 17380207 NR Description: Proteasome subunit beta type 1-A (20S proteasome
  misc_feature (1)..(135): Homolog of NCBI NO: 28829610 NR Description: similar to Petunia hybrida (Petunia). Proteasome beta type 1 (EC 3.4.99.46) (20S proteasome alpha subunit F) (20S
  misc_feature (1)..(135): Homolog of NCBI NO: 600387 NR Description: proteosome subunit [Arabidopsis thaliana]
  misc_feature (1)..(135): Homolog of NCBI NO: 15232965 NR Description: 20S proteasome beta subunit F1 (PBF1)
  misc_feature (1)..(135): Homolog of NCBI NO: 17380185 NR Description: Proteasome subunit beta type 1 (20S proteasome
  misc_feature (1)..(135): Homolog of NCBI NO: 17380182 NR Description: Proteasome subunit beta type 1 (20S proteasome
  misc_feature (1)..(112): Homolog of NCBI NO: 14594933 NR Description: putative beta6 proteasome subunit [Nicotiana
  misc_feature (1)..(135): Homolog of NCBI NO: 17380206 NR Description: Proteasome subunit beta type 1-B (20S proteasome
  misc_feature (1)..(135): Homolog of NCBI NO: 27694605 NR Description: Unknown (protein for MGC:52861) [Xenopus laevis]
  misc_feature (1)..(112): Homolog of NCBI NO: 14594933 NR Description: putative beta6 proteasome subunit [Nicotiana
  misc_feature (1)..(135): Homolog of NCBI NO: 17380182 NR Description: Proteasome subunit beta type 1 (20S proteasome
  misc_feature (1)..(135): Homolog of NCBI NO: 17380185 NR Description: Proteasome subunit beta type 1 (20S proteasome
  misc_feature (1)..(135): Homolog of NCBI NO: 15232965 NR Description: 20S proteasome beta subunit F1 (PBF1)
  misc_feature (1)..(135): Homolog of NCBI NO: 600387 NR Description: proteosome subunit [Arabidopsis thaliana]

SEQ ID NO: 36727 - DNA, 779 bp, Arabidopsis thaliana
  misc_feature (1)..(779): Ceres Seq. ID no. 12580269
  misc_feature: MA Experiment ID: 108434 Result: Up-regulated in Transcription
  misc_feature: MA Experiment 108434 PARAMETER Experiment Name: At_Root_Tips_cDNA_P Parameter: Tissue Value: Root Tips
  misc_feature: MA Experiment ID: 108462 Result: Down-regulated in Transcription
  misc_feature: MA Experiment 108462 PARAMETER Experiment Name: At_Germinating_Seeds_cDNA_P Parameter: Age (day) Value: 2 vs. 0
  misc_feature: MA Experiment 108462 PARAMETER Experiment Name: At_Germinating_Seeds_cDNA_P Parameter: Tissue Value: Germinating Seeds
  misc_feature: MA Experiment ID: 108463 Result: Down-regulated in Transcription
  misc_feature: MA Experiment 108463 PARAMETER Experiment Name: At_Germinating_Seeds_cDNA_P Parameter: Age (day) Value: 3 vs. 0
  misc_feature: MA Experiment 108463 PARAMETER Experiment Name: At_Germinating_Seeds_cDNA_P Parameter: Tissue Value: Germinating Seeds
  misc_feature: MA Experiment ID: 108464 Result: Down-regulated in Transcription
  misc_feature: MA Experiment 108464 PARAMETER Experiment Name: At_Germinating_Seeds_cDNA_P Parameter: Age (day) Value: 4 vs. 0
  misc_feature: MA Experiment 108464 PARAMETER Experiment Name: At_Germinating_Seeds_cDNA_P Parameter: Tissue Value: Germinating Seeds
  misc_feature: MA Experiment ID: 108561 Result: Down-regulated in Transcription
  misc_feature: MA Experiment 108561 PARAMETER Experiment Name: At_100uM_ABA_cDNA_P Parameter: Timepoint (hr) Value: 6
  misc_feature: MA Experiment 108561 PARAMETER Experiment Name: At_100uM_ABA_cDNA_P Parameter: Tissue Value: Aerial
  misc_feature: MA Experiment 108561 PARAMETER Experiment Name: At_100uM_ABA_cDNA_P Parameter: Treatment Value: 100uM ABA vs. No Treatment
  misc_feature: MA Experiment ID: 108573 Result: Down-regulated in Transcription
  misc_feature: MA Experiment 108573 PARAMETER Experiment Name: At_Drought_cDNA_P Parameter: Timepoint (hr) Value: 6
  misc_feature: MA Experiment 108573 PARAMETER Experiment Name: At_Drought_cDNA_P Parameter: Tissue Value: Aerial
  misc_feature: MA Experiment 108573 PARAMETER Experiment Name: At_Drought_cDNA_P Parameter: Treatment Value: Drought vs. No Drought
  misc_feature: MA Experiment ID: 108585 Result: Down-regulated in Transcription
  misc_feature: MA Experiment 108585 PARAMETER Experiment Name: At_5mM_NaNP_cDNA_P Parameter: Timepoint (hr) Value: 6
  misc_feature: MA Experiment 108585 PARAMETER Experiment Name: At_5mM_NaNP_cDNA_P Parameter: Tissue Value: Aerial
  misc_feature: MA Experiment 108585 PARAMETER Experiment Name: At_5mM_NaNP_cDNA_P Parameter: Treatment Value: null
  misc_feature: MA Experiment ID: 108595 Result: Down-regulated in Transcription
  misc_feature: MA Experiment 108595 PARAMETER Experiment Name: At_Ler-pi_Ovule_cDNA_P Parameter: Plant Line Value: null
  misc_feature: MA Experiment ID: 108607 Result: Down-regulated in Transcription
  misc_feature: MA Experiment 108607 PARAMETER Experiment Name: At_100uM_ABA_cDNA_P Parameter: Timepoint (hr) Value: 4
  misc_feature: MA Experiment 108607 PARAMETER Experiment Name: At_100uM_ABA_cDNA_P Parameter: Tissue Value: Aerial
  misc_feature: MA Experiment 108607 PARAMETER Experiment Name: At_100uM_ABA_cDNA_P Parameter: Treatment Value: 100uM ABA vs. No Treatment
  misc_feature: MA Experiment ID: 108609 Result: Down-regulated in Transcription
  misc_feature: MA Experiment 108609 PARAMETER Experiment Name: At_100uM_ABA_cDNA_P Parameter: Timepoint (hr) Value: 24
  misc_feature: MA Experiment 108609 PARAMETER Experiment Name: At_100uM_ABA_cDNA_P Parameter: Tissue Value: Aerial
  misc_feature: MA Experiment 108609 PARAMETER Experiment Name: At_100uM_ABA_cDNA_P Parameter: Treatment Value: 100uM ABA vs. No Treatment
  misc_feature: MA Experiment ID: 108668 Result: Down-regulated in Transcription
  misc_feature: MA Experiment 108668 PARAMETER Experiment Name: At_2mM_SA_cDNA_P Parameter: Plant Line Value: WS
  misc_feature: MA Experiment 108668 PARAMETER Experiment Name: At_2mM_SA_cDNA_P Parameter: Timepoint (hr) Value: 6
  misc_feature: MA Experiment 108668 PARAMETER Experiment Name: At_2mM_SA_cDNA_P Parameter: Treatment Value: 2mM SA vs. No Treatment
  misc_feature: MA Experiment ID: 20000307 Result: Up-regulated in Transcription
  misc_feature: MA Experiment 20000307 PARAMETER Experiment Name: At_Germinating_Seeds_Sub_P Parameter: Age (hr) Value: 24 vs. 0
  misc_feature: MA Experiment 20000307 PARAMETER Experiment Name: At_Germinating_Seeds_Sub_P Parameter: Organism Value: A. thaliana
  misc_feature: MA Experiment 20000307 PARAMETER Experiment Name: At_Germinating_Seeds_Sub_P Parameter: Plant Line Value: WS
  misc_feature: MA Experiment 20000307 PARAMETER Experiment Name: At_Germinating_Seeds_Sub_P Parameter: Tissue Value: Germinating Seeds
  misc_feature: MA Experiment ID: 20000314 Result: Down-regulated in Transcription
  misc_feature: MA Experiment 20000314 PARAMETER Experiment Name: At_14day_Shoots-Roots_Sub_P Parameter: Age (day) Value: 14
  misc_feature: MA Experiment 20000314 PARAMETER Experiment Name: At_14day_Shoots-Roots_Sub_P Parameter: Organism Value: A. thaliana
  misc_feature: MA Experiment 20000314 PARAMETER Experiment Name: At_14day_Shoots-Roots_Sub_P Parameter: Plant Line Value: WS
  misc_feature: MA Experiment 20000314 PARAMETER Experiment Name: At_14day_Shoots-Roots_Sub_P Parameter: Tissue Value: Roots vs. Whole Plant
  misc_feature: MA Experiment ID: 20000315 Result: Up-regulated in Transcription
  misc_feature: MA Experiment 20000315 PARAMETER Experiment Name: At_14day_Shoots-Roots_Sub_P Parameter: Age (day) Value: 14
  misc_feature: MA Experiment 20000315 PARAMETER Experiment Name: At_14day_Shoots-Roots_Sub_P Parameter: Organism Value: A. thaliana
  misc_feature: MA Experiment 20000315 PARAMETER Experiment Name: At_14day_Shoots-Roots_Sub_P Parameter: Plant Line Value: WS
  misc_feature: MA Experiment 20000315 PARAMETER Experiment Name: At_14day_Shoots-Roots_Sub_P Parameter: Tissue Value: Shoots vs. Whole Plant
  misc_feature: MA Experiment ID: 20000347 Result: Down-regulated in Transcription
  misc_feature: MA Experiment 20000347 PARAMETER Experiment Name: At_2mM_SA_Sub_P Parameter: Age (day) Value: 14
  misc_feature: MA Experiment 20000347 PARAMETER Experiment Name: At_2mM_SA_Sub_P Parameter: Organism Value: A. thaliana
  misc_feature: MA Experiment 20000347 PARAMETER Experiment Name: At_2mM_SA_Sub_P Parameter: Plant Line Value: WS
  misc_feature: MA Experiment 20000347 PARAMETER Experiment Name: At_2mM_SA_Sub_P Parameter: Timepoint (hr) Value: 6
  misc_feature: MA Experiment 20000347 PARAMETER Experiment Name: At_2mM_SA_Sub_P Parameter: Tissue Value: Aerial
  misc_feature: MA Experiment 20000347 PARAMETER Experiment Name: At_2mM_SA_Sub_P Parameter: Treatment Value: 2mM SA vs. No Treatment
  misc_feature: MA Experiment ID: 20000349 Result: Down-regulated in Transcription
  misc_feature: MA Experiment 20000349 PARAMETER Experiment Name: At_100uM_ABA_Sub_P Parameter: Age (day) Value: 14
  misc_feature: MA Experiment 20000349 PARAMETER Experiment Name: At_100uM_ABA_Sub_P Parameter: Organism Value: A. thaliana
  misc_feature: MA Experiment 20000349 PARAMETER Experiment Name: At_100uM_ABA_Sub_P Parameter: Plant Line Value: WS
  misc_feature: MA Experiment 20000349 PARAMETER Experiment Name: At_100uM_ABA_Sub_P Parameter: Timepoint (hr) Value: 6
  misc_feature: MA Experiment 20000349 PARAMETER Experiment Name: At_100uM_ABA_Sub_P Parameter: Tissue Value: Aerial
  misc_feature: MA Experiment 20000349 PARAMETER Experiment Name: At_100uM_ABA_Sub_P Parameter: Treatment Value: 100uM ABA vs. No Treatment
  misc_feature: MA Experiment ID: 20000352 Result: Down-regulated in Transcription
  misc_feature: MA Experiment 20000352 PARAMETER Experiment Name: At_Drought_Sub_P Parameter: Age (day) Value: 7
  misc_feature: MA Experiment 20000352 PARAMETER Experiment Name: At_Drought_Sub_P Parameter: Organism Value: A. thaliana
  misc_feature: MA Experiment 20000352 PARAMETER Experiment Name: At_Drought_Sub_P Parameter: Plant Line Value: WS
  misc_feature: MA Experiment 20000352 PARAMETER Experiment Name: At_Drought_Sub_P Parameter: Timepoint (hr) Value: 6
  misc_feature: MA Experiment 20000352 PARAMETER Experiment Name: At_Drought_Sub_P Parameter: Tissue Value: Whole Plant
  misc_feature: MA Experiment 20000352 PARAMETER Experiment Name: At_Drought_Sub_P Parameter: Treatment Value: Drought vs. No Drought
  misc_feature: MA Experiment ID: 20000355 Result: Up-regulated in Transcription
  misc_feature: MA Experiment 20000355 PARAMETER Experiment Name: At_Siliques_Sub_P Parameter: Age (day) Value: 21
  misc_feature: MA Experiment 20000355 PARAMETER Experiment Name: At_Siliques_Sub_P Parameter: Organism Value: A. thaliana
  misc_feature: MA Experiment 20000355 PARAMETER Experiment Name: At_Siliques_Sub_P Parameter: Plant Line Value: WS
  misc_feature: MA Experiment 20000355 PARAMETER Experiment Name: At_Siliques_Sub_P Parameter: Tissue Value: Less Than 5mm Siliques vs. Whole Plant
aagaaattcgatttcgatgcgtataatctgtcttccgctttttttttttggttttgaaatcgacaaccttttttttgcttgttgggttaaattcgtatatcatcaattttgcgatgagttttcacttttccaatcgaaatagcaaatgggcattagctaatttcctgaattgtgagtttttgtgttacgctgtgtccttgattcatataagctattgcaaagaggataaatgataaagccttcagctttacaacataattcacttttactcactagagtttagaaattcaccttctttctctgtttcaggagttacaagacatcacaatgttttcgatatgtgttatttaaagttcattgtggatctcaggtttgacaagattggataaaagcagccatggcaagtctgataatgactacaccattctcaggttctgtcactacatgtaagaagacaaataacctgtctgttcagagagcctttaaggtgacttgtatgcagacagagaaaccattagaggagctatacaatgttaaagtggaacggaaagtttcacagaaacggttggaggaacttggggtttcgagatggtcagtttggaagacagggaaatgcaaattgccatgggattggcaggtggatcagttggtttacattgaacaaggagaggttcgagttgttcccgaaggaagcaagaggtatatgcagtttttagctggagatcttgttcggtatccgtacttcctctggttatatcttatataatgactttgattcc

SEQ ID NO: 36728 - protein, 122 aa, Arabidopsis thaliana
  peptide (1)..(122): Ceres Seq. ID no. 12580270
  misc_feature (54)..(117): Pfam Name: Protein of unknown function (DUF861) Pfam Description: Protein of unknown function (DUF861)
  misc_feature (54)..(117): Pfam Name: Protein of unknown function (DUF861) Pfam Description: Protein of unknown function (DUF861)
  misc_feature (54)..(117): Pfam Name: Protein of unknown function (DUF861) Pfam Description: Protein of unknown function (DUF861)
  misc_feature (46)..(114): Homolog of NCBI NO: 17229206 NR Description: hypothetical protein [Nostoc sp. PCC 7120]
  misc_feature (20)..(114): Homolog of NCBI NO: 15234988 NR Description: putative protein
  misc_feature (42)..(114): Homolog of NCBI NO: 15235021 NR Description: putative protein
  misc_feature (46)..(114): Homolog of NCBI NO: 23127631 NR Description: hypothetical protein [Nostoc punctiforme]
  misc_feature (24)..(114): Homolog of NCBI NO: 21553516 NR Description: unknown [Arabidopsis thaliana]
  misc_feature (46)..(114): Homolog of NCBI NO: 17229206 NR Description: hypothetical protein [Nostoc sp. PCC 7120]
  misc_feature (42)..(114): Homolog of NCBI NO: 15235021 NR Description: putative protein
  misc_feature (24)..(114): Homolog of NCBI NO: 21553516 NR Description: unknown [Arabidopsis thaliana]
  misc_feature (46)..(114): Homolog of NCBI NO: 23127631 NR Description: hypothetical protein [Nostoc punctiforme]
  misc_feature (42)..(114): Homolog of NCBI NO: 15235021 NR Description: putative protein
  misc_feature (20)..(114): Homolog of NCBI NO: 15234988 NR Description: putative protein
  misc_feature (46)..(114): Homolog of NCBI NO: 17229206 NR Description: hypothetical protein [Nostoc sp. PCC 7120]
  misc_feature (1)..(117): Homolog of NCBI NO: 21592432 NR Description: unknown [Arabidopsis thaliana]
  misc_feature (1)..(117): Homolog of NCBI NO: 15225202 NR Description: hypothetical protein; protein id: At2g32180.1
  misc_feature (1)..(117): Homolog of NCBI NO: 18403036 NR Description: expressed protein
  misc_feature (6)..(57): Homolog of NCBI NO: 26451964 NR Description: unknown protein [Arabidopsis thaliana]
  misc_feature (23)..(114): Homolog of NCBI NO: 38344542 NR Description: OSJNBa0027P08.10 [Oryza sativa (japonica
  misc_feature (1)..(117): Homolog of NCBI NO: 21592432 NR Description: unknown [Arabidopsis thaliana]
  misc_feature (1)..(117): Homolog of NCBI NO: 15225202 NR Description: hypothetical protein; protein id: At2g32180.1
  misc_feature (1)..(117): Homolog of NCBI NO: 18403036 NR Description: expressed protein
  misc_feature (6)..(57): Homolog of NCBI NO: 26451964 NR Description: unknown protein [Arabidopsis thaliana]
  misc_feature (23)..(114): Homolog of NCBI NO: 38344542 NR Description: OSJNBa0027P08.10 [Oryza sativa (japonica
  misc_feature (24)..(114): Homolog of NCBI NO: 21553516 NR Description: unknown [Arabidopsis thaliana]
  misc_feature (46)..(114): Homolog of NCBI NO: 23127631 NR Description: hypothetical protein [Nostoc punctiforme]
  misc_feature (20)..(114): Homolog of NCBI NO: 15234988 NR Description: putative protein
  misc_feature (23)..(114): Homolog of NCBI NO: 38344542 NR Description: OSJNBa0027P08.10 [Oryza sativa (japonica
  misc_feature (6)..(57): Homolog of NCBI NO: 26451964 NR Description: unknown protein [Arabidopsis thaliana]
  misc_feature (1)..(117): Homolog of NCBI NO: 18403036 NR Description: expressed protein
  misc_feature (1)..(117): Homolog of NCBI NO: 15225202 NR Description: hypothetical protein; protein id: At2g32180.1
  misc_feature (1)..(117): Homolog of NCBI NO: 21592432 NR Description: unknown [Arabidopsis thaliana]
MASLIMTTPFSGSVTTCKKTNNLSVQRAFKVTCMQTEKPLEELYNVKVERKVSQKRLEELGVSRWSVWKTGKCKLPWDWQVDQLVYIEQGEVRVVPEGSKRYMQFLAGDLVRYPYFLWLYLI

SEQ ID NO: 36729 - protein, 117 aa, Arabidopsis thaliana
  peptide (1)..(117): Ceres Seq. ID no. 12580271
  misc_feature (49)..(112): Pfam Name: Protein of unknown function (DUF861) Pfam Description: Protein of unknown function (DUF861)
  misc_feature (49)..(112): Pfam Name: Protein of unknown function (DUF861) Pfam Description: Protein of unknown function (DUF861)
  misc_feature (49)..(112): Pfam Name: Protein of unknown function (DUF861) Pfam Description: Protein of unknown function (DUF861)
  misc_feature (41)..(109): Homolog of NCBI NO: 17229206 NR Description: hypothetical protein [Nostoc sp. PCC 7120]
  misc_feature (15)..(109): Homolog of NCBI NO: 15234988 NR Description: putative protein
  misc_feature (37)..(109): Homolog of NCBI NO: 15235021 NR Description: putative protein
  misc_feature (41)..(109): Homolog of NCBI NO: 23127631 NR Description: hypothetical protein [Nostoc punctiforme]
  misc_feature (19)..(109): Homolog of NCBI NO: 21553516 NR Description: unknown [Arabidopsis thaliana]
  misc_feature (41)..(109): Homolog of NCBI NO: 17229206 NR Description: hypothetical protein [Nostoc sp. PCC 7120]
  misc_feature (37)..(109): Homolog of NCBI NO: 15235021 NR Description: putative protein
  misc_feature (19)..(109): Homolog of NCBI NO: 21553516 NR Description: unknown [Arabidopsis thaliana]
  misc_feature (41)..(109): Homolog of NCBI NO: 23127631 NR Description: hypothetical protein [Nostoc punctiforme]
  misc_feature (37)..(109): Homolog of NCBI NO: 15235021 NR Description: putative protein
  misc_feature (15)..(109): Homolog of NCBI NO: 15234988 NR Description: putative protein
  misc_feature (41)..(109): Homolog of NCBI NO: 17229206 NR Description: hypothetical protein [Nostoc sp. PCC 7120]
  misc_feature (1)..(112): Homolog of NCBI NO: 21592432 NR Description: unknown [Arabidopsis thaliana]
  misc_feature (1)..(112): Homolog of NCBI NO: 15225202 NR Description: hypothetical protein; protein id: At2g32180.1
  misc_feature (1)..(112): Homolog of NCBI NO: 18403036 NR Description: expressed protein
  misc_feature (1)..(52): Homolog of NCBI NO: 26451964 NR Description: unknown protein [Arabidopsis thaliana]
  misc_feature (18)..(109): Homolog of NCBI NO: 38344542 NR Description: OSJNBa0027P08.10 [Oryza sativa (japonica
  misc_feature (1)..(112): Homolog of NCBI NO: 21592432 NR Description: unknown [Arabidopsis thaliana]
  misc_feature (1)..(112): Homolog of NCBI NO: 15225202 NR Description: hypothetical protein; protein id: At2g32180.1
  misc_feature (1)..(112): Homolog of NCBI NO: 18403036 NR Description: expressed protein
  misc_feature (1)..(52): Homolog of NCBI NO: 26451964 NR Description: unknown protein [Arabidopsis thaliana]
  misc_feature (18)..(109): Homolog of NCBI NO: 38344542 NR Description: OSJNBa0027P08.10 [Oryza sativa (japonica
  misc_feature (19)..(109): Homolog of NCBI NO: 21553516 NR Description: unknown [Arabidopsis thaliana]
  misc_feature (41)..(109): Homolog of NCBI NO: 23127631 NR Description: hypothetical protein [Nostoc punctiforme]
  misc_feature (15)..(109): Homolog of NCBI NO: 15234988 NR Description: putative protein
  misc_feature (18)..(109): Homolog of NCBI NO: 38344542 NR Description: OSJNBa0027P08.10 [Oryza sativa (japonica
  misc_feature (1)..(52): Homolog of NCBI NO: 26451964 NR Description: unknown protein [Arabidopsis thaliana]
  misc_feature (1)..(112): Homolog of NCBI NO: 18403036 NR Description: expressed protein
  misc_feature (1)..(112): Homolog of NCBI NO: 15225202 NR Description: hypothetical protein; protein id: At2g32180.1
  misc_feature (1)..(112): Homolog of NCBI NO: 21592432 NR Description: unknown [Arabidopsis thaliana]
MTTPFSGSVTTCKKTNNLSVQRAFKVTCMQTEKPLEELYNVKVERKVSQKRLEELGVSRWSVWKTGKCKLPWDWQVDQLVYIEQGEVRVVPEGSKRYMQFLAGDLVRYPYFLWLYLI

SEQ ID NO: 36730 - protein, 89 aa, Arabidopsis thaliana
  peptide (1)..(89): Ceres Seq. ID no. 12580272
  misc_feature (21)..(84): Pfam Name: Protein of unknown function (DUF861) Pfam Description: Protein of unknown function (DUF861)
  misc_feature (21)..(84): Pfam Name: Protein of unknown function (DUF861) Pfam Description: Protein of unknown function (DUF861)
  misc_feature (21)..(84): Pfam Name: Protein of unknown function (DUF861) Pfam Description: Protein of unknown function (DUF861)
  misc_feature (13)..(81): Homolog of NCBI NO: 17229206 NR Description: hypothetical protein [Nostoc sp. PCC 7120]
  misc_feature (1)..(81): Homolog of NCBI NO: 15234988 NR Description: putative protein
  misc_feature (9)..(81): Homolog of NCBI NO: 15235021 NR Description: putative protein
  misc_feature (13)..(81): Homolog of NCBI NO: 23127631 NR Description: hypothetical protein [Nostoc punctiforme]
  misc_feature (1)..(81): Homolog of NCBI NO: 21553516 NR Description: unknown [Arabidopsis thaliana]
  misc_feature (13)..(81): Homolog of NCBI NO: 17229206 NR Description: hypothetical protein [Nostoc sp. PCC 7120]
  misc_feature (9)..(81): Homolog of NCBI NO: 15235021 NR Description: putative protein
  misc_feature (1)..(81): Homolog of NCBI NO: 21553516 NR Description: unknown [Arabidopsis thaliana]
  misc_feature (13)..(81): Homolog of NCBI NO: 23127631 NR Description: hypothetical protein [Nostoc punctiforme]
  misc_feature (9)..(81): Homolog of NCBI NO: 15235021 NR Description: putative protein
  misc_feature (1)..(81): Homolog of NCBI NO: 15234988 NR Description: putative protein
  misc_feature (13)..(81): Homolog of NCBI NO: 17229206 NR Description: hypothetical protein [Nostoc sp. PCC 7120]
  misc_feature (1)..(84): Homolog of NCBI NO: 21592432 NR Description: unknown [Arabidopsis thaliana]
  misc_feature (1)..(84): Homolog of NCBI NO: 15225202 NR Description: hypothetical protein; protein id: At2g32180.1
  misc_feature (1)..(84): Homolog of NCBI NO: 18403036 NR Description: expressed protein
  misc_feature (1)..(24): Homolog of NCBI NO: 26451964 NR Description: unknown protein [Arabidopsis thaliana]
  misc_feature (1)..(81): Homolog of NCBI NO: 38344542 NR Description: OSJNBa0027P08.10 [Oryza sativa (japonica
  misc_feature (1)..(84): Homolog of NCBI NO: 21592432 NR Description: unknown [Arabidopsis thaliana]
  misc_feature (1)..(84): Homolog of NCBI NO: 15225202 NR Description: hypothetical protein; protein id: At2g32180.1
  misc_feature (1)..(84): Homolog of NCBI NO: 18403036 NR Description: expressed protein
  misc_feature (1)..(24): Homolog of NCBI NO: 26451964 NR Description: unknown protein [Arabidopsis thaliana]
  misc_feature (1)..(81): Homolog of NCBI NO: 38344542 NR Description: OSJNBa0027P08.10 [Oryza sativa (japonica
  misc_feature (1)..(81): Homolog of NCBI NO: 21553516 NR Description: unknown [Arabidopsis thaliana]
  misc_feature (13)..(81): Homolog of NCBI NO: 23127631 NR Description: hypothetical protein [Nostoc punctiforme]
  misc_feature (1)..(81): Homolog of NCBI NO: 15234988 NR Description: putative protein
  misc_feature (1)..(81): Homolog of NCBI NO: 38344542 NR Description: OSJNBa0027P08.10 [Oryza sativa (japonica
  misc_feature (1)..(24): Homolog of NCBI NO: 26451964 NR Description: unknown protein [Arabidopsis thaliana]
  misc_feature (1)..(84): Homolog of NCBI NO: 18403036 NR Description: expressed protein
  misc_feature (1)..(84): Homolog of NCBI NO: 15225202 NR Description: hypothetical protein; protein id: At2g32180.1
  misc_feature (1)..(84): Homolog of NCBI NO: 21592432 NR Description: unknown [Arabidopsis thaliana]
MQTEKPLEELYNVKVERKVSQKRLEELGVSRWSVWKTGKCKLPWDWQVDQLVYIEQGEVRVVPEGSKRYMQFLAGDLVRYPYFLWLYLI

SEQ ID NO: 36731 - DNA, 1499 bp, Arabidopsis thaliana
  misc_feature (1)..(1499): Ceres Seq. ID no. 12340515
  misc_feature: MA Experiment ID: 108501 Result: Down-regulated in Transcription
  misc_feature: MA Experiment 108501 PARAMETER Experiment Name: At_ap2_floral_buds_cDNA_P Parameter: Plant Line Value: ap2 (Ler.)
  misc_feature: MA Experiment 108501 PARAMETER Experiment Name: At_ap2_floral_buds_cDNA_P Parameter: Tissue Value: Closed Flower
  misc_feature: MA Experiment ID: 108577 Result: Down-regulated in Transcription
  misc_feature: MA Experiment 108577 PARAMETER Experiment Name: At_42deg_Heat_cDNA_P Parameter: Temperature (deg C) Value: 42 vs. 22
  misc_feature: MA Experiment 108577 PARAMETER Experiment Name: At_42deg_Heat_cDNA_P Parameter: Timepoint (hr) Value: 6
  misc_feature: MA Experiment 108577 PARAMETER Experiment Name: At_42deg_Heat_cDNA_P Parameter: Tissue Value: Aerial
  misc_feature: MA Experiment ID: 108579 Result: Down-regulated in Transcription
  misc_feature: MA Experiment 108579 PARAMETER Experiment Name: At_4deg_Cold_cDNA_P Parameter: Temperature (deg C) Value: 4 vs. 22
  misc_feature: MA Experiment 108579 PARAMETER Experiment Name: At_4deg_Cold_cDNA_P Parameter: Timepoint (hr) Value: 6
  misc_feature: MA Experiment 108579 PARAMETER Experiment Name: At_4deg_Cold_cDNA_P Parameter: Tissue Value: Aerial
  misc_feature: MA Experiment ID: 108668 Result: Up-regulated in Transcription
  misc_feature: MA Experiment 108668 PARAMETER Experiment Name: At_2mM_SA_cDNA_P Parameter: Plant Line Value: WS
  misc_feature: MA Experiment 108668 PARAMETER Experiment Name: At_2mM_SA_cDNA_P Parameter: Timepoint (hr) Value: 6
  misc_feature: MA Experiment 108668 PARAMETER Experiment Name: At_2mM_SA_cDNA_P Parameter: Treatment Value: 2mM SA vs. No Treatment
  misc_feature: MA Experiment ID: 20000090 Result: Up-regulated in Transcription
  misc_feature: MA Experiment ID: 20000113 Result: Down-regulated in Transcription
  misc_feature: MA Experiment 20000113 PARAMETER Experiment Name: At_42deg_Heat_cDNA_P Parameter: Temperature (deg C) Value: 42 vs. 22
  misc_feature: MA Experiment 20000113 PARAMETER Experiment Name: At_42deg_Heat_cDNA_P Parameter: Timepoint (hr) Value: 8
  misc_feature: MA Experiment 20000113 PARAMETER Experiment Name: At_42deg_Heat_cDNA_P Parameter: Tissue Value: Aerial
  misc_feature: MA Experiment ID: 20000182 Result: Up-regulated in Transcription
  misc_feature: MA Experiment 20000182 PARAMETER Experiment Name: At_2mM_SA_P Parameter: Age (day) Value: 14
  misc_feature: MA Experiment 20000182 PARAMETER Experiment Name: At_2mM_SA_P Parameter: Organism Value: A. thaliana
  misc_feature: MA Experiment 20000182 PARAMETER Experiment Name: At_2mM_SA_P Parameter: Plant Line Value: WS
  misc_feature: MA Experiment 20000182 PARAMETER Experiment Name: At_2mM_SA_P Parameter: Timepoint (hr) Value: 6
  misc_feature: MA Experiment 20000182 PARAMETER Experiment Name: At_2mM_SA_P Parameter: Tissue Value: Aerial
  misc_feature: MA Experiment 20000182 PARAMETER Experiment Name: At_2mM_SA_P Parameter: Treatment Value: 2mM SA vs. No Treatment
  misc_feature: MA Experiment ID: 20000185 Result: Up-regulated in Transcription
  misc_feature: MA Experiment 20000185 PARAMETER Experiment Name: At_Roots__P Parameter: Age (day) Value: 7 vs. 21
  misc_feature: MA Experiment 20000185 PARAMETER Experiment Name: At_Roots__P Parameter: Organism Value: A. thaliana
  misc_feature: MA Experiment 20000185 PARAMETER Experiment Name: At_Roots__P Parameter: Tissue Value: Roots vs. Whole Plant
  misc_feature: MA Experiment ID: 20000439 Result: Up-regulated in Transcription
  misc_feature: MA Experiment 20000439 PARAMETER Experiment Name: At_Roots__P Parameter: Age (day) Value: 14 vs. 21
  misc_feature: MA Experiment 20000439 PARAMETER Experiment Name: At_Roots__P Parameter: Organism Value: A. thaliana
  misc_feature: MA Experiment 20000439 PARAMETER Experiment Name: At_Roots__P Parameter: Tissue Value: Roots vs. Whole Plant
  misc_feature: MA Experiment ID: 20000495 Result: Up-regulated in Transcription
  misc_feature: MA Experiment 20000495 PARAMETER Experiment Name: At_Guard_Cells_P Parameter: Harvest Date Value: 8/2/2002
  misc_feature: MA Experiment 20000495 PARAMETER Experiment Name: At_Guard_Cells_P Parameter: Organism Value: A. thaliana
  misc_feature: MA Experiment 20000495 PARAMETER Experiment Name: At_Guard_Cells_P Parameter: Tissue Value: Guard Cells vs. Leaves
  misc_feature: MA Experiment ID: 20001248 Result: Up-regulated in Transcription
  misc_feature: MA Experiment 20001248 PARAMETER Experiment Name: At_Far-red-induction_P Parameter: Age (day) Value: 7
  misc_feature: MA Experiment 20001248 PARAMETER Experiment Name: At_Far-red-induction_P Parameter: Light Value: Far-red vs. White
  misc_feature: MA Experiment 20001248 PARAMETER Experiment Name: At_Far-red-induction_P Parameter: Organism Value: A. thaliana
  misc_feature: MA Experiment 20001248 PARAMETER Experiment Name: At_Far-red-induction_P Parameter: Plant Line Value: Columbia
  misc_feature: MA Experiment 20001248 PARAMETER Experiment Name: At_Far-red-induction_P Parameter: Timepoint (hr) Value: 4
  misc_feature: MA Experiment 20001248 PARAMETER Experiment Name: At_Far-red-induction_P Parameter: Tissue Value: Whole Plant
  misc_feature: MA Experiment ID: 20001451 Result: Up-regulated in Transcription
  misc_feature: MA Experiment 20001451 PARAMETER Experiment Name: At_Far-red-induction_P Parameter: Age (day) Value: 7
  misc_feature: MA Experiment 20001451 PARAMETER Experiment Name: At_Far-red-induction_P Parameter: Light Value: Far-red vs. White
  misc_feature: MA Experiment 20001451 PARAMETER Experiment Name: At_Far-red-induction_P Parameter: Organism Value: A. thaliana
  misc_feature: MA Experiment 20001451 PARAMETER Experiment Name: At_Far-red-induction_P Parameter: Plant Line Value: Columbia
  misc_feature: MA Experiment 20001451 PARAMETER Experiment Name: At_Far-red-induction_P Parameter: Timepoint (hr) Value: 24
  misc_feature: MA Experiment 20001451 PARAMETER Experiment Name: At_Far-red-induction_P Parameter: Tissue Value: Whole Plant
  misc_feature: MA Experiment ID: 20001555 Result: Down-regulated in Transcription
  misc_feature: MA Experiment 20001555 PARAMETER Experiment Name: At_Drought_Soil_Dry_P Parameter: Age (day) Value: 24
  misc_feature: MA Experiment 20001555 PARAMETER Experiment Name: At_Drought_Soil_Dry_P Parameter: Organism Value: A. thaliana
  misc_feature: MA Experiment 20001555 PARAMETER Experiment Name: At_Drought_Soil_Dry_P Parameter: Plant Line Value: WS
  misc_feature: MA Experiment 20001555 PARAMETER Experiment Name: At_Drought_Soil_Dry_P Parameter: Post Timepoint (hr) Value: None
  misc_feature: MA Experiment 20001555 PARAMETER Experiment Name: At_Drought_Soil_Dry_P Parameter: Post-Treatment Value: None
  misc_feature: MA Experiment 20001555 PARAMETER Experiment Name: At_Drought_Soil_Dry_P Parameter: Timepoint (day) Value: 10
  misc_feature: MA Experiment 20001555 PARAMETER Experiment Name: At_Drought_Soil_Dry_P Parameter: Treatment Value: Drought vs. No Drought
  misc_feature: MA Experiment ID: 20001557 Result: Down-regulated in Transcription
  misc_feature: MA Experiment 20001557 PARAMETER Experiment Name: At_Drought_Soil_Dry_P Parameter: Age (day) Value: 27
  misc_feature: MA Experiment 20001557 PARAMETER Experiment Name: At_Drought_Soil_Dry_P Parameter: Organism Value: A. thaliana
  misc_feature: MA Experiment 20001557 PARAMETER Experiment Name: At_Drought_Soil_Dry_P Parameter: Plant Line Value: WS
  misc_feature: MA Experiment 20001557 PARAMETER Experiment Name: At_Drought_Soil_Dry_P Parameter: Post Timepoint (hr) Value: 3
  misc_feature: MA Experiment 20001557 PARAMETER Experiment Name: At_Drought_Soil_Dry_P Parameter: Post-Treatment Value: Re-Water vs. No Drought
  misc_feature: MA Experiment 20001557 PARAMETER Experiment Name: At_Drought_Soil_Dry_P Parameter: Timepoint (day) Value: 13
  misc_feature: MA Experiment 20001557 PARAMETER Experiment Name: At_Drought_Soil_Dry_P Parameter: Treatment Value: Drought vs. No Drought
  misc_feature: MA Experiment ID: 20001558 Result: Down-regulated in Transcription
  misc_feature: MA Experiment 20001558 PARAMETER Experiment Name: At_Drought_Soil_Dry_P Parameter: Age (day) Value: 27
  misc_feature: MA Experiment 20001558 PARAMETER Experiment Name: At_Drought_Soil_Dry_P Parameter: Organism Value: A. thaliana
  misc_feature: MA Experiment 20001558 PARAMETER Experiment Name: At_Drought_Soil_Dry_P Parameter: Plant Line Value: WS
  misc_feature: MA Experiment 20001558 PARAMETER Experiment Name: At_Drought_Soil_Dry_P Parameter: Post Timepoint (hr) Value: 6
  misc_feature: MA Experiment 20001558 PARAMETER Experiment Name: At_Drought_Soil_Dry_P Parameter: Post-Treatment Value: Re-Water vs. No Drought
  misc_feature: MA Experiment 20001558 PARAMETER Experiment Name: At_Drought_Soil_Dry_P Parameter: Timepoint (day) Value: 13
  misc_feature: MA Experiment 20001558 PARAMETER Experiment Name: At_Drought_Soil_Dry_P Parameter: Treatment Value: Drought vs. No Drought
  misc_feature: MA Experiment ID: 20001559 Result: Down-regulated in Transcription
  misc_feature: MA Experiment 20001559 PARAMETER Experiment Name: At_Drought_Soil_Dry_P Parameter: Age (day) Value: 28
  misc_feature: MA Experiment 20001559 PARAMETER Experiment Name: At_Drought_Soil_Dry_P Parameter: Organism Value: A. thaliana
  misc_feature: MA Experiment 20001559 PARAMETER Experiment Name: At_Drought_Soil_Dry_P Parameter: Plant Line Value: WS
  misc_feature: MA Experiment 20001559 PARAMETER Experiment Name: At_Drought_Soil_Dry_P Parameter: Post Timepoint (hr) Value: 29
  misc_feature: MA Experiment 20001559 PARAMETER Experiment Name: At_Drought_Soil_Dry_P Parameter: Post-Treatment Value: Re-Water vs. No Drought
  misc_feature: MA Experiment 20001559 PARAMETER Experiment Name: At_Drought_Soil_Dry_P Parameter: Timepoint (day) Value: 14
  misc_feature: MA Experiment 20001559 PARAMETER Experiment Name: At_Drought_Soil_Dry_P Parameter: Treatment Value: Drought vs. No Drought
  misc_feature: MA Experiment ID: 20001560 Result: Down-regulated in Transcription
  misc_feature: MA Experiment 20001560 PARAMETER Experiment Name: At_Drought_Soil_Dry_P Parameter: Age (day) Value: 28
  misc_feature: MA Experiment 20001560 PARAMETER Experiment Name: At_Drought_Soil_Dry_P Parameter: Organism Value: A. thaliana
  misc_feature: MA Experiment 20001560 PARAMETER Experiment Name: At_Drought_Soil_Dry_P Parameter: Plant Line Value: WS
  misc_feature: MA Experiment 20001560 PARAMETER Experiment Name: At_Drought_Soil_Dry_P Parameter: Post Timepoint (hr) Value: None
  misc_feature: MA Experiment 20001560 PARAMETER Experiment Name: At_Drought_Soil_Dry_P Parameter: Post-Treatment Value: None
  misc_feature: MA Experiment 20001560 PARAMETER Experiment Name: At_Drought_Soil_Dry_P Parameter: Timepoint (day) Value: 14
  misc_feature: MA Experiment 20001560 PARAMETER Experiment Name: At_Drought_Soil_Dry_P Parameter: Treatment Value: Drought vs. No Drought
  misc_feature: MA Experiment ID: 20001757 Result: Down-regulated in Transcription
  misc_feature: MA Experiment 20001757 PARAMETER Experiment Name: At_50mM_NH4NO3_L-to-H_P Parameter: Timepoint (hr) Value: 6
  misc_feature: MA Experiment 20001757 PARAMETER Experiment Name: At_50mM_NH4NO3_L-to-H_P Parameter: Tissue Value: Leaf
  misc_feature: MA Experiment 20001757 PARAMETER Experiment Name: At_50mM_NH4NO3_L-to-H_P Parameter: Treatment Value: 50mM NH4NO3 vs 100mM Mannitol
  misc_feature: MA Experiment ID: 20001906 Result: Up-regulated in Transcription
  misc_feature: MA Experiment 20001906 PARAMETER Experiment Name: At_Drought_Reproduction_P Parameter: Age (day) Value: 35
  misc_feature: MA Experiment 20001906 PARAMETER Experiment Name: At_Drought_Reproduction_P Parameter: Organism Value: A. thaliana
  misc_feature: MA Experiment 20001906 PARAMETER Experiment Name: At_Drought_Reproduction_P Parameter: Plant Line Value: WS
  misc_feature: MA Experiment 20001906 PARAMETER Experiment Name: At_Drought_Reproduction_P Parameter: Timepoint (day) Value: 5
  misc_feature: MA Experiment 20001906 PARAMETER Experiment Name: At_Drought_Reproduction_P Parameter: Tissue Value: Siliques
  misc_feature: MA Experiment 20001906 PARAMETER Experiment Name: At_Drought_Reproduction_P Parameter: Treatment Value: Drought vs. No Drought
  misc_feature: MA Experiment ID: 20001908 Result: Up-regulated in Transcription
  misc_feature: MA Experiment 20001908 PARAMETER Experiment Name: At_Drought_Reproduction_P Parameter: Age (day) Value: 40
  misc_feature: MA Experiment 20001908 PARAMETER Experiment Name: At_Drought_Reproduction_P Parameter: Organism Value: A. thaliana
  misc_feature: MA Experiment 20001908 PARAMETER Experiment Name: At_Drought_Reproduction_P Parameter: Plant Line Value: WS
  misc_feature: MA Experiment 20001908 PARAMETER Experiment Name: At_Drought_Reproduction_P Parameter: Timepoint (day) Value: 10
  misc_feature: MA Experiment 20001908 PARAMETER Experiment Name: At_Drought_Reproduction_P Parameter: Tissue Value: Siliques
  misc_feature: MA Experiment 20001908 PARAMETER Experiment Name: At_Drought_Reproduction_P Parameter: Treatment Value: Drought vs. No Drought
attagaagttcagaaatactgtttataaatacaaatccagagtcagagatccattcgatagcactttcctctctttctctcatcgtaaaaccgttcttcgttttttctatttctctcgtctctttcttctacccagatcactgatcaaccgtgaattttactctactctttcatcaattttactgtgtttaattcataaaacaaaacaaacgatcgatttttgtttttttttggggatgaagatcagaagcaaaagcaaaggctatcgtcaagagatcaaatcaacttgcaccgactccaacactctgttctcaaaagatgtggttgcaacttcggagcttttttcatctgtgatatcgtagcgtgtgaaagacggataattctacagagacaatgcatcatcccattcggtcagaagaaaataaagtcaaacaaaaatggcggagaaaaagagagtcaagtacttcattgttgatgcattcgctgaatctgccttcaaagggaatccagctgctgtttgctttctagaagacgataacgagagagacgacgcgtggcttcagtctcttgccaccgagttcaatatctccgagacttgtttcctcactccgatcatcggagacttgcctcgcttccgtctccgttggttcactccagtcgctgaggtttccgtgttttcttttggttttggaattcggaattgttcggttgacttgttatcattgacttgatagatcctgataactagaacttgtactcattcactggctcttgtgaatctctctttgctttgctgttattgtgcaggtggatttgtgtggtcatgcaactttagcatctgctcacgttctcttctcaactggtttggttggttcagagacagttgagttcgacacattatcagggattctaacagctaaacatctcaaaaatgatgatgatggagaagaatcaagtatcgaattggatttccctgttgttccaacatatgaagtcaactacattgatgatgatctctctttgttctccaaagccttgaatggagctaccattcttgatgtcaaagccacaaagaaagacctcctcgttgtgctttcatcttgggaagctgttattgatttgaagccaagattagatgagatatcgaaatgcccttgtgaaggaatgatggtgactgccgctgcttctgatggatctacttatgatttctgtagtcgctactttgccccgagattcggaatcaatgaggaccctgttactggaagtgctcattgtgctttagctcattactggagcctcaggatgaacaagtgtgatttcttcgcctaccaggcttcaagcagaggaggaacgttgaaggtgcacctggacaaagagaagcagagggttctactgagaggcaaagcagtcactgttatggaaggttatgtcttagtgtgattttggctatgatgaaaattcaggctcttgtaaacgatgaaattaataaaagattccat

SEQ ID NO: 36732 - protein, 97 aa, Arabidopsis thaliana
  peptide (1)..(97): Ceres Seq. ID no. 12340516
  misc_feature (4)..(83): Homolog of NCBI NO: 27367280 NR Description: Predicted epimerase [Vibrio vulnificus CMCP6]
  misc_feature (8)..(79): Homolog of NCBI NO: 23017885 NR Description: hypothetical protein [Thermobifida fusca]
  misc_feature (12)..(79): Homolog of NCBI NO: 23028680 NR Description: hypothetical protein [Microbulbifer degradans
  misc_feature (10)..(79): Homolog of NCBI NO: 15612846 NR Description: BH0283~unknown conserved protein [Bacillus
  misc_feature (12)..(79): Homolog of NCBI NO: 32477020 NR Description: conserved hypothetical protein-putative phenazine
  misc_feature (4)..(79): Homolog of NCBI NO: 34903112 NR Description: unnamed protein product [Oryza sativa (japonica
  misc_feature (1)..(79): Homolog of NCBI NO: 15236201 NR Description: putative protein; protein id: At4g02850.1
  misc_feature (1)..(79): Homolog of NCBI NO: 20466358 NR Description: putative protein [Arabidopsis thaliana]
  misc_feature (1)..(79): Homolog of NCBI NO: 15236203 NR Description: putative protein
  misc_feature (1)..(79): Homolog of NCBI NO: 15218739 NR Description: unknown protein
MAEKKRVKYFIVDAFAESAFKGNPAAVCFLEDDNERDDAWLQSLATEFNISETCFLTPIIGDLPRFRLRWFTPVAEVSVFSFGFGIRNCSVDLLSLT

SEQ ID NO: 36733 - protein, 91 aa, Arabidopsis thaliana
  peptide (1)..(91): Ceres Seq. ID no. 12340517
  misc_feature (1)..(91): Homolog of NCBI NO: 27367280 NR Description: Predicted epimerase [Vibrio vulnificus CMCP6]
  misc_feature (1)..(87): Homolog of NCBI NO: 23017885 NR Description: hypothetical protein [Thermobifida fusca]
  misc_feature (1)..(87): Homolog of NCBI NO: 23028680 NR Description: hypothetical protein [Microbulbifer degradans
  misc_feature (1)..(91): Homolog of NCBI NO: 15612846 NR Description: BH0283~unknown conserved protein [Bacillus
  misc_feature (1)..(90): Homolog of NCBI NO: 32477020 NR Description: conserved hypothetical protein-putative phenazine
  misc_feature (1)..(90): Homolog of NCBI NO: 34903112 NR Description: unnamed protein product [Oryza sativa (japonica
  misc_feature (1)..(91): Homolog of NCBI NO: 15236201 NR Description: putative protein; protein id: At4g02850.1
  misc_feature (1)..(91): Homolog of NCBI NO: 20466358 NR Description: putative protein [Arabidopsis thaliana]
  misc_feature (1)..(91): Homolog of NCBI NO: 15236203 NR Description: putative protein
  misc_feature (1)..(91): Homolog of NCBI NO: 15218739 NR Description: unknown protein
MMVTAAASDGSTYDFCSRYFAPRFGINEDPVTGSAHCALAHYWSLRMNKCDFFAYQASSRGGTLKVHLDKEKQRVLLRGKAVTVMEGYVLV

SEQ ID NO: 36734 - protein, 90 aa, Arabidopsis thaliana
  peptide (1)..(90): Ceres Seq. ID no. 12340518
  misc_feature (1)..(90): Homolog of NCBI NO: 27367280 NR Description: Predicted epimerase [Vibrio vulnificus CMCP6]
  misc_feature (1)..(86): Homolog of NCBI NO: 23017885 NR Description: hypothetical protein [Thermobifida fusca]
  misc_feature (1)..(86): Homolog of NCBI NO: 23028680 NR Description: hypothetical protein [Microbulbifer degradans
  misc_feature (1)..(90): Homolog of NCBI NO: 15612846 NR Description: BH0283~unknown conserved protein [Bacillus
  misc_feature (1)..(89): Homolog of NCBI NO: 32477020 NR Description: conserved hypothetical protein-putative phenazine
  misc_feature (1)..(89): Homolog of NCBI NO: 34903112 NR Description: unnamed protein product [Oryza sativa (japonica
  misc_feature (1)..(90): Homolog of NCBI NO: 15236201 NR Description: putative protein; protein id: At4g02850.1
  misc_feature (1)..(90): Homolog of NCBI NO: 20466358 NR Description: putative protein [Arabidopsis thaliana]
  misc_feature (1)..(90): Homolog of NCBI NO: 15236203 NR Description: putative protein
  misc_feature (1)..(90): Homolog of NCBI NO: 15218739 NR Description: unknown protein
MVTAAASDGSTYDFCSRYFAPRFGINEDPVTGSAHCALAHYWSLRMNKCDFFAYQASSRGGTLKVHLDKEKQRVLLRGKAVTVMEGYVLV

SEQ ID NO: 36735 - DNA, 1259 bp, Arabidopsis thaliana; identical to SEQ ID NO: 35122
  misc_feature (1)..(1259): Ceres Seq. ID no. 13489103
  misc_feature: MA Experiment ID: 20001248 Result: Up-regulated in Transcription
  misc_feature: MA Experiment 20001248 PARAMETER Experiment Name: At_Far-red-induction_P Parameter: Age (day) Value: 7
  misc_feature: MA Experiment 20001248 PARAMETER Experiment Name: At_Far-red-induction_P Parameter: Light Value: Far-red vs. White
  misc_feature: MA Experiment 20001248 PARAMETER Experiment Name: At_Far-red-induction_P Parameter: Organism Value: A. thaliana
  misc_feature: MA Experiment 20001248 PARAMETER Experiment Name: At_Far-red-induction_P Parameter: Plant Line Value: Columbia
  misc_feature: MA Experiment 20001248 PARAMETER Experiment Name: At_Far-red-induction_P Parameter: Timepoint (hr) Value: 4
  misc_feature: MA Experiment 20001248 PARAMETER Experiment Name: At_Far-red-induction_P Parameter: Tissue Value: Whole Plant

SEQ ID NO: 36736 - protein, 346 aa, Arabidopsis thaliana; identical to SEQ ID NO: 35123
  peptide (1)..(346): Ceres Seq. ID no. 13489104
  misc_feature (11)..(116): Homolog of NCBI NO: 37719680 NR Description: WD40 repeat protein [Zea mays]
  misc_feature (217)..(346): Homolog of NCBI NO: 37719680 NR Description: WD40 repeat protein [Zea mays]
  misc_feature (33)..(346): Homolog of NCBI NO: 13346196 NR Description: WD1521 [Gossypium hirsutum]
  misc_feature (1)..(346): Homolog of NCBI NO: 22324809 NR Description: WD-repeat protein GhTTG4 [Gossypium hirsutum]
  misc_feature (1)..(346): Homolog of NCBI NO: 22324803 NR Description: WD-repeat protein GhTTG2 [Gossypium hirsutum]
  misc_feature (1)..(346): Homolog of NCBI NO: 21593264 NR Description: flower pigmentation protein ATAN11 [Arabidopsis
  misc_feature (1)..(346): Homolog of NCBI NO: 2290528 NR Description: ATAN11 [Arabidopsis thaliana]
  misc_feature (1)..(346): Homolog of NCBI NO: 15222113 NR Description: flower pigmentation protein ATAN11 [Arabidopsis
  misc_feature (1)..(346): Homolog of NCBI NO: 28393624 NR Description: putative transcriptional regulator protein
  misc_feature (1)..(346): Homolog of NCBI NO: 15231593 NR Description: transducin / WD-40 repeat protein family
  misc_feature (11)..(116): Homolog of NCBI NO: 37719680 NR Description: WD40 repeat protein [Zea mays]
  misc_feature (217)..(346): Homolog of NCBI NO: 37719680 NR Description: WD40 repeat protein [Zea mays]
  misc_feature (33)..(346): Homolog of NCBI NO: 13346196 NR Description: WD1521 [Gossypium hirsutum]
  misc_feature (1)..(346): Homolog of NCBI NO: 22324809 NR Description: WD-repeat protein GhTTG4 [Gossypium hirsutum]
  misc_feature (1)..(346): Homolog of NCBI NO: 22324803 NR Description: WD-repeat protein GhTTG2 [Gossypium hirsutum]
  misc_feature (1)..(346): Homolog of NCBI NO: 21593264 NR Description: flower pigmentation protein ATAN11 [Arabidopsis
  misc_feature (1)..(346): Homolog of NCBI NO: 2290528 NR Description: ATAN11 [Arabidopsis thaliana]
  misc_feature (1)..(346): Homolog of NCBI NO: 15222113 NR Description: flower pigmentation protein ATAN11 [Arabidopsis
  misc_feature (1)..(346): Homolog of NCBI NO: 28393624 NR Description: putative transcriptional regulator protein
  misc_feature (1)..(346): Homolog of NCBI NO: 15231593 NR Description: transducin / WD-40 repeat protein family

SEQ ID NO: 36737 - protein, 314 aa, Arabidopsis thaliana; identical to SEQ ID NO: 35124
  peptide (1)..(314): Ceres Seq. ID no. 13489105
  misc_feature (1)..(84): Homolog of NCBI NO: 37719680 NR Description: WD40 repeat protein [Zea mays]
  misc_feature (185)..(314): Homolog of NCBI NO: 37719680 NR Description: WD40 repeat protein [Zea mays]
  misc_feature (1)..(314): Homolog of NCBI NO: 13346196 NR Description: WD1521 [Gossypium hirsutum]
  misc_feature (1)..(314): Homolog of NCBI NO: 22324809 NR Description: WD-repeat protein GhTTG4 [Gossypium hirsutum]
  misc_feature (1)..(314): Homolog of NCBI NO: 22324803 NR Description: WD-repeat protein GhTTG2 [Gossypium hirsutum]
  misc_feature (1)..(314): Homolog of NCBI NO: 21593264 NR Description: flower pigmentation protein ATAN11 [Arabidopsis
  misc_feature (1)..(314): Homolog of NCBI NO: 2290528 NR Description: ATAN11 [Arabidopsis thaliana]
  misc_feature (1)..(314): Homolog of NCBI NO: 15222113 NR Description: flower pigmentation protein ATAN11 [Arabidopsis
  misc_feature (1)..(314): Homolog of NCBI NO: 28393624 NR Description: putative transcriptional regulator protein
  misc_feature (1)..(314): Homolog of NCBI NO: 15231593 NR Description: transducin / WD-40 repeat protein family
  misc_feature (1)..(84): Homolog of NCBI NO: 37719680 NR Description: WD40 repeat protein [Zea mays]
  misc_feature (185)..(314): Homolog of NCBI NO: 37719680 NR Description: WD40 repeat protein [Zea mays]
  misc_feature (1)..(314): Homolog of NCBI NO: 13346196 NR Description: WD1521 [Gossypium hirsutum]
  misc_feature (1)..(314): Homolog of NCBI NO: 22324809 NR Description: WD-repeat protein GhTTG4 [Gossypium hirsutum]
  misc_feature (1)..(314): Homolog of NCBI NO: 22324803 NR Description: WD-repeat protein GhTTG2 [Gossypium hirsutum]
  misc_feature (1)..(314): Homolog of NCBI NO: 21593264 NR Description: flower pigmentation protein ATAN11 [Arabidopsis
  misc_feature (1)..(314): Homolog of NCBI NO: 2290528 NR Description: ATAN11 [Arabidopsis thaliana]
  misc_feature (1)..(314): Homolog of NCBI NO: 15222113 NR Description: flower pigmentation protein ATAN11 [Arabidopsis
  misc_feature (1)..(314): Homolog of NCBI NO: 28393624 NR Description: putative transcriptional regulator protein
  misc_feature (1)..(314): Homolog of NCBI NO: 15231593 NR Description: transducin / WD-40 repeat protein family

SEQ ID NO: 36738 - DNA, 1386 bp, Arabidopsis thaliana
  misc_feature (1)..(1386): Ceres Seq. ID no. 12337134
  misc_feature: MA Experiment ID: 108434 Result: Up-regulated in Transcription
  misc_feature: MA Experiment 108434 PARAMETER Experiment Name: At_Root_Tips_cDNA_P Parameter: Tissue Value: Root Tips
  misc_feature: MA Experiment ID: 108462 Result: Down-regulated in Transcription
  misc_feature: MA Experiment 108462 PARAMETER Experiment Name: At_Germinating_Seeds_cDNA_P Parameter: Age (day) Value: 2 vs. 0
  misc_feature: MA Experiment 108462 PARAMETER Experiment Name: At_Germinating_Seeds_cDNA_P Parameter: Tissue Value: Germinating Seeds
  misc_feature: MA Experiment ID: 108463 Result: Down-regulated in Transcription
  misc_feature: MA Experiment 108463 PARAMETER Experiment Name: At_Germinating_Seeds_cDNA_P Parameter: Age (day) Value: 3 vs. 0
  misc_feature: MA Experiment 108463 PARAMETER Experiment Name: At_Germinating_Seeds_cDNA_P Parameter: Tissue Value: Germinating Seeds
  misc_feature: MA Experiment ID: 20000224 Result: Down-regulated in Transcription
actggtggtaatatcgctggcgtttcgcaagtatcaccgggaattgcaaagaagcagaggaccatgtacggagacgctacaaactggaatgaagatgagtatagagaatcaattttgaaggagcgagagatagagacacgcaccgtcttcagaaccgcctgggctcctccggcgagaatctctaatccagacgcatttgttgtagcctccagcgatggaactttagctttccattcactgaactcgcttgtgtctcaatcggcgagttttggctactcgaaaggtcaagatgttatggtggctgaacctgagagagtggttagggcacacgaaggtcctgcttatgatgttaagttctatggtgaagacgaagatgctttgctacttagttgtggtgatgatggtagagttaggggatggaaatggagagaatttgctgaatcagatgtgtctcttcatttgaaagagaatcatctgaagccattgcttgaactgattaatccacaacacaaaggtccttggggtgcgctttcaccgatgcctgagatcaatgccatgtctgttgatcctcagtcaggaagtgtatttacagcagctggtgattcttgcgcatattgttgggacgtggagagtggtaagattaaaatgacctttaaaggtcattcagactatttgcatactgtagtttctcgtagttctgcaagtcagatattgacgggttcagaggatgggactgcgagaatctgggattgcaaaacgggaaaatgtgttaaagtaattggttcccaggataaaaagtcccgccttcgcgttagttctatggcccttgatgggagtgaaagctggttggtttgtggacagggcaaaaatttagctttatggaatcttcccgcctcagaatgcgtacaaacaatacccatccctgcacatgtacaggatgtgatgtttgatgaaaagcaaattttgactgtaggagcagaaccacttctaagacgtttcgacttaaatggagctttgctttctcaaattcactgtgctccttgttcagtattttccatttccttgcatccagcaggagtagttgctgtgggaggttatggaggtattgttgatgtcatctctcaatttggaagccatctctgcacatttcgtagcagttcattgtaaaactccttacagtttcttgatttggctcgataccctaaagaggtaccgaaatgtgtcagtcagattattgcagaggttaagaaaccttttctttgtttttcttaggatcttgctcctgactaaagaccaattagttgtttggttaagtgtaattggtttgtggttccgtagttgctatcaaatttgaaccattaaaatgacattggaccggtttagtct

SEQ ID NO: 36739 - protein, 388 aa, Arabidopsis thaliana
  peptide (1)..(388): Ceres Seq. ID no. 12337135
  misc_feature (197)..(365): Homolog of NCBI NO: 17227525 NR Description: WD-40 repeat protein [Nostoc sp. PCC 7120]
  misc_feature (182)..(334): Homolog of NCBI NO: 23199987 NR Description: WD repeat domain 5B [Homo sapiens]
  misc_feature (182)..(334): Homolog of NCBI NO: 7023854 NR Description: unnamed protein product [Homo sapiens]
  misc_feature (60)..(376): Homolog of NCBI NO: 31212983 NR Description: ENSANGP00000014160 [Anopheles gambiae]
  misc_feature (111)..(376): Homolog of NCBI NO: 21358289 NR Description: CG5632-PA [Drosophila melanogaster]
  misc_feature (114)..(323): Homolog of NCBI NO: 22761350 NR Description: unnamed protein product [Homo sapiens]
  misc_feature (114)..(377): Homolog of NCBI NO: 31543164 NR Description: hypothetical protein MGC2655 [Homo sapiens]
  misc_feature (114)..(377): Homolog of NCBI NO: 13111899 NR Description: MGC2655 protein [Homo sapiens]
  misc_feature (22)..(325): Homolog of NCBI NO: 7486245 NR Description: probable WD-40 repeat protein [imported] -
  misc_feature (22)..(388): Homolog of NCBI NO: 30680669 NR Description: transducin / WD-40 repeat protein family
TGGNIAGVSQVSPGIAKKQRTMYGDATNWNEDEYRESILKEREIETRTVFRTAWAPPARISNPDAFVVASSDGTLAFHSLNSLVSQSASFGYSKGQDVMVAEPERVVRAHEGPAYDVKFYGEDEDALLLSCGDDGRVRGWKWREFAESDVSLHLKENHLKPLLELINPQHKGPWGALSPMPEINAMSVDPQSGSVFTAAGDSCAYCWDVESGKIKMTFKGHSDYLHTVVSRSSASQILTGSEDGTARIWDCKTGKCVKVIGSQDKKSRLRVSSMALDGSESWLVCGQGKNLALWNLPASECVQTIPIPAHVQDVMFDEKQILTVGAEPLLRRFDLNGALLSQIHCAPCSVFSISLHPAGVVAVGGYGGIVDVISQFGSHLCTFRSSSL

SEQ ID NO: 36740 - protein, 367 aa, Arabidopsis thaliana
  peptide (1)..(367): Ceres Seq. ID no. 12337136
  misc_feature (176)..(344): Homolog of NCBI NO: 17227525 NR Description: WD-40 repeat protein [Nostoc sp. PCC 7120]
  misc_feature (161)..(313): Homolog of NCBI NO: 23199987 NR Description: WD repeat domain 5B [Homo sapiens]
  misc_feature (161)..(313): Homolog of NCBI NO: 7023854 NR Description: unnamed protein product [Homo sapiens]
  misc_feature (39)..(355): Homolog of NCBI NO: 31212983 NR Description: ENSANGP00000014160 [Anopheles gambiae]
  misc_feature (90)..(355): Homolog of NCBI NO: 21358289 NR Description: CG5632-PA [Drosophila melanogaster]
  misc_feature (93)..(302): Homolog of NCBI NO: 22761350 NR Description: unnamed protein product [Homo sapiens]
  misc_feature (93)..(356): Homolog of NCBI NO: 31543164 NR Description: hypothetical protein MGC2655 [Homo sapiens]
  misc_feature (93)..(356): Homolog of NCBI NO: 13111899 NR Description: MGC2655 protein [Homo sapiens]
  misc_feature (1)..(304): Homolog of NCBI NO: 7486245 NR Description: probable WD-40 repeat protein [imported] -
  misc_feature (1)..(367): Homolog of NCBI NO: 30680669 NR Description: transducin / WD-40 repeat protein family
MYGDATNWNEDEYRESILKEREIETRTVFRTAWAPPARISNPDAFVVASSDGTLAFHSLNSLVSQSASFGYSKGQDVMVAEPERVVRAHEGPAYDVKFYGEDEDALLLSCGDDGRVRGWKWREFAESDVSLHLKENHLKPLLELINPQHKGPWGALSPMPEINAMSVDPQSGSVFTAAGDSCAYCWDVESGKIKMTFKGHSDYLHTVVSRSSASQILTGSEDGTARIWDCKTGKCVKVIGSQDKKSRLRVSSMALDGSESWLVCGQGKNLALWNLPASECVQTIPIPAHVQDVMFDEKQILTVGAEPLLRRFDLNGALLSQIHCAPCSVFSISLHPAGVVAVGGYGGIVDVISQFGSHLCTFRSSSL

SEQ ID NO: 36741 - protein, 290 aa, Arabidopsis thaliana
  peptide (1)..(290): Ceres Seq. ID no. 12337137
  misc_feature (99)..(267): Homolog of NCBI NO: 17227525 NR Description: WD-40 repeat protein [Nostoc sp. PCC 7120]
  misc_feature (84)..(236): Homolog of NCBI NO: 23199987 NR Description: WD repeat domain 5B [Homo sapiens]
  misc_feature (84)..(236): Homolog of NCBI NO: 7023854 NR Description: unnamed protein product [Homo sapiens]
  misc_feature (1)..(278): Homolog of NCBI NO: 31212983 NR Description: ENSANGP00000014160 [Anopheles gambiae]
  misc_feature (13)..(278): Homolog of NCBI NO: 21358289 NR Description: CG5632-PA [Drosophila melanogaster]
  misc_feature (16)..(225): Homolog of NCBI NO: 22761350 NR Description: unnamed protein product [Homo sapiens]
  misc_feature (16)..(279): Homolog of NCBI NO: 31543164 NR Description: hypothetical protein MGC2655 [Homo sapiens]
  misc_feature (16)..(279): Homolog of NCBI NO: 13111899 NR Description: MGC2655 protein [Homo sapiens]
  misc_feature (1)..(227): Homolog of NCBI NO: 7486245 NR Description: probable WD-40 repeat protein [imported] -
  misc_feature (1)..(290): Homolog of NCBI NO: 30680669 NR Description: transducin / WD-40 repeat protein family
MVAEPERVVRAHEGPAYDVKFYGEDEDALLLSCGDDGRVRGWKWREFAESDVSLHLKENHLKPLLELINPQHKGPWGALSPMPEINAMSVDPQSGSVFTAAGDSCAYCWDVESGKIKMTFKGHSDYLHTVVSRSSASQILTGSEDGTARIWDCKTGKCVKVIGSQDKKSRLRVSSMALDGSESWLVCGQGKNLALWNLPASECVQTIPIPAHVQDVMFDEKQILTVGAEPLLRRFDLNGALLSQIHCAPCSVFSISLHPAGVVAVGGYGGIVDVISQFGSHLCTFRSSSL

SEQ ID NO: 36742 - DNA, 1592 bp, Arabidopsis thaliana
  misc_feature (1)..(1592): Ceres Seq. ID no. 12489485
  misc_feature: MA Experiment ID: 20000264 Result: Up-regulated in Transcription
  misc_feature: MA Experiment 20000264 PARAMETER Experiment Name: At_Open_Flower_P Parameter: Age (day) Value: 21
  misc_feature: MA Experiment 20000264 PARAMETER Experiment Name: At_Open_Flower_P Parameter: Plant Line Value: WS
  misc_feature: MA Experiment 20000264 PARAMETER Experiment Name: At_Open_Flower_P Parameter: Tissue Value: Open Flower vs. Whole Plant
  misc_feature: MA Experiment ID: 20000286 Result: Up-regulated in Transcription
  misc_feature: MA Experiment 20000286 PARAMETER Experiment Name: At_Open_Flower_P Parameter: Age (day) Value: 21
  misc_feature: MA Experiment 20000286 PARAMETER Experiment Name: At_Open_Flower_P Parameter: Plant Line Value: WS
  misc_feature: MA Experiment 20000286 PARAMETER Experiment Name: At_Open_Flower_P Parameter: Tissue Value: Half Open vs. Whole Plant
  misc_feature: MA Experiment ID: 20000438 Result: Down-regulated in Transcription
  misc_feature: MA Experiment 20000438 PARAMETER Experiment Name: At_Shoots__P Parameter: Age (day) Value: 14
  misc_feature: MA Experiment 20000438 PARAMETER Experiment Name: At_Shoots__P Parameter: Tissue Value: Shoots vs. Whole Plant
  misc_feature: MA Experiment ID: 20000794 Result: Up-regulated in Transcription
  misc_feature: MA Experiment 20000794 PARAMETER Experiment Name: At_Petals_P Parameter: Age (day) Value: 23-25 days
  misc_feature: MA Experiment 20000794 PARAMETER Experiment Name: At_Petals_P Parameter: Plant Line Value: WS
  misc_feature: MA Experiment 20000794 PARAMETER Experiment Name: At_Petals_P Parameter: Tissue Value: Petals vs. Whole plant
  misc_feature: MA Experiment ID: 20001904 Result: Up-regulated in Transcription
  misc_feature: MA Experiment 20001904 PARAMETER Experiment Name: At_Drought_Reproduction_P Parameter: Age (day) Value: 37
  misc_feature: MA Experiment 20001904 PARAMETER Experiment Name: At_Drought_Reproduction_P Parameter: Organism Value: A. thaliana
  misc_feature: MA Experiment 20001904 PARAMETER Experiment Name: At_Drought_Reproduction_P Parameter: Plant Line Value: WS
  misc_feature: MA Experiment 20001904 PARAMETER Experiment Name: At_Drought_Reproduction_P Parameter: Timepoint (day) Value: 7
  misc_feature: MA Experiment 20001904 PARAMETER Experiment Name: At_Drought_Reproduction_P Parameter: Tissue Value: Rosettes
  misc_feature: MA Experiment 20001904 PARAMETER Experiment Name: At_Drought_Reproduction_P Parameter: Treatment Value: Drought vs. No Drought
  misc_feature: MA Experiment ID: 20001905 Result: Up-regulated in Transcription
  misc_feature: MA Experiment 20001905 PARAMETER Experiment Name: At_Drought_Reproduction_P Parameter: Age (day) Value: 40
  misc_feature: MA Experiment 20001905 PARAMETER Experiment Name: At_Drought_Reproduction_P Parameter: Organism Value: A. thaliana
  misc_feature: MA Experiment 20001905 PARAMETER Experiment Name: At_Drought_Reproduction_P Parameter: Plant Line Value: WS
  misc_feature: MA Experiment 20001905 PARAMETER Experiment Name: At_Drought_Reproduction_P Parameter: Timepoint (day) Value: 10
  misc_feature: MA Experiment 20001905 PARAMETER Experiment Name: At_Drought_Reproduction_P Parameter: Tissue Value: Rosettes
  misc_feature: MA Experiment 20001905 PARAMETER Experiment Name: At_Drought_Reproduction_P Parameter: Treatment Value: Drought vs. No Drought
  misc_feature: MA Experiment ID: 20001911 Result: Down-regulated in Transcription
  misc_feature: MA Experiment 20001911 PARAMETER Experiment Name: At_Drought_Reproduction_P Parameter: Age (day) Value: 40
  misc_feature: MA Experiment 20001911 PARAMETER Experiment Name: At_Drought_Reproduction_P Parameter: Organism Value: A. thaliana
  misc_feature: MA Experiment 20001911 PARAMETER Experiment Name: At_Drought_Reproduction_P Parameter: Plant Line Value: WS
  misc_feature: MA Experiment 20001911 PARAMETER Experiment Name: At_Drought_Reproduction_P Parameter: Timepoint (day) Value: 10
  misc_feature: MA Experiment 20001911 PARAMETER Experiment Name: At_Drought_Reproduction_P Parameter: Tissue Value: Flowers
  misc_feature: MA Experiment 20001911 PARAMETER Experiment Name: At_Drought_Reproduction_P Parameter: Treatment Value: Drought vs. No Drought
aatttatagatttgcttgggatcaattagctcgcatgtggattttcatatatatacaataccatatgaagccaaatatattataaagaaagaaatcttttttagattttgagctctggaatggagaaaagtatcaatggatcatgcagactcatcaagagactcgtgattatactttcttgtctttcatattcctttgttcgatcagactttacagagagaacaaatatcaattatgtatcagctgtgggagatcccgggatgagaaacgataacttaagggtggctatagaagcttggaaccaatgcaacgaggtcggtgaagaagctacaaacatgggaagccctcgaatggcagattgcttcgatatcgataactctagctttcccgtgaagataatccacaaagtcgacgaaagagacaacaggcttggggtaggaaatggaacctacggaggaataagcgctggagacaacgcagatatctacgcagcgcaaaaggaggtatacttaggaaacaaatgtcaagttgtggacaagccaaatccatggcagttttggatgataatgctaaagaacggtaatacggatactttagccgcaatttgtcccgaaaacgggaaaaaggcgaaaccatttcctcctacggggaggtttccatgttttgggaaaggatgtatgaacatgccatcgatgcatcatgagtacacaagcttggttgataacgaagaaggacatatgagtgggagtttttatgggacttgggacttggataacgaccaaaaagatccggttggtaataattcgtattataaggtgaaatgggagaagaagattgggggaaatgagagttgggtttttcatcatttgttgaagacttcttctaagtatccatggttgatgctttatctacgcgctgatgcttctcgaggtttctctggtggttatcattacgacactagagggatgatgaagatgctagagattattaaaggaggcggttcagggagccaattttacctaatggacatgggaagttgctggaaaaacgacggaagagactgcgacggcgacgtcacaaccgacgttacaaggtacagcgaaatgataatcaacccgggggcaaccgccgtttgcacccgcaaccgcctaggcgcttgtccgccagagcatacttttccaaacgggactaaagttcacaggacggacaaggagaagttccctttcgaagcgtatcactattactgcgttccgggaaacgcgcgttttgcggaatctccgtacgaggtttgtgatccgtacagtaatccacaaccgcaggagattctgcagatcttgcctcatccagtgtgggaacagtttgggtatccgacaaagaaaggacaaggttggattggagatccaagaacttgggaacttgatgtcggaaaactctctcagtcactcttcttttaccaggatccagggacgaaaccggtggagagacattggtcgtcgatagatttaggaactgaaatatatatgagtaagaatcaaattgctgaatggactgtaactgatttcgacattgttataccaaatgccgatatttaa

SEQ ID NO: 36743 - protein, 490 aa, Arabidopsis thaliana
  peptide (1)..(490): Ceres Seq. ID no. 12489486
  misc_feature (419)..(485): Homolog of NCBI NO: 22328547 NR Description: hypothetical protein; protein id: At4g09965.1
  misc_feature (41)..(287): Homolog of NCBI NO: 18407231 NR Description: expressed protein
  misc_feature (41)..(287): Homolog of NCBI NO: 16612271 NR Description: At2g47010/F14M4.16 [Arabidopsis thaliana]
  misc_feature (387)..(485): Homolog of NCBI NO: 7459476 NR Description: hypothetical protein At2g47010 [imported] -
  misc_feature (41)..(287): Homolog of NCBI NO: 7459476 NR Description: hypothetical protein At2g47010 [imported] -
  misc_feature (93)..(436): Homolog of NCBI NO: 7459476 NR Description: hypothetical protein At2g47010 [imported] -
  misc_feature (93)..(444): Homolog of NCBI NO: 18407231 NR Description: expressed protein
  misc_feature (93)..(485): Homolog of NCBI NO: 16612271 NR Description: At2g47010/F14M4.16 [Arabidopsis thaliana]
  misc_feature (48)..(490): Homolog of NCBI NO: 25335639 NR Description: F20D23.27 protein - Arabidopsis thaliana
  misc_feature (1)..(490): Homolog of NCBI NO: 30685122 NR Description: expressed protein [Arabidopsis thaliana]
MEKSINGSCRLIKRLVIILSCLSYSFVRSDFTERTNINYVSAVGDPGMRNDNLRVAIEAWNQCNEVGEEATNMGSPRMADCFDIDNSSFPVKIIHKVDERDNRLGVGNGTYGGISAGDNADIYAAQKEVYLGNKCQVVDKPNPWQFWMIMLKNGNTDTLAAICPENGKKAKPFPPTGRFPCFGKGCMNMPSMHHEYTSLVDNEEGHMSGSFYGTWDLDNDQKDPVGNNSYYKVKWEKKIGGNESWVFHHLLKTSSKYPWLMLYLRADASRGFSGGYHYDTRGMMKMLEIIKGGGSGSQFYLMDMGSCWKNDGRDCDGDVTTDVTRYSEMIINPGATAVCTRNRLGACPPEHTFPNGTKVHRTDKEKFPFEAYHYYCVPGNARFAESPYEVCDPYSNPQPQEILQILPHPVWEQFGYPTKKGQGWIGDPRTWELDVGKLSQSLFFYQDPGTKPVERHWSSIDLGTEIYMSKNQIAEWTVTDFDIVIPNADI

SEQ ID NO: 36744 - protein, 443 aa, Arabidopsis thaliana
  peptide (1)..(443): Ceres Seq. ID no. 12489487
  misc_feature (372)..(438): Homolog of NCBI NO: 22328547 NR Description: hypothetical protein; protein id: At4g09965.1
  misc_feature (1)..(240): Homolog of NCBI NO: 18407231 NR Description: expressed protein
  misc_feature (1)..(240): Homolog of NCBI NO: 16612271 NR Description: At2g47010/F14M4.16 [Arabidopsis thaliana]
  misc_feature (340)..(438): Homolog of NCBI NO: 7459476 NR Description: hypothetical protein At2g47010 [imported] -
  misc_feature (1)..(240): Homolog of NCBI NO: 7459476 NR Description: hypothetical protein At2g47010 [imported] -
  misc_feature (46)..(389): Homolog of NCBI NO: 7459476 NR Description: hypothetical protein At2g47010 [imported] -
  misc_feature (46)..(397): Homolog of NCBI NO: 18407231 NR Description: expressed protein
  misc_feature (46)..(438): Homolog of NCBI NO: 16612271 NR Description: At2g47010/F14M4.16 [Arabidopsis thaliana]
  misc_feature (1)..(443): Homolog of NCBI NO: 25335639 NR Description: F20D23.27 protein - Arabidopsis thaliana
  misc_feature (1)..(443): Homolog of NCBI NO: 30685122 NR Description: expressed protein [Arabidopsis thaliana]
MRNDNLRVAIEAWNQCNEVGEEATNMGSPRMADCFDIDNSSFPVKIIHKVDERDNRLGVGNGTYGGISAGDNADIYAAQKEVYLGNKCQVVDKPNPWQFWMIMLKNGNTDTLAAICPENGKKAKPFPPTGRFPCFGKGCMNMPSMHHEYTSLVDNEEGHMSGSFYGTWDLDNDQKDPVGNNSYYKVKWEKKIGGNESWVFHHLLKTSSKYPWLMLYLRADASRGFSGGYHYDTRGMMKMLEIIKGGGSGSQFYLMDMGSCWKNDGRDCDGDVTTDVTRYSEMIINPGATAVCTRNRLGACPPEHTFPNGTKVHRTDKEKFPFEAYHYYCVPGNARFAESPYEVCDPYSNPQPQEILQILPHPVWEQFGYPTKKGQGWIGDPRTWELDVGKLSQSLFFYQDPGTKPVERHWSSIDLGTEIYMSKNQIAEWTVTDFDIVIPNADI

SEQ ID NO: 36745 - protein, 418 aa, Arabidopsis thaliana
  peptide (1)..(418): Ceres Seq. ID no. 12489488
  misc_feature (347)..(413): Homolog of NCBI NO: 22328547 NR Description: hypothetical protein; protein id: At4g09965.1
  misc_feature (1)..(215): Homolog of NCBI NO: 18407231 NR Description: expressed protein
  misc_feature (1)..(215): Homolog of NCBI NO: 16612271 NR Description: At2g47010/F14M4.16 [Arabidopsis thaliana]
  misc_feature (315)..(413): Homolog of NCBI NO: 7459476 NR Description: hypothetical protein At2g47010 [imported] -
  misc_feature (1)..(215): Homolog of NCBI NO: 7459476 NR Description: hypothetical protein At2g47010 [imported] -
  misc_feature (21)..(364): Homolog of NCBI NO: 7459476 NR Description: hypothetical protein At2g47010 [imported] -
  misc_feature (21)..(372): Homolog of NCBI NO: 18407231 NR Description: expressed protein
  misc_feature (21)..(413): Homolog of NCBI NO: 16612271 NR Description: At2g47010/F14M4.16 [Arabidopsis thaliana]
  misc_feature (1)..(418): Homolog of NCBI NO: 25335639 NR Description: F20D23.27 protein - Arabidopsis thaliana
  misc_feature (1)..(418): Homolog of NCBI NO: 30685122 NR Description: expressed protein [Arabidopsis thaliana]
MGSPRMADCFDIDNSSFPVKIIHKVDERDNRLGVGNGTYGGISAGDNADIYAAQKEVYLGNKCQVVDKPNPWQFWMIMLKNGNTDTLAAICPENGKKAKPFPPTGRFPCFGKGCMNMPSMHHEYTSLVDNEEGHMSGSFYGTWDLDNDQKDPVGNNSYYKVKWEKKIGGNESWVFHHLLKTSSKYPWLMLYLRADASRGFSGGYHYDTRGMMKMLEIIKGGGSGSQFYLMDMGSCWKNDGRDCDGDVTTDVTRYSEMIINPGATAVCTRNRLGACPPEHTFPNGTKVHRTDKEKFPFEAYHYYCVPGNARFAESPYEVCDPYSNPQPQEILQILPHPVWEQFGYPTKKGQGWIGDPRTWELDVGKLSQSLFFYQDPGTKPVERHWSSIDLGTEIYMSKNQIAEWTVTDFDIVIPNADI

SEQ ID NO: 36746 - DNA, 1213 bp, Arabidopsis thaliana
  misc_feature (1)..(1213): Ceres Seq. ID no. 12395310
  misc_feature: MA Experiment ID: 108434 Result: Down-regulated in Transcription
  misc_feature: MA Experiment 108434 PARAMETER Experiment Name: At_Root_Tips_cDNA_P Parameter: Tissue Value: Root Tips
  misc_feature: MA Experiment ID: 108435 Result: Down-regulated in Transcription
  misc_feature: MA Experiment 108435 PARAMETER Experiment Name: At_stm_Mutants_cDNA_P Parameter: Plant Line Value: wt Landsburg vs stm
  misc_feature: MA Experiment 108435 PARAMETER Experiment Name: At_stm_Mutants_cDNA_P Parameter: Tissue Value: Shoot Apical Meristem Region
  misc_feature: MA Experiment ID: 108463 Result: Down-regulated in Transcription
  misc_feature: MA Experiment 108463 PARAMETER Experiment Name: At_Germinating_Seeds_cDNA_P Parameter: Age (day) Value: 3 vs. 0
  misc_feature: MA Experiment 108463 PARAMETER Experiment Name: At_Germinating_Seeds_cDNA_P Parameter: Tissue Value: Germinating Seeds
  misc_feature: MA Experiment ID: 108469 Result: Up-regulated in Transcription
  misc_feature: MA Experiment ID: 108561 Result: Up-regulated in Transcription
  misc_feature: MA Experiment 108561 PARAMETER Experiment Name: At_100uM_ABA_cDNA_P Parameter: Timepoint (hr) Value: 6
  misc_feature: MA Experiment 108561 PARAMETER Experiment Name: At_100uM_ABA_cDNA_P Parameter: Tissue Value: Aerial
  misc_feature: MA Experiment 108561 PARAMETER Experiment Name: At_100uM_ABA_cDNA_P Parameter: Treatment Value: 100uM ABA vs. No Treatment
  misc_feature: MA Experiment ID: 108572 Result: Down-regulated in Transcription
  misc_feature: MA Experiment 108572 PARAMETER Experiment Name: At_Drought_cDNA_P Parameter: Timepoint (hr) Value: 1
  misc_feature: MA Experiment 108572 PARAMETER Experiment Name: At_Drought_cDNA_P Parameter: Tissue Value: Aerial
  misc_feature: MA Experiment 108572 PARAMETER Experiment Name: At_Drought_cDNA_P Parameter: Treatment Value: Drought vs. No Drought
  misc_feature: MA Experiment ID: 108574 Result: Down-regulated in Transcription
  misc_feature: MA Experiment 108574 PARAMETER Experiment Name: At_Wounding__cDNA_P Parameter: Timepoint (hr) Value: 1
  misc_feature: MA Experiment 108574 PARAMETER Experiment Name: At_Wounding__cDNA_P Parameter: Tissue Value: Aerial
  misc_feature: MA Experiment 108574 PARAMETER Experiment Name: At_Wounding__cDNA_P Parameter: Treatment Value: Wounding vs. No Wounding
  misc_feature: MA Experiment ID: 108579 Result: Down-regulated in Transcription
  misc_feature: MA Experiment 108579 PARAMETER Experiment Name: At_4deg_Cold_cDNA_P Parameter: Temperature (deg C) Value: 4 vs. 22
  misc_feature: MA Experiment 108579 PARAMETER Experiment Name: At_4deg_Cold_cDNA_P Parameter: Timepoint (hr) Value: 6
  misc_feature: MA Experiment 108579 PARAMETER Experiment Name: At_4deg_Cold_cDNA_P Parameter: Tissue Value: Aerial
  misc_feature: MA Experiment ID: 108594 Result: Up-regulated in Transcription
  misc_feature: MA Experiment 108594 PARAMETER Experiment Name: At_Ler-rhl_Root_cDNA_P Parameter: Plant Line Value: null
  misc_feature: MA Experiment ID: 108605 Result: Up-regulated in Transcription
  misc_feature: MA Experiment 108605 PARAMETER Experiment Name: At_100uM_ABA_cDNA_P Parameter: Timepoint (hr) Value: 6
  misc_feature: MA Experiment 108605 PARAMETER Experiment Name: At_100uM_ABA_cDNA_P Parameter: Tissue Value: Aerial
  misc_feature: MA Experiment 108605 PARAMETER Experiment Name: At_100uM_ABA_cDNA_P Parameter: Treatment Value: 100uM ABA vs. No Treatment
  misc_feature: MA Experiment ID: 108668 Result: Up-regulated in Transcription
  misc_feature: MA Experiment 108668 PARAMETER Experiment Name: At_2mM_SA_cDNA_P Parameter: Plant Line Value: WS
  misc_feature: MA Experiment 108668 PARAMETER Experiment Name: At_2mM_SA_cDNA_P Parameter: Timepoint (hr) Value: 6
  misc_feature: MA Experiment 108668 PARAMETER Experiment Name: At_2mM_SA_cDNA_P Parameter: Treatment Value: 2mM SA vs. No Treatment
  misc_feature: MA Experiment ID: 20000030 Result: Up-regulated in Transcription
  misc_feature: MA Experiment 20000030 PARAMETER Experiment Name: At_CS6630_Roots_cDNA_P Parameter: Plant Line Value: CS6630 vs. WS
  misc_feature: MA Experiment 20000030 PARAMETER Experiment Name: At_CS6630_Roots_cDNA_P Parameter: Tissue Value: Roots
  misc_feature: MA Experiment ID: 20000069 Result: Up-regulated in Transcription
  misc_feature: MA Experiment 20000069 PARAMETER Experiment Name: At_100uM_ABA_Mutants_cDNA_P Parameter: Plant Line Value: CS23
  misc_feature: MA Experiment 20000069 PARAMETER Experiment Name: At_100uM_ABA_Mutants_cDNA_P Parameter: Timepoint (hr) Value: 6
  misc_feature: MA Experiment 20000069 PARAMETER Experiment Name: At_100uM_ABA_Mutants_cDNA_P Parameter: Tissue Value: Aerial
  misc_feature: MA Experiment 20000069 PARAMETER Experiment Name: At_100uM_ABA_Mutants_cDNA_P Parameter: Treatment Value: 100uM ABA vs. No Treatment
  misc_feature: MA Experiment ID: 20000070 Result: Up-regulated in Transcription
  misc_feature: MA Experiment 20000070 PARAMETER Experiment Name: At_100uM_ABA_Mutants_cDNA_P Parameter: Plant Line Value: CS24
  misc_feature: MA Experiment 20000070 PARAMETER Experiment Name: At_100uM_ABA_Mutants_cDNA_P Parameter: Timepoint (hr) Value: 6
  misc_feature: MA Experiment 20000070 PARAMETER Experiment Name: At_100uM_ABA_Mutants_cDNA_P Parameter: Tissue Value: Aerial
  misc_feature: MA Experiment 20000070 PARAMETER Experiment Name: At_100uM_ABA_Mutants_cDNA_P Parameter: Treatment Value: 100uM ABA vs. No Treatment
  misc_feature: MA Experiment ID: 20000072 Result: Up-regulated in Transcription
  misc_feature: MA Experiment 20000072 PARAMETER Experiment Name: At_100uM_ABA_Mutants_cDNA_P Parameter: Plant Line Value: CS8105
  misc_feature: MA Experiment 20000072 PARAMETER Experiment Name: At_100uM_ABA_Mutants_cDNA_P Parameter: Timepoint (hr) Value: 6
  misc_feature: MA Experiment 20000072 PARAMETER Experiment Name: At_100uM_ABA_Mutants_cDNA_P Parameter: Tissue Value: Aerial
  misc_feature: MA Experiment 20000072 PARAMETER Experiment Name: At_100uM_ABA_Mutants_cDNA_P Parameter: Treatment Value: 100uM ABA vs. No Treatment
  misc_feature: MA Experiment ID: 20000184 Result: Down-regulated in Transcription
  misc_feature: MA Experiment 20000184 PARAMETER Experiment Name: At_Shoots__P Parameter: Age (day) Value: 7
  misc_feature: MA Experiment 20000184 PARAMETER Experiment Name: At_Shoots__P Parameter: Tissue Value: Shoots vs. Whole Plant
  misc_feature: MA Experiment ID: 20000224 Result: Down-regulated in Transcription
  misc_feature: MA Experiment ID: 20000234 Result: Down-regulated in Transcription
  misc_feature: MA Experiment 20000234 PARAMETER Experiment Name: At_Siliques_P Parameter: Age (day) Value: 21
  misc_feature: MA Experiment 20000234 PARAMETER Experiment Name: At_Siliques_P Parameter: Organism Value: A. thaliana
  misc_feature: MA Experiment 20000234 PARAMETER Experiment Name: At_Siliques_P Parameter: Plant Line Value: WS
  misc_feature: MA Experiment 20000234 PARAMETER Experiment Name: At_Siliques_P Parameter: Tissue Value: Less Than 5mm Siliques vs. Whole Plant
  misc_feature: MA Experiment ID: 20000265 Result: Down-regulated in Transcription
  misc_feature: MA Experiment 20000265 PARAMETER Experiment Name: At_Open_Flower_P Parameter: Age (day) Value: 21
  misc_feature: MA Experiment 20000265 PARAMETER Experiment Name: At_Open_Flower_P Parameter: Plant Line Value: WS
  misc_feature: MA Experiment 20000265 PARAMETER Experiment Name: At_Open_Flower_P Parameter: Tissue Value: Closed Flower vs. Whole Plant
  misc_feature: MA Experiment ID: 20000267 Result: Down-regulated in Transcription
  misc_feature: MA Experiment 20000267 PARAMETER Experiment Name: At_Drought_P Parameter: Age (day) Value: 7
  misc_feature: MA Experiment 20000267 PARAMETER Experiment Name: At_Drought_P Parameter: Organism Value: A. thaliana
  misc_feature: MA Experiment 20000267 PARAMETER Experiment Name: At_Drought_P Parameter: Plant Line Value: WS
  misc_feature: MA Experiment 20000267 PARAMETER Experiment Name: At_Drought_P Parameter: Timepoint (hr) Value: 6
  misc_feature: MA Experiment 20000267 PARAMETER Experiment Name: At_Drought_P Parameter: Tissue Value: Whole Plant
  misc_feature: MA Experiment 20000267 PARAMETER Experiment Name: At_Drought_P Parameter: Treatment Value: Drought vs. No Drought
  misc_feature: MA Experiment ID: 20000268 Result: Down-regulated in Transcription
  misc_feature: MA Experiment 20000268 PARAMETER Experiment Name: At_100mM_NaCl__P Parameter: Age (day) Value: 14
  misc_feature: MA Experiment 20000268 PARAMETER Experiment Name: At_100mM_NaCl__P Parameter: Organism Value: A. thaliana
  misc_feature: MA Experiment 20000268 PARAMETER Experiment Name: At_100mM_NaCl__P Parameter: Plant Line Value: WS
  misc_feature: MA Experiment 20000268 PARAMETER Experiment Name: At_100mM_NaCl__P Parameter: Timepoint (hr) Value: 6
  misc_feature: MA Experiment 20000268 PARAMETER Experiment Name: At_100mM_NaCl__P Parameter: Tissue Value: Whole Plant
  misc_feature: MA Experiment 20000268 PARAMETER Experiment Name: At_100mM_NaCl__P Parameter: Treatment Value: 100mM NaCl vs. No Treatment
  misc_feature: MA Experiment ID: 20000436 Result: Down-regulated in Transcription
  misc_feature: MA Experiment 20000436 PARAMETER Experiment Name: At_Drought_P Parameter: Age (day) Value: 7
  misc_feature: MA Experiment 20000436 PARAMETER Experiment Name: At_Drought_P Parameter: Organism Value: A. thaliana
  misc_feature: MA Experiment 20000436 PARAMETER Experiment Name: At_Drought_P Parameter: Plant Line Value: WS
  misc_feature: MA Experiment 20000436 PARAMETER Experiment Name: At_Drought_P Parameter: Timepoint (hr) Value: 12
  misc_feature: MA Experiment 20000436 PARAMETER Experiment Name: At_Drought_P Parameter: Tissue Value: Whole Plant
  misc_feature: MA Experiment 20000436 PARAMETER Experiment Name: At_Drought_P Parameter: Treatment Value: Drought vs. No Drought
  misc_feature: MA Experiment ID: 20000438 Result: Down-regulated in Transcription
  misc_feature: MA Experiment 20000438 PARAMETER Experiment Name: At_Shoots__P Parameter: Age (day) Value: 14
  misc_feature: MA Experiment 20000438 PARAMETER Experiment Name: At_Shoots__P Parameter: Tissue Value: Shoots vs. Whole Plant
  misc_feature: MA Experiment ID: 20000439 Result: Down-regulated in Transcription
  misc_feature: MA Experiment 20000439 PARAMETER Experiment Name: At_Roots__P Parameter: Age (day) Value: 14 vs. 21
  misc_feature: MA Experiment 20000439 PARAMETER Experiment Name: At_Roots__P Parameter: Organism Value: A. thaliana
  misc_feature: MA Experiment 20000439 PARAMETER Experiment Name: At_Roots__P Parameter: Tissue Value: Roots vs. Whole Plant
  misc_feature: MA Experiment ID: 20000441 Result: Up-regulated in Transcription
  misc_feature: MA Experiment 20000441 PARAMETER Experiment Name: At_1uM_BR-BRZ__P Parameter: Tissue Value: Shoot Apices
  misc_feature: MA Experiment 20000441 PARAMETER Experiment Name: At_1uM_BR-BRZ__P Parameter: Treatment Value: 1uM BR vs. No Treatment
  misc_feature: MA Experiment ID: 20000527 Result: Up-regulated in Transcription
  misc_feature: MA Experiment 20000527 PARAMETER Experiment Name: At_10percent_PEG_P Parameter: Age (day) Value: 20
  misc_feature: MA Experiment 20000527 PARAMETER Experiment Name: At_10percent_PEG_P Parameter: Organism Value: A. thaliana
  misc_feature: MA Experiment 20000527 PARAMETER Experiment Name: At_10percent_PEG_P Parameter: Plant Line Value: WS
  misc_feature: MA Experiment 20000527 PARAMETER Experiment Name: At_10percent_PEG_P Parameter: Timepoint (day) Value: 20
  misc_feature: MA Experiment 20000527 PARAMETER Experiment Name: At_10percent_PEG_P Parameter: Tissue Value: Whole Plant
  misc_feature: MA Experiment 20000527 PARAMETER Experiment Name: At_10percent_PEG_P Parameter: Treatment Value: 10percent PEG vs. No Treatment
  misc_feature: MA Experiment ID: 20000573 Result: Up-regulated in Transcription
  misc_feature: MA Experiment 20000573 PARAMETER Experiment Name: At_100uM_ABA_Mutants__P Parameter: Organism Value: A. thaliana
  misc_feature: MA Experiment 20000573 PARAMETER Experiment Name: At_100uM_ABA_Mutants__P Parameter: Plant Line Value: CS22 vs. Ler wt
  misc_feature: MA Experiment 20000573 PARAMETER Experiment Name: At_100uM_ABA_Mutants__P Parameter: Timepoint (hr) Value: N/A
  misc_feature: MA Experiment 20000573 PARAMETER Experiment Name: At_100uM_ABA_Mutants__P Parameter: Tissue Value: Whole Plant
  misc_feature: MA Experiment 20000573 PARAMETER Experiment Name: At_100uM_ABA_Mutants__P Parameter: Treatment Value: None
  misc_feature: MA Experiment ID: 20000574 Result: Up-regulated in Transcription
  misc_feature: MA Experiment 20000574 PARAMETER Experiment Name: At_100uM_ABA_Mutants__P Parameter: Organism Value: A. thaliana
  misc_feature: MA Experiment 20000574 PARAMETER Experiment Name: At_100uM_ABA_Mutants__P Parameter: Plant Line Value: CS23 vs. Ler wt
  misc_feature: MA Experiment 20000574 PARAMETER Experiment Name: At_100uM_ABA_Mutants__P Parameter: Timepoint (hr) Value: N/A
  misc_feature: MA Experiment 20000574 PARAMETER Experiment Name: At_100uM_ABA_Mutants__P Parameter: Tissue Value: Whole Plant
  misc_feature: MA Experiment 20000574 PARAMETER Experiment Name: At_100uM_ABA_Mutants__P Parameter: Treatment Value: None
  misc_feature: MA Experiment ID: 20000575 Result: Down-regulated in Transcription
  misc_feature: MA Experiment 20000575 PARAMETER Experiment Name: At_100uM_ABA_Mutants__P Parameter: Organism Value: A. thaliana
  misc_feature: MA Experiment 20000575 PARAMETER Experiment Name: At_100uM_ABA_Mutants__P Parameter: Plant Line Value: CS22
  misc_feature: MA Experiment 20000575 PARAMETER Experiment Name: At_100uM_ABA_Mutants__P Parameter: Timepoint (hr) Value: 6
  misc_feature: MA Experiment 20000575 PARAMETER Experiment Name: At_100uM_ABA_Mutants__P Parameter: Tissue Value: Whole Plant
  misc_feature: MA Experiment 20000575 PARAMETER Experiment Name: At_100uM_ABA_Mutants__P Parameter: Treatment Value: 1uM ABA vs. No Treatment
  misc_feature: MA Experiment ID: 20000576 Result: Down-regulated in Transcription
  misc_feature: MA Experiment 20000576 PARAMETER Experiment Name: At_100uM_ABA_Mutants__P Parameter: Organism Value: A. thaliana
  misc_feature: MA Experiment 20000576 PARAMETER Experiment Name: At_100uM_ABA_Mutants__P Parameter: Plant Line Value: CS23
  misc_feature: MA Experiment 20000576 PARAMETER Experiment Name: At_100uM_ABA_Mutants__P Parameter: Timepoint (hr) Value: 6
  misc_feature: MA Experiment 20000576 PARAMETER Experiment Name: At_100uM_ABA_Mutants__P Parameter: Tissue Value: Whole Plant
  misc_feature: MA Experiment 20000576 PARAMETER Experiment Name: At_100uM_ABA_Mutants__P Parameter: Treatment Value: 1uM ABA vs. No Treatment
  misc_feature: MA Experiment ID: 20000578 Result: Up-regulated in Transcription
  misc_feature: MA Experiment 20000578 PARAMETER Experiment Name: At_CS3726__P Parameter: Organism Value: A. thaliana
  misc_feature: MA Experiment 20000578 PARAMETER Experiment Name: At_CS3726__P Parameter: Plant Line Value: CS3726
  misc_feature: MA Experiment 20000578 PARAMETER Experiment Name: At_CS3726__P Parameter: Tissue Value: Whole Plant
  misc_feature: MA Experiment ID: 20000606 Result: Up-regulated in Transcription
  misc_feature: MA Experiment 20000606 PARAMETER Experiment Name: At_CS8548_Mutant_P Parameter: Age (day) Value: 14
  misc_feature: MA Experiment 20000606 PARAMETER Experiment Name: At_CS8548_Mutant_P Parameter: Plant Line Value: CS8548 vs. wt
  misc_feature: MA Experiment 20000606 PARAMETER Experiment Name: At_CS8548_Mutant_P Parameter: Tissue Value: Whole Plant
  misc_feature: MA Experiment ID: 20001248 Result: Up-regulated in Transcription
  misc_feature: MA Experiment 20001248 PARAMETER Experiment Name: At_Far-red-induction_P Parameter: Age (day) Value: 7
  misc_feature: MA Experiment 20001248 PARAMETER Experiment Name: At_Far-red-induction_P Parameter: Light Value: Far-red vs. White
  misc_feature: MA Experiment 20001248 PARAMETER Experiment Name: At_Far-red-induction_P Parameter: Organism Value: A. thaliana
  misc_feature: MA Experiment 20001248 PARAMETER Experiment Name: At_Far-red-induction_P Parameter: Plant Line Value: Columbia
  misc_feature: MA Experiment 20001248 PARAMETER Experiment Name: At_Far-red-induction_P Parameter: Timepoint (hr) Value: 4
  misc_feature: MA Experiment 20001248 PARAMETER Experiment Name: At_Far-red-induction_P Parameter: Tissue Value: Whole Plant
  misc_feature: MA Experiment ID: 20001450 Result: Up-regulated in Transcription
  misc_feature: MA Experiment 20001450 PARAMETER Experiment Name: At_Far-red-induction_P Parameter: Age (day) Value: 7
  misc_feature: MA Experiment 20001450 PARAMETER Experiment Name: At_Far-red-induction_P Parameter: Light Value: Far-red vs. White
  misc_feature: MA Experiment 20001450 PARAMETER Experiment Name: At_Far-red-induction_P Parameter: Organism Value: A. thaliana
  misc_feature: MA Experiment 20001450 PARAMETER Experiment Name: At_Far-red-induction_P Parameter: Plant Line Value: Columbia
  misc_feature: MA Experiment 20001450 PARAMETER Experiment Name: At_Far-red-induction_P Parameter: Timepoint (hr) Value: 8
  misc_feature: MA Experiment 20001450 PARAMETER Experiment Name: At_Far-red-induction_P Parameter: Tissue Value: Whole Plant
  misc_feature: MA Experiment ID: 20001451 Result: Up-regulated in Transcription
  misc_feature: MA Experiment 20001451 PARAMETER Experiment Name: At_Far-red-induction_P Parameter: Age (day) Value: 7
  misc_feature: MA Experiment 20001451 PARAMETER Experiment Name: At_Far-red-induction_P Parameter: Light Value: Far-red vs. White
  misc_feature: MA Experiment 20001451 PARAMETER Experiment Name: At_Far-red-induction_P Parameter: Organism Value: A. thaliana
  misc_feature: MA Experiment 20001451 PARAMETER Experiment Name: At_Far-red-induction_P Parameter: Plant Line Value: Columbia
  misc_feature: MA Experiment 20001451 PARAMETER Experiment Name: At_Far-red-induction_P Parameter: Timepoint (hr) Value: 24
  misc_feature: MA Experiment 20001451 PARAMETER Experiment Name: At_Far-red-induction_P Parameter: Tissue Value: Whole Plant
  misc_feature: MA Experiment ID: 20001557 Result: Up-regulated in Transcription
  misc_feature: MA Experiment 20001557 PARAMETER Experiment Name: At_Drought_Soil_Dry_P Parameter: Age (day) Value: 27
  misc_feature: MA Experiment 20001557 PARAMETER Experiment Name: At_Drought_Soil_Dry_P Parameter: Organism Value: A. thaliana
  misc_feature: MA Experiment 20001557 PARAMETER Experiment Name: At_Drought_Soil_Dry_P Parameter: Plant Line Value: WS
  misc_feature: MA Experiment 20001557 PARAMETER Experiment Name: At_Drought_Soil_Dry_P Parameter: Post Timepoint (hr) Value: 3
  misc_feature: MA Experiment 20001557 PARAMETER Experiment Name: At_Drought_Soil_Dry_P Parameter: Post-Treatment Value: Re-Water vs. No Drought
  misc_feature: MA Experiment 20001557 PARAMETER Experiment Name: At_Drought_Soil_Dry_P Parameter: Timepoint (day) Value: 13
  misc_feature: MA Experiment 20001557 PARAMETER Experiment Name: At_Drought_Soil_Dry_P Parameter: Treatment Value: Drought vs. No Drought
  misc_feature: MA Experiment ID: 20001558 Result: Up-regulated in Transcription
  misc_feature: MA Experiment 20001558 PARAMETER Experiment Name: At_Drought_Soil_Dry_P Parameter: Age (day) Value: 27
  misc_feature: MA Experiment 20001558 PARAMETER Experiment Name: At_Drought_Soil_Dry_P Parameter: Organism Value: A. thaliana
  misc_feature: MA Experiment 20001558 PARAMETER Experiment Name: At_Drought_Soil_Dry_P Parameter: Plant Line Value: WS
  misc_feature: MA Experiment 20001558 PARAMETER Experiment Name: At_Drought_Soil_Dry_P Parameter: Post Timepoint (hr) Value: 6
  misc_feature: MA Experiment 20001558 PARAMETER Experiment Name: At_Drought_Soil_Dry_P Parameter: Post-Treatment Value: Re-Water vs. No Drought
  misc_feature: MA Experiment 20001558 PARAMETER Experiment Name: At_Drought_Soil_Dry_P Parameter: Timepoint (day) Value: 13
  misc_feature: MA Experiment 20001558 PARAMETER Experiment Name: At_Drought_Soil_Dry_P Parameter: Treatment Value: Drought vs. No Drought
  misc_feature: MA Experiment ID: 20001770 Result: Up-regulated in Transcription
  misc_feature: MA Experiment 20001770 PARAMETER Experiment Name: At_Far-red-enriched-adult_P Parameter: Age (day) Value: 28
  misc_feature: MA Experiment 20001770 PARAMETER Experiment Name: At_Far-red-enriched-adult_P Parameter: Light Value: Far-red enriched vs. White
  misc_feature: MA Experiment 20001770 PARAMETER Experiment Name: At_Far-red-enriched-adult_P Parameter: Organism Value: A. thaliana
  misc_feature: MA Experiment 20001770 PARAMETER Experiment Name: At_Far-red-enriched-adult_P Parameter: Plant Line Value: Columbia
  misc_feature: MA Experiment 20001770 PARAMETER Experiment Name: At_Far-red-enriched-adult_P Parameter: Timepoint (hr) Value: 8
  misc_feature: MA Experiment 20001770 PARAMETER Experiment Name: At_Far-red-enriched-adult_P Parameter: Tissue Value: Aerial
  misc_feature: MA Experiment ID: 20001905 Result: Up-regulated in Transcription
  misc_feature: MA Experiment 20001905 PARAMETER Experiment Name: At_Drought_Reproduction_P Parameter: Age (day) Value: 40
  misc_feature: MA Experiment 20001905 PARAMETER Experiment Name: At_Drought_Reproduction_P Parameter: Organism Value: A. thaliana
  misc_feature: MA Experiment 20001905 PARAMETER Experiment Name: At_Drought_Reproduction_P Parameter: Plant Line Value: WS
  misc_feature: MA Experiment 20001905 PARAMETER Experiment Name: At_Drought_Reproduction_P Parameter: Timepoint (day) Value: 10
  misc_feature: MA Experiment 20001905 PARAMETER Experiment Name: At_Drought_Reproduction_P Parameter: Tissue Value: Rosettes
  misc_feature: MA Experiment 20001905 PARAMETER Experiment Name: At_Drought_Reproduction_P Parameter: Treatment Value: Drought vs. No Drought
aacaacatctttcacacaacaattcacacaatttctcgtttttttttgtttatcatcaaaagttttaatctaaattacgtatcaaattccgagcaagatgactattcttgttgaacattttgttcctgattcaagagtggatgaaaagaaagtgatagaggagagggataatgaattggtgttggatggaggttttgtggttccaaaatcaaaggaaactgatgcattcgatgctcctgatatgaatttcttgggccattccttcagggattatgagaatgatgaaagcgagagacaacaaggtgttgaggaattttacaggatgcaacacattcaccagacctatgactttgtgaagaagatgaggaaagagtatggaaaacttaacaagatggaaatgagtatatgggaatgttgtgagttattgaacaatgttgttgatgaaagcgatccggatcttgatgagcctcaaattcaacaccttctccaaaccgctgaagccattcgaagggactatcccgacgaagattggctccatctcactgccctaatccatgatcttggcaaggttctccttctgccagaattcggtggtcttccccagtgggctgtcgttggcgatacatttccagttggatgtaccttcgactcagccaatattcaccacaagtatttcaaaggaaaccatgatatcaacaacccaaagtacaacacaaaaaatggagtttacactgaaggatgtggtttagacaatgttctcatgtcatggggtcatgacgactacatgtatttggtggctaagaagaatggcacgacccttcctcacgctggtctcttcattattcgatatcattccttttatccattgcacaaggcaggagcctacacacacttgatgaacgatgaggacagagatgatctcaagtggctccatgtcttcaataaatatgacctatacagtaagagcaaagttctggtagatgtcgaacaagtgaagccttactacatttcactcatcaacaagtattttccggcgaaactaaaatggtgagataaagctacgagtcaattaattaactatcttttatgaggagaacgagatcgaaggttaacgagttttctattgtatacaacggaagataaatctatctaataaaaaagttggtgtgttcatttgtaattttttcccccatcagtttaaaagttatgttgt

SEQ ID NO: 36747 - protein, 317 aa, Arabidopsis thaliana
  peptide (1)..(317): Ceres Seq. ID no. 12395311
  misc_feature (62)..(317): Pfam Name: Family of unknown function (DUF706) Pfam Description: Family of unknown function (DUF706)
  misc_feature (1)..(317): Homolog of NCBI NO: 26451656 NR Description: unknown protein [Arabidopsis thaliana]
  misc_feature (1)..(317): Homolog of NCBI NO: 30683840 NR Description: expressed protein [Arabidopsis thaliana]
  misc_feature (22)..(317): Homolog of NCBI NO: 15241891 NR Description: putative protein
  misc_feature (22)..(317): Homolog of NCBI NO: 21536858 NR Description: unknown [Arabidopsis thaliana]
  misc_feature (1)..(317): Homolog of NCBI NO: 30687167 NR Description: expressed protein [Arabidopsis thaliana]
  misc_feature (1)..(317): Homolog of NCBI NO: 7487428 NR Description: hypothetical protein T25K17.70 - Arabidopsis
  misc_feature (76)..(309): Homolog of NCBI NO: 25411930 NR Description: hypothetical protein At2g19800 [imported] -
  misc_feature (76)..(317): Homolog of NCBI NO: 13877657 NR Description: Unknown protein [Arabidopsis thaliana]
  misc_feature (1)..(317): Homolog of NCBI NO: 18399158 NR Description: expressed protein
  misc_feature (1)..(317): Homolog of NCBI NO: 21554393 NR Description: unknown [Arabidopsis thaliana]
MTILVEHFVPDSRVDEKKVIEERDNELVLDGGFVVPKSKETDAFDAPDMNFLGHSFRDYENDESERQQGVEEFYRMQHIHQTYDFVKKMRKEYGKLNKMEMSIWECCELLNNVVDESDPDLDEPQIQHLLQTAEAIRRDYPDEDWLHLTALIHDLGKVLLLPEFGGLPQWAVVGDTFPVGCTFDSANIHHKYFKGNHDINNPKYNTKNGVYTEGCGLDNVLMSWGHDDYMYLVAKKNGTTLPHAGLFIIRYHSFYPLHKAGAYTHLMNDEDRDDLKWLHVFNKYDLYSKSKVLVDVEQVKPYYISLINKYFPAKLKW

SEQ ID NO: 36748 - protein, 269 aa, Arabidopsis thaliana
  peptide (1)..(269): Ceres Seq. ID no. 12395312
  misc_feature (14)..(269): Pfam Name: Family of unknown function (DUF706) Pfam Description: Family of unknown function (DUF706)
  misc_feature (1)..(269): Homolog of NCBI NO: 26451656 NR Description: unknown protein [Arabidopsis thaliana]
  misc_feature (1)..(269): Homolog of NCBI NO: 30683840 NR Description: expressed protein [Arabidopsis thaliana]
  misc_feature (1)..(269): Homolog of NCBI NO: 15241891 NR Description: putative protein
  misc_feature (1)..(269): Homolog of NCBI NO: 21536858 NR Description: unknown [Arabidopsis thaliana]
  misc_feature (1)..(269): Homolog of NCBI NO: 30687167 NR Description: expressed protein [Arabidopsis thaliana]
  misc_feature (1)..(269): Homolog of NCBI NO: 7487428 NR Description: hypothetical protein T25K17.70 - Arabidopsis
  misc_feature (28)..(261): Homolog of NCBI NO: 25411930 NR Description: hypothetical protein At2g19800 [imported] -
  misc_feature (28)..(269): Homolog of NCBI NO: 13877657 NR Description: Unknown protein [Arabidopsis thaliana]
  misc_feature (1)..(269): Homolog of NCBI NO: 18399158 NR Description: expressed protein
  misc_feature (1)..(269): Homolog of NCBI NO: 21554393 NR Description: unknown [Arabidopsis thaliana]
MNFLGHSFRDYENDESERQQGVEEFYRMQHIHQTYDFVKKMRKEYGKLNKMEMSIWECCELLNNVVDESDPDLDEPQIQHLLQTAEAIRRDYPDEDWLHLTALIHDLGKVLLLPEFGGLPQWAVVGDTFPVGCTFDSANIHHKYFKGNHDINNPKYNTKNGVYTEGCGLDNVLMSWGHDDYMYLVAKKNGTTLPHAGLFIIRYHSFYPLHKAGAYTHLMNDEDRDDLKWLHVFNKYDLYSKSKVLVDVEQVKPYYISLINKYFPAKLKW

SEQ ID NO: 36749 - protein, 242 aa, Arabidopsis thaliana
  peptide (1)..(242): Ceres Seq. ID no. 12395313
  misc_feature (1)..(242): Pfam Name: Family of unknown function (DUF706) Pfam Description: Family of unknown function (DUF706)
  misc_feature (1)..(242): Homolog of NCBI NO: 26451656 NR Description: unknown protein [Arabidopsis thaliana]
  misc_feature (1)..(242): Homolog of NCBI NO: 30683840 NR Description: expressed protein [Arabidopsis thaliana]
  misc_feature (1)..(242): Homolog of NCBI NO: 15241891 NR Description: putative protein
  misc_feature (1)..(242): Homolog of NCBI NO: 21536858 NR Description: unknown [Arabidopsis thaliana]
  misc_feature (1)..(242): Homolog of NCBI NO: 30687167 NR Description: expressed protein [Arabidopsis thaliana]
  misc_feature (1)..(242): Homolog of NCBI NO: 7487428 NR Description: hypothetical protein T25K17.70 - Arabidopsis
  misc_feature (1)..(234): Homolog of NCBI NO: 25411930 NR Description: hypothetical protein At2g19800 [imported] -
  misc_feature (1)..(242): Homolog of NCBI NO: 13877657 NR Description: Unknown protein [Arabidopsis thaliana]
  misc_feature (1)..(242): Homolog of NCBI NO: 18399158 NR Description: expressed protein
  misc_feature (1)..(242): Homolog of NCBI NO: 21554393 NR Description: unknown [Arabidopsis thaliana]
MQHIHQTYDFVKKMRKEYGKLNKMEMSIWECCELLNNVVDESDPDLDEPQIQHLLQTAEAIRRDYPDEDWLHLTALIHDLGKVLLLPEFGGLPQWAVVGDTFPVGCTFDSANIHHKYFKGNHDINNPKYNTKNGVYTEGCGLDNVLMSWGHDDYMYLVAKKNGTTLPHAGLFIIRYHSFYPLHKAGAYTHLMNDEDRDDLKWLHVFNKYDLYSKSKVLVDVEQVKPYYISLINKYFPAKLKW

SEQ ID NO: 36750 - DNA, 1854 bp, Arabidopsis thaliana
  misc_feature (1)..(1854): Ceres Seq. ID no. 13491207
  misc_feature: MA Experiment ID: 108573 Result: Up-regulated in Transcription
  misc_feature: MA Experiment 108573 PARAMETER Experiment Name: At_Drought_cDNA_P Parameter: Timepoint (hr) Value: 6
  misc_feature: MA Experiment 108573 PARAMETER Experiment Name: At_Drought_cDNA_P Parameter: Tissue Value: Aerial
  misc_feature: MA Experiment 108573 PARAMETER Experiment Name: At_Drought_cDNA_P Parameter: Treatment Value: Drought vs. No Drought
  misc_feature: MA Experiment ID: 108577 Result: Down-regulated in Transcription
  misc_feature: MA Experiment 108577 PARAMETER Experiment Name: At_42deg_Heat_cDNA_P Parameter: Temperature (deg C) Value: 42 vs. 22
  misc_feature: MA Experiment 108577 PARAMETER Experiment Name: At_42deg_Heat_cDNA_P Parameter: Timepoint (hr) Value: 6
  misc_feature: MA Experiment 108577 PARAMETER Experiment Name: At_42deg_Heat_cDNA_P Parameter: Tissue Value: Aerial
  misc_feature: MA Experiment ID: 108595 Result: Down-regulated in Transcription
  misc_feature: MA Experiment 108595 PARAMETER Experiment Name: At_Ler-pi_Ovule_cDNA_P Parameter: Plant Line Value: null
  misc_feature: MA Experiment ID: 20000111 Result: Down-regulated in Transcription
  misc_feature: MA Experiment 20000111 PARAMETER Experiment Name: At_42deg_Heat_cDNA_P Parameter: Temperature (deg C) Value: 42 vs. 22
  misc_feature: MA Experiment 20000111 PARAMETER Experiment Name: At_42deg_Heat_cDNA_P Parameter: Timepoint (hr) Value: 6
  misc_feature: MA Experiment 20000111 PARAMETER Experiment Name: At_42deg_Heat_cDNA_P Parameter: Tissue Value: Aerial
  misc_feature: MA Experiment ID: 20000113 Result: Down-regulated in Transcription
  misc_feature: MA Experiment 20000113 PARAMETER Experiment Name: At_42deg_Heat_cDNA_P Parameter: Temperature (deg C) Value: 42 vs. 22
  misc_feature: MA Experiment 20000113 PARAMETER Experiment Name: At_42deg_Heat_cDNA_P Parameter: Timepoint (hr) Value: 8
  misc_feature: MA Experiment 20000113 PARAMETER Experiment Name: At_42deg_Heat_cDNA_P Parameter: Tissue Value: Aerial
attaccgaagagaaccaatacaaattcaaggagtgatttagattaacgcctaaatgcatcatttgcgattacaaaatcaaattttgctccagatggattttaattacttttcgtcgcttttttactttagagtttagaccttgaaatcgatggaaagcaatcgaacccgaaattctctcatttctcaatcaaaactatcttctttcacttctgggcaagaagctctgttgtggaacatcggaaatcagaactgaaacagaaacagaaaccatggagaagagagaagacgaacaacaaaagcgcgacgattctagattcaatcaaacactcaagaacgtccaagggtttcttaaaggtagaagtattcctggtaaggtattgttgactaggagatcagatcctcctccatacccaatctctccaacatatcaacggagcttatctgagaatgacgccggaagaaatgagctattcgaaagtcctgttgaggtggaggatcacaattcaagcaagaaacatgataatacatatgctggtaagctacgatcaaactctagtgctgaaaggagtgtgaaagaagttcaaaacttgaagataggtgttcgatcaagtgactctgctagagttatgaagttcaacaaagtgctttcagaaacaactgtcatattagagaaactgcgcgagctagcatggaatggtgtaccacactatatgcggcctgatgtctggcggcttctcttgggatatgcaccacctaattcagatagaagggaggctgttctgagaagaaaacgtcttgaatatctggaatctgttggccaattttatgaccttccagattccgaacgttctgatgatgagatcaatatgcttcgccagattgctgttgactgtccgaggactgtaccagatgtcagtttctttcagcaagaacaggtgcagaaatcactggagcgtattctttacacgtgggccattagacatccagcaagcggatatgttcagggaataaatgacctggtcacgcccttcctagtgattttcttgtcagaatatctagatggcggtgtagacagttggtcaatggatgatctatctgctgaaaaagtctcagatgtagaagcggattgctactggtgcttaacaaagctccttgacggtatgcaagatcattacacgtttgctcaacctggaatccagagacttgtgtttaagctgaaggaactggtcaggcgtatcgatgaacctgtttcaagacacatggaagagcatgggctagagtttcttcaatttgctttccggtggtataattgtcttctgattcgtgagatcccattcaatctcatcaatcgactatgggacacttatcttgctgaaggagatgcgttgccagacttcctggtgtatatatatgctagctttctcttgacgtggtctgatgagctgaagaagctagattttcaagaaatggtaatgttcctgcaacaccttccgacacataactggtcagaccaagagctcgaaatggttttgtcaagagcttacatgtggcatagtatgttcaataattccccaaaccatttggctagctgaaatgacttttcctccatggtgcttgctgctgtttttccctttgttatattatcttcttcttcttgttgtctaaatcagctttcgttttgttttgggttatggtaaatgctaacattcttgtcttgttaattgttattagtttatgtatggtttcacttgttgaatctgtcaccagtttgtgtgtttgtaatatttgtagctttcactaatttggctctctcaatatttttttttttttgggaattcatgaaatttggggag

SEQ ID NO: 36751 - protein, 440 aa, Arabidopsis thaliana
  peptide (1)..(440): Ceres Seq. ID no. 13491208
  misc_feature (115)..(437): Homolog of NCBI NO: 37589908 NR Description: Chromosome 22 open reading frame 4 [Homo sapiens]
  misc_feature (115)..(437): Homolog of NCBI NO: 22507409 NR Description: chromosome 22 open reading frame 4; putative
  misc_feature (115)..(437): Homolog of NCBI NO: 37181052 NR Description: TBC domain-containing protein [Rattus norvegicus]
  misc_feature (115)..(437): Homolog of NCBI NO: 38348532 NR Description: Unknown (protein for MGC:61359) [Mus musculus]
  misc_feature (115)..(437): Homolog of NCBI NO: 25008321 NR Description: TBC1 domain family protein C22orf4-like
  misc_feature (115)..(437): Homolog of NCBI NO: 40068063 NR Description: chromosome 6 open reading frame 197 [Homo
  misc_feature (51)..(438): Homolog of NCBI NO: 19112106 NR Description: TBC domain protein. [Schizosaccharomyces pombe]
  misc_feature (108)..(438): Homolog of NCBI NO: 16944405 NR Description: related to GTPase activating protein [Neurospora
  misc_feature (127)..(440): Homolog of NCBI NO: 25408101 NR Description: hypothetical protein At2g30710 [imported] -
  misc_feature (1)..(440): Homolog of NCBI NO: 18402435 NR Description: expressed protein [Arabidopsis thaliana]
MEKREDEQQKRDDSRFNQTLKNVQGFLKGRSIPGKVLLTRRSDPPPYPISPTYQRSLSENDAGRNELFESPVEVEDHNSSKKHDNTYAGKLRSNSSAERSVKEVQNLKIGVRSSDSARVMKFNKVLSETTVILEKLRELAWNGVPHYMRPDVWRLLLGYAPPNSDRREAVLRRKRLEYLESVGQFYDLPDSERSDDEINMLRQIAVDCPRTVPDVSFFQQEQVQKSLERILYTWAIRHPASGYVQGINDLVTPFLVIFLSEYLDGGVDSWSMDDLSAEKVSDVEADCYWCLTKLLDGMQDHYTFAQPGIQRLVFKLKELVRRIDEPVSRHMEEHGLEFLQFAFRWYNCLLIREIPFNLINRLWDTYLAEGDALPDFLVYIYASFLLTWSDELKKLDFQEMVMFLQHLPTHNWSDQELEMVLSRAYMWHSMFNNSPNHLAS

SEQ ID NO: 36752 - protein, 321 aa, Arabidopsis thaliana
  peptide (1)..(321): Ceres Seq. ID no. 13491209
  misc_feature (1)..(318): Homolog of NCBI NO: 37589908 NR Description: Chromosome 22 open reading frame 4 [Homo sapiens]
  misc_feature (1)..(318): Homolog of NCBI NO: 22507409 NR Description: chromosome 22 open reading frame 4; putative
  misc_feature (1)..(318): Homolog of NCBI NO: 37181052 NR Description: TBC domain-containing protein [Rattus norvegicus]
  misc_feature (1)..(318): Homolog of NCBI NO: 38348532 NR Description: Unknown (protein for MGC:61359) [Mus musculus]
  misc_feature (1)..(318): Homolog of NCBI NO: 25008321 NR Description: TBC1 domain family protein C22orf4-like
  misc_feature (1)..(318): Homolog of NCBI NO: 40068063 NR Description: chromosome 6 open reading frame 197 [Homo
  misc_feature (1)..(319): Homolog of NCBI NO: 19112106 NR Description: TBC domain protein. [Schizosaccharomyces pombe]
  misc_feature (1)..(319): Homolog of NCBI NO: 16944405 NR Description: related to GTPase activating protein [Neurospora
  misc_feature (8)..(321): Homolog of NCBI NO: 25408101 NR Description: hypothetical protein At2g30710 [imported] -
  misc_feature (1)..(321): Homolog of NCBI NO: 18402435 NR Description: expressed protein [Arabidopsis thaliana]
MKFNKVLSETTVILEKLRELAWNGVPHYMRPDVWRLLLGYAPPNSDRREAVLRRKRLEYLESVGQFYDLPDSERSDDEINMLRQIAVDCPRTVPDVSFFQQEQVQKSLERILYTWAIRHPASGYVQGINDLVTPFLVIFLSEYLDGGVDSWSMDDLSAEKVSDVEADCYWCLTKLLDGMQDHYTFAQPGIQRLVFKLKELVRRIDEPVSRHMEEHGLEFLQFAFRWYNCLLIREIPFNLINRLWDTYLAEGDALPDFLVYIYASFLLTWSDELKKLDFQEMVMFLQHLPTHNWSDQELEMVLSRAYMWHSMFNNSPNHLAS

SEQ ID NO: 36753 - protein, 293 aa, Arabidopsis thaliana
  peptide (1)..(293): Ceres Seq. ID no. 13491210
  misc_feature (1)..(290): Homolog of NCBI NO: 37589908 NR Description: Chromosome 22 open reading frame 4 [Homo sapiens]
  misc_feature (1)..(290): Homolog of NCBI NO: 22507409 NR Description: chromosome 22 open reading frame 4; putative
  misc_feature (1)..(290): Homolog of NCBI NO: 37181052 NR Description: TBC domain-containing protein [Rattus norvegicus]
  misc_feature (1)..(290): Homolog of NCBI NO: 38348532 NR Description: Unknown (protein for MGC:61359) [Mus musculus]
  misc_feature (1)..(290): Homolog of NCBI NO: 25008321 NR Description: TBC1 domain family protein C22orf4-like
  misc_feature (1)..(290): Homolog of NCBI NO: 40068063 NR Description: chromosome 6 open reading frame 197 [Homo
  misc_feature (1)..(291): Homolog of NCBI NO: 19112106 NR Description: TBC domain protein. [Schizosaccharomyces pombe]
  misc_feature (1)..(291): Homolog of NCBI NO: 16944405 NR Description: related to GTPase activating protein [Neurospora
  misc_feature (1)..(293): Homolog of NCBI NO: 25408101 NR Description: hypothetical protein At2g30710 [imported] -
  misc_feature (1)..(293): Homolog of NCBI NO: 18402435 NR Description: expressed protein [Arabidopsis thaliana]
MRPDVWRLLLGYAPPNSDRREAVLRRKRLEYLESVGQFYDLPDSERSDDEINMLRQIAVDCPRTVPDVSFFQQEQVQKSLERILYTWAIRHPASGYVQGINDLVTPFLVIFLSEYLDGGVDSWSMDDLSAEKVSDVEADCYWCLTKLLDGMQDHYTFAQPGIQRLVFKLKELVRRIDEPVSRHMEEHGLEFLQFAFRWYNCLLIREIPFNLINRLWDTYLAEGDALPDFLVYIYASFLLTWSDELKKLDFQEMVMFLQHLPTHNWSDQELEMVLSRAYMWHSMFNNSPNHLAS

SEQ ID NO: 36754 - DNA, 1203 bp, Arabidopsis thaliana
  misc_feature (1)..(1203): Ceres Seq. ID no. 12421284
  misc_feature: MA Experiment ID: 108433 Result: Up-regulated in Transcription
  misc_feature: MA Experiment 108433 PARAMETER Experiment Name: At_rhl_Mutant2_cDNA_P Parameter: Age (day) Value: 7
  misc_feature: MA Experiment 108433 PARAMETER Experiment Name: At_rhl_Mutant2_cDNA_P Parameter: Organism Value: A. thaliana
  misc_feature: MA Experiment 108433 PARAMETER Experiment Name: At_rhl_Mutant2_cDNA_P Parameter: Plant Line Value: rhl Mutant vs. wt landsburg
  misc_feature: MA Experiment 108433 PARAMETER Experiment Name: At_rhl_Mutant2_cDNA_P Parameter: Tissue Value: Roots
  misc_feature: MA Experiment ID: 108434 Result: Down-regulated in Transcription
  misc_feature: MA Experiment 108434 PARAMETER Experiment Name: At_Root_Tips_cDNA_P Parameter: Tissue Value: Root Tips
  misc_feature: MA Experiment ID: 108463 Result: Up-regulated in Transcription
  misc_feature: MA Experiment 108463 PARAMETER Experiment Name: At_Germinating_Seeds_cDNA_P Parameter: Age (day) Value: 3 vs. 0
  misc_feature: MA Experiment 108463 PARAMETER Experiment Name: At_Germinating_Seeds_cDNA_P Parameter: Tissue Value: Germinating Seeds
  misc_feature: MA Experiment ID: 108464 Result: Up-regulated in Transcription
  misc_feature: MA Experiment 108464 PARAMETER Experiment Name: At_Germinating_Seeds_cDNA_P Parameter: Age (day) Value: 4 vs. 0
  misc_feature: MA Experiment 108464 PARAMETER Experiment Name: At_Germinating_Seeds_cDNA_P Parameter: Tissue Value: Germinating Seeds
  misc_feature: MA Experiment ID: 108473 Result: Up-regulated in Transcription
  misc_feature: MA Experiment 108473 PARAMETER Experiment Name: At_Drought_Flowers_cDNA_P Parameter: Timepoint (hr) Value: 7 d
  misc_feature: MA Experiment 108473 PARAMETER Experiment Name: At_Drought_Flowers_cDNA_P Parameter: Tissue Value: Flower
  misc_feature: MA Experiment 108473 PARAMETER Experiment Name: At_Drought_Flowers_cDNA_P Parameter: Treatment Value: Drought vs. No Drought
  misc_feature: MA Experiment ID: 108488 Result: Down-regulated in Transcription
  misc_feature: MA Experiment ID: 108561 Result: Up-regulated in Transcription
  misc_feature: MA Experiment 108561 PARAMETER Experiment Name: At_100uM_ABA_cDNA_P Parameter: Timepoint (hr) Value: 6
  misc_feature: MA Experiment 108561 PARAMETER Experiment Name: At_100uM_ABA_cDNA_P Parameter: Tissue Value: Aerial
  misc_feature: MA Experiment 108561 PARAMETER Experiment Name: At_100uM_ABA_cDNA_P Parameter: Treatment Value: 100uM ABA vs. No Treatment
  misc_feature: MA Experiment ID: 20000069 Result: Up-regulated in Transcription
  misc_feature: MA Experiment 20000069 PARAMETER Experiment Name: At_100uM_ABA_Mutants_cDNA_P Parameter: Plant Line Value: CS23
  misc_feature: MA Experiment 20000069 PARAMETER Experiment Name: At_100uM_ABA_Mutants_cDNA_P Parameter: Timepoint (hr) Value: 6
  misc_feature: MA Experiment 20000069 PARAMETER Experiment Name: At_100uM_ABA_Mutants_cDNA_P Parameter: Tissue Value: Aerial
  misc_feature: MA Experiment 20000069 PARAMETER Experiment Name: At_100uM_ABA_Mutants_cDNA_P Parameter: Treatment Value: 100uM ABA vs. No Treatment
  misc_feature: MA Experiment ID: 20000070 Result: Up-regulated in Transcription
  misc_feature: MA Experiment 20000070 PARAMETER Experiment Name: At_100uM_ABA_Mutants_cDNA_P Parameter: Plant Line Value: CS24
  misc_feature: MA Experiment 20000070 PARAMETER Experiment Name: At_100uM_ABA_Mutants_cDNA_P Parameter: Timepoint (hr) Value: 6
  misc_feature: MA Experiment 20000070 PARAMETER Experiment Name: At_100uM_ABA_Mutants_cDNA_P Parameter: Tissue Value: Aerial
  misc_feature: MA Experiment 20000070 PARAMETER Experiment Name: At_100uM_ABA_Mutants_cDNA_P Parameter: Treatment Value: 100uM ABA vs. No Treatment
  misc_feature: MA Experiment ID: 20000071 Result: Up-regulated in Transcription
  misc_feature: MA Experiment 20000071 PARAMETER Experiment Name: At_100uM_ABA_Mutants_cDNA_P Parameter: Plant Line Value: CS8104
  misc_feature: MA Experiment 20000071 PARAMETER Experiment Name: At_100uM_ABA_Mutants_cDNA_P Parameter: Timepoint (hr) Value: 6
  misc_feature: MA Experiment 20000071 PARAMETER Experiment Name: At_100uM_ABA_Mutants_cDNA_P Parameter: Tissue Value: Aerial
  misc_feature: MA Experiment 20000071 PARAMETER Experiment Name: At_100uM_ABA_Mutants_cDNA_P Parameter: Treatment Value: 100uM ABA vs. No Treatment
  misc_feature: MA Experiment ID: 20000117 Result: Up-regulated in Transcription
  misc_feature: MA Experiment 20000117 PARAMETER Experiment Name: At_100uM_ABA_Mutants_cDNA_P Parameter: Plant Line Value: Columbia
  misc_feature: MA Experiment 20000117 PARAMETER Experiment Name: At_100uM_ABA_Mutants_cDNA_P Parameter: Timepoint (hr) Value: 6
  misc_feature: MA Experiment 20000117 PARAMETER Experiment Name: At_100uM_ABA_Mutants_cDNA_P Parameter: Tissue Value: Aerial
  misc_feature: MA Experiment 20000117 PARAMETER Experiment Name: At_100uM_ABA_Mutants_cDNA_P Parameter: Treatment Value: 100uM ABA vs. No Treatment
  misc_feature: MA Experiment ID: 20000185 Result: Up-regulated in Transcription
  misc_feature: MA Experiment 20000185 PARAMETER Experiment Name: At_Roots__P Parameter: Age (day) Value: 7 vs. 21
  misc_feature: MA Experiment 20000185 PARAMETER Experiment Name: At_Roots__P Parameter: Organism Value: A. thaliana
  misc_feature: MA Experiment 20000185 PARAMETER Experiment Name: At_Roots__P Parameter: Tissue Value: Roots vs. Whole Plant
  misc_feature: MA Experiment ID: 20000227 Result: Down-regulated in Transcription
  misc_feature: MA Experiment 20000227 PARAMETER Experiment Name: At_Root-Tips-vs-Tops_P Parameter: Tissue Value: Root Tips vs. Root Tops
  misc_feature: MA Experiment ID: 20000265 Result: Down-regulated in Transcription
  misc_feature: MA Experiment 20000265 PARAMETER Experiment Name: At_Open_Flower_P Parameter: Age (day) Value: 21
  misc_feature: MA Experiment 20000265 PARAMETER Experiment Name: At_Open_Flower_P Parameter: Plant Line Value: WS
  misc_feature: MA Experiment 20000265 PARAMETER Experiment Name: At_Open_Flower_P Parameter: Tissue Value: Closed Flower vs. Whole Plant
  misc_feature: MA Experiment ID: 20000439 Result: Up-regulated in Transcription
  misc_feature: MA Experiment 20000439 PARAMETER Experiment Name: At_Roots__P Parameter: Age (day) Value: 14 vs. 21
  misc_feature: MA Experiment 20000439 PARAMETER Experiment Name: At_Roots__P Parameter: Organism Value: A. thaliana
  misc_feature: MA Experiment 20000439 PARAMETER Experiment Name: At_Roots__P Parameter: Tissue Value: Roots vs. Whole Plant
  misc_feature: MA Experiment ID: 20000453 Result: Up-regulated in Transcription
  misc_feature: MA Experiment 20000453 PARAMETER Experiment Name: At_100uM_ABA_P Parameter: Age (day) Value: 15
  misc_feature: MA Experiment 20000453 PARAMETER Experiment Name: At_100uM_ABA_P Parameter: Organism Value: A. thaliana
  misc_feature: MA Experiment 20000453 PARAMETER Experiment Name: At_100uM_ABA_P Parameter: Plant Line Value: WS
  misc_feature: MA Experiment 20000453 PARAMETER Experiment Name: At_100uM_ABA_P Parameter: Timepoint (hr) Value: 24
  misc_feature: MA Experiment 20000453 PARAMETER Experiment Name: At_100uM_ABA_P Parameter: Tissue Value: Aerial
  misc_feature: MA Experiment 20000453 PARAMETER Experiment Name: At_100uM_ABA_P Parameter: Treatment Value: 100uM ABA vs. No Treatment
  misc_feature: MA Experiment ID: 20000495 Result: Up-regulated in Transcription
  misc_feature: MA Experiment 20000495 PARAMETER Experiment Name: At_Guard_Cells_P Parameter: Harvest Date Value: 8/2/2002
  misc_feature: MA Experiment 20000495 PARAMETER Experiment Name: At_Guard_Cells_P Parameter: Organism Value: A. thaliana
  misc_feature: MA Experiment 20000495 PARAMETER Experiment Name: At_Guard_Cells_P Parameter: Tissue Value: Guard Cells vs. Leaves
  misc_feature: MA Experiment ID: 20000527 Result: Down-regulated in Transcription
  misc_feature: MA Experiment 20000527 PARAMETER Experiment Name: At_10percent_PEG_P Parameter: Age (day) Value: 20
  misc_feature: MA Experiment 20000527 PARAMETER Experiment Name: At_10percent_PEG_P Parameter: Organism Value: A. thaliana
  misc_feature: MA Experiment 20000527 PARAMETER Experiment Name: At_10percent_PEG_P Parameter: Plant Line Value: WS
  misc_feature: MA Experiment 20000527 PARAMETER Experiment Name: At_10percent_PEG_P Parameter: Timepoint (day) Value: 20
  misc_feature: MA Experiment 20000527 PARAMETER Experiment Name: At_10percent_PEG_P Parameter: Tissue Value: Whole Plant
  misc_feature: MA Experiment 20000527 PARAMETER Experiment Name: At_10percent_PEG_P Parameter: Treatment Value: 10percent PEG vs. No Treatment
  misc_feature: MA Experiment ID: 20001556 Result: Down-regulated in Transcription
  misc_feature: MA Experiment 20001556 PARAMETER Experiment Name: At_Drought_Soil_Dry_P Parameter: Age (day) Value: 26
  misc_feature: MA Experiment 20001556 PARAMETER Experiment Name: At_Drought_Soil_Dry_P Parameter: Organism Value: A. thaliana
  misc_feature: MA Experiment 20001556 PARAMETER Experiment Name: At_Drought_Soil_Dry_P Parameter: Plant Line Value: WS
  misc_feature: MA Experiment 20001556 PARAMETER Experiment Name: At_Drought_Soil_Dry_P Parameter: Post Timepoint (hr) Value: None
  misc_feature: MA Experiment 20001556 PARAMETER Experiment Name: At_Drought_Soil_Dry_P Parameter: Post-Treatment Value: None
  misc_feature: MA Experiment 20001556 PARAMETER Experiment Name: At_Drought_Soil_Dry_P Parameter: Timepoint (day) Value: 12
  misc_feature: MA Experiment 20001556 PARAMETER Experiment Name: At_Drought_Soil_Dry_P Parameter: Treatment Value: Drought vs. No Drought
agcatgttgattaatcacacagcacaaataagagttagaaaaatgggagtgtacttaggtaagtattgttatataatgataataatgttagtgttggtgttgggaaaagaagtgagaagccagttgttaaaaaatggttattattcaacttcatgtccaaaagctgagtcgatagttagatccactgttgaatctcactttgattctgatcccacaatttcccctggcttgcttaggcttcatttccatgactgttttgttcagggttgtgatggttcggttttaatcaaagggaaatctgcggagcaagctgctctaccaaatcttggtctaagaggtttagaagtgatcgatgatgctaaagcccggcttgaggcggtgtgtccaggagttgtgtcatgtgcagatatacttgcacttgctgctcgtgactctgttgacttgagtgatgggccaagctggcgagtaccaacgggtcgtaaagacgggagaatctcgttggcaactgaagcatcgaatctaccttctccacttgactctgttgctgttcaaaagcaaaagtttcaagataaaggattggatactcatgatctagttactctactaggtgcacatacaattggacaaaccgactgtctcttcttccgttaccgtttatacaacttcacggtgaccggaaactccgatccaaccataagcccatcgtttcttacacagctcaagactctttgtcctcccaatggagacggttcgaaacgtgttgctcttgacattggtagcccctcaaaattcgatgaaagtttcttcaagaacttacgcgacggaaacgctattctagagtcggaccaacggctttggtcggacgccgagacaaatgccgtggtgaagaagtatgcgagtcgtcttagaggtttgttagggtttaggtttgattatgagtttggtaaagctatgattaagatgagttccattgatgtaaagactgacgttgatggcgaggttaggaaagtttgttccaaggtgaactagtttgaataaagacatatagtatatgtattcggtttctctatgtttcagatttctaatcactgaatgcatgttacgtaattgtcgtctttcaatatttatttttcagttttttatttctctagaaaaaatagtgagtttgttttggatggtaaaacagtatatgctaatctttat

SEQ ID NO: 36755 - protein, 342 aa, Arabidopsis thaliana
  peptide (1)..(342): Ceres Seq. ID no. 12421285
  misc_feature (47)..(324): Homolog of NCBI NO: 6573301 NR Description: peroxidase 4 precursor [Phaseolus vulgaris]
  misc_feature (19)..(342): Homolog of NCBI NO: 5381255 NR Description: peroxidase [Nicotiana tabacum]
  misc_feature (22)..(342): Homolog of NCBI NO: 17066703 NR Description: peroxidase [Capsicum annuum]
  misc_feature (16)..(342): Homolog of NCBI NO: 129808 NR Description: Cationic peroxidase 2 precursor (PNPC2)
  misc_feature (25)..(342): Homolog of NCBI NO: 7433065 NR Description: peroxidase (EC 1.11.1.7) precursor,
  misc_feature (25)..(342): Homolog of NCBI NO: 34910234 NR Description: putative peroxidase [Oryza sativa (japonica
  misc_feature (25)..(342): Homolog of NCBI NO: 19698452 NR Description: bacterial-induced gaiacol peroxidase [Gossypium
  misc_feature (34)..(342): Homolog of NCBI NO: 7433080 NR Description: probable peroxidase (EC 1.11.1.7) (clone PC36) -
  misc_feature (15)..(342): Homolog of NCBI NO: 30688665 NR Description: peroxidase, putative [Arabidopsis thaliana]
  misc_feature (2)..(342): Homolog of NCBI NO: 7433068 NR Description: probable peroxidase (EC 1.11.1.7), cationic -
SMLINHTAQIRVRKMGVYLGKYCYIMIIMLVLVLGKEVRSQLLKNGYYSTSCPKAESIVRSTVESHFDSDPTISPGLLRLHFHDCFVQGCDGSVLIKGKSAEQAALPNLGLRGLEVIDDAKARLEAVCPGVVSCADILALAARDSVDLSDGPSWRVPTGRKDGRISLATEASNLPSPLDSVAVQKQKFQDKGLDTHDLVTLLGAHTIGQTDCLFFRYRLYNFTVTGNSDPTISPSFLTQLKTLCPPNGDGSKRVALDIGSPSKFDESFFKNLRDGNAILESDQRLWSDAETNAVVKKYASRLRGLLGFRFDYEFGKAMIKMSSIDVKTDVDGEVRKVCSKVN

SEQ ID NO: 36756 - protein, 341 aa, Arabidopsis thaliana
  peptide (1)..(341): Ceres Seq. ID no. 12421286
  misc_feature (46)..(323): Homolog of NCBI NO: 6573301 NR Description: peroxidase 4 precursor [Phaseolus vulgaris]
  misc_feature (18)..(341): Homolog of NCBI NO: 5381255 NR Description: peroxidase [Nicotiana tabacum]
  misc_feature (21)..(341): Homolog of NCBI NO: 17066703 NR Description: peroxidase [Capsicum annuum]
  misc_feature (15)..(341): Homolog of NCBI NO: 129808 NR Description: Cationic peroxidase 2 precursor (PNPC2)
  misc_feature (24)..(341): Homolog of NCBI NO: 7433065 NR Description: peroxidase (EC 1.11.1.7) precursor,
  misc_feature (24)..(341): Homolog of NCBI NO: 34910234 NR Description: putative peroxidase [Oryza sativa (japonica
  misc_feature (24)..(341): Homolog of NCBI NO: 19698452 NR Description: bacterial-induced gaiacol peroxidase [Gossypium
  misc_feature (33)..(341): Homolog of NCBI NO: 7433080 NR Description: probable peroxidase (EC 1.11.1.7) (clone PC36) -
  misc_feature (14)..(341): Homolog of NCBI NO: 30688665 NR Description: peroxidase, putative [Arabidopsis thaliana]
  misc_feature (1)..(341): Homolog of NCBI NO: 7433068 NR Description: probable peroxidase (EC 1.11.1.7), cationic -
MLINHTAQIRVRKMGVYLGKYCYIMIIMLVLVLGKEVRSQLLKNGYYSTSCPKAESIVRSTVESHFDSDPTISPGLLRLHFHDCFVQGCDGSVLIKGKSAEQAALPNLGLRGLEVIDDAKARLEAVCPGVVSCADILALAARDSVDLSDGPSWRVPTGRKDGRISLATEASNLPSPLDSVAVQKQKFQDKGLDTHDLVTLLGAHTIGQTDCLFFRYRLYNFTVTGNSDPTISPSFLTQLKTLCPPNGDGSKRVALDIGSPSKFDESFFKNLRDGNAILESDQRLWSDAETNAVVKKYASRLRGLLGFRFDYEFGKAMIKMSSIDVKTDVDGEVRKVCSKVN

SEQ ID NO: 36757 - protein, 328 aa, Arabidopsis thaliana
  peptide (1)..(328): Ceres Seq. ID no. 12421287
  misc_feature (33)..(310): Homolog of NCBI NO: 6573301 NR Description: peroxidase 4 precursor [Phaseolus vulgaris]
  misc_feature (5)..(328): Homolog of NCBI NO: 5381255 NR Description: peroxidase [Nicotiana tabacum]
  misc_feature (8)..(328): Homolog of NCBI NO: 17066703 NR Description: peroxidase [Capsicum annuum]
  misc_feature (2)..(328): Homolog of NCBI NO: 129808 NR Description: Cationic peroxidase 2 precursor (PNPC2)
  misc_feature (11)..(328): Homolog of NCBI NO: 7433065 NR Description: peroxidase (EC 1.11.1.7) precursor,
  misc_feature (11)..(328): Homolog of NCBI NO: 34910234 NR Description: putative peroxidase [Oryza sativa (japonica
  misc_feature (11)..(328): Homolog of NCBI NO: 19698452 NR Description: bacterial-induced gaiacol peroxidase [Gossypium
  misc_feature (20)..(328): Homolog of NCBI NO: 7433080 NR Description: probable peroxidase (EC 1.11.1.7) (clone PC36) -
  misc_feature (1)..(328): Homolog of NCBI NO: 30688665 NR Description: peroxidase, putative [Arabidopsis thaliana]
  misc_feature (1)..(328): Homolog of NCBI NO: 7433068 NR Description: probable peroxidase (EC 1.11.1.7), cationic -
MGVYLGKYCYIMIIMLVLVLGKEVRSQLLKNGYYSTSCPKAESIVRSTVESHFDSDPTISPGLLRLHFHDCFVQGCDGSVLIKGKSAEQAALPNLGLRGLEVIDDAKARLEAVCPGVVSCADILALAARDSVDLSDGPSWRVPTGRKDGRISLATEASNLPSPLDSVAVQKQKFQDKGLDTHDLVTLLGAHTIGQTDCLFFRYRLYNFTVTGNSDPTISPSFLTQLKTLCPPNGDGSKRVALDIGSPSKFDESFFKNLRDGNAILESDQRLWSDAETNAVVKKYASRLRGLLGFRFDYEFGKAMIKMSSIDVKTDVDGEVRKVCSKVN

SEQ ID NO: 36758 - DNA, 1193 bp, Arabidopsis thaliana
  misc_feature (1)..(1193): Ceres Seq. ID no. 12337554
  misc_feature: MA Experiment ID: 108434 Result: Down-regulated in Transcription
  misc_feature: MA Experiment 108434 PARAMETER Experiment Name: At_Root_Tips_cDNA_P Parameter: Tissue Value: Root Tips
  misc_feature: MA Experiment ID: 108469 Result: Up-regulated in Transcription
  misc_feature: MA Experiment ID: 108488 Result: Down-regulated in Transcription
  misc_feature: MA Experiment ID: 108561 Result: Up-regulated in Transcription
  misc_feature: MA Experiment 108561 PARAMETER Experiment Name: At_100uM_ABA_cDNA_P Parameter: Timepoint (hr) Value: 6
  misc_feature: MA Experiment 108561 PARAMETER Experiment Name: At_100uM_ABA_cDNA_P Parameter: Tissue Value: Aerial
  misc_feature: MA Experiment 108561 PARAMETER Experiment Name: At_100uM_ABA_cDNA_P Parameter: Treatment Value: 100uM ABA vs. No Treatment
  misc_feature: MA Experiment ID: 108573 Result: Up-regulated in Transcription
  misc_feature: MA Experiment 108573 PARAMETER Experiment Name: At_Drought_cDNA_P Parameter: Timepoint (hr) Value: 6
  misc_feature: MA Experiment 108573 PARAMETER Experiment Name: At_Drought_cDNA_P Parameter: Tissue Value: Aerial
  misc_feature: MA Experiment 108573 PARAMETER Experiment Name: At_Drought_cDNA_P Parameter: Treatment Value: Drought vs. No Drought
  misc_feature: MA Experiment ID: 108595 Result: Up-regulated in Transcription
  misc_feature: MA Experiment 108595 PARAMETER Experiment Name: At_Ler-pi_Ovule_cDNA_P Parameter: Plant Line Value: null
  misc_feature: MA Experiment ID: 108605 Result: Up-regulated in Transcription
  misc_feature: MA Experiment 108605 PARAMETER Experiment Name: At_100uM_ABA_cDNA_P Parameter: Timepoint (hr) Value: 6
  misc_feature: MA Experiment 108605 PARAMETER Experiment Name: At_100uM_ABA_cDNA_P Parameter: Tissue Value: Aerial
  misc_feature: MA Experiment 108605 PARAMETER Experiment Name: At_100uM_ABA_cDNA_P Parameter: Treatment Value: 100uM ABA vs. No Treatment
  misc_feature: MA Experiment ID: 108607 Result: Up-regulated in Transcription
  misc_feature: MA Experiment 108607 PARAMETER Experiment Name: At_100uM_ABA_cDNA_P Parameter: Timepoint (hr) Value: 4
  misc_feature: MA Experiment 108607 PARAMETER Experiment Name: At_100uM_ABA_cDNA_P Parameter: Tissue Value: Aerial
  misc_feature: MA Experiment 108607 PARAMETER Experiment Name: At_100uM_ABA_cDNA_P Parameter: Treatment Value: 100uM ABA vs. No Treatment
  misc_feature: MA Experiment ID: 108668 Result: Up-regulated in Transcription
  misc_feature: MA Experiment 108668 PARAMETER Experiment Name: At_2mM_SA_cDNA_P Parameter: Plant Line Value: WS
  misc_feature: MA Experiment 108668 PARAMETER Experiment Name: At_2mM_SA_cDNA_P Parameter: Timepoint (hr) Value: 6
  misc_feature: MA Experiment 108668 PARAMETER Experiment Name: At_2mM_SA_cDNA_P Parameter: Treatment Value: 2mM SA vs. No Treatment
  misc_feature: MA Experiment ID: 20000069 Result: Up-regulated in Transcription
  misc_feature: MA Experiment 20000069 PARAMETER Experiment Name: At_100uM_ABA_Mutants_cDNA_P Parameter: Plant Line Value: CS23
  misc_feature: MA Experiment 20000069 PARAMETER Experiment Name: At_100uM_ABA_Mutants_cDNA_P Parameter: Timepoint (hr) Value: 6
  misc_feature: MA Experiment 20000069 PARAMETER Experiment Name: At_100uM_ABA_Mutants_cDNA_P Parameter: Tissue Value: Aerial
  misc_feature: MA Experiment 20000069 PARAMETER Experiment Name: At_100uM_ABA_Mutants_cDNA_P Parameter: Treatment Value: 100uM ABA vs. No Treatment
  misc_feature: MA Experiment ID: 20000070 Result: Up-regulated in Transcription
  misc_feature: MA Experiment 20000070 PARAMETER Experiment Name: At_100uM_ABA_Mutants_cDNA_P Parameter: Plant Line Value: CS24
  misc_feature: MA Experiment 20000070 PARAMETER Experiment Name: At_100uM_ABA_Mutants_cDNA_P Parameter: Timepoint (hr) Value: 6
  misc_feature: MA Experiment 20000070 PARAMETER Experiment Name: At_100uM_ABA_Mutants_cDNA_P Parameter: Tissue Value: Aerial
  misc_feature: MA Experiment 20000070 PARAMETER Experiment Name: At_100uM_ABA_Mutants_cDNA_P Parameter: Treatment Value: 100uM ABA vs. No Treatment
  misc_feature: MA Experiment ID: 20000071 Result: Up-regulated in Transcription
  misc_feature: MA Experiment 20000071 PARAMETER Experiment Name: At_100uM_ABA_Mutants_cDNA_P Parameter: Plant Line Value: CS8104
  misc_feature: MA Experiment 20000071 PARAMETER Experiment Name: At_100uM_ABA_Mutants_cDNA_P Parameter: Timepoint (hr) Value: 6
  misc_feature: MA Experiment 20000071 PARAMETER Experiment Name: At_100uM_ABA_Mutants_cDNA_P Parameter: Tissue Value: Aerial
  misc_feature: MA Experiment 20000071 PARAMETER Experiment Name: At_100uM_ABA_Mutants_cDNA_P Parameter: Treatment Value: 100uM ABA vs. No Treatment
  misc_feature: MA Experiment ID: 20000086 Result: Up-regulated in Transcription
  misc_feature: MA Experiment 20000086 PARAMETER Experiment Name: At_100uM_ABA_Mutants_cDNA_P Parameter: Plant Line Value: CS22
  misc_feature: MA Experiment 20000086 PARAMETER Experiment Name: At_100uM_ABA_Mutants_cDNA_P Parameter: Timepoint (hr) Value: 6
  misc_feature: MA Experiment 20000086 PARAMETER Experiment Name: At_100uM_ABA_Mutants_cDNA_P Parameter: Tissue Value: Aerial
  misc_feature: MA Experiment 20000086 PARAMETER Experiment Name: At_100uM_ABA_Mutants_cDNA_P Parameter: Treatment Value: 100uM ABA vs. No Treatment
  misc_feature: MA Experiment ID: 20000087 Result: Up-regulated in Transcription
  misc_feature: MA Experiment 20000087 PARAMETER Experiment Name: At_100uM_ABA_Mutants_cDNA_P Parameter: Plant Line Value: WS
  misc_feature: MA Experiment 20000087 PARAMETER Experiment Name: At_100uM_ABA_Mutants_cDNA_P Parameter: Timepoint (hr) Value: 6
  misc_feature: MA Experiment 20000087 PARAMETER Experiment Name: At_100uM_ABA_Mutants_cDNA_P Parameter: Tissue Value: Aerial
  misc_feature: MA Experiment 20000087 PARAMETER Experiment Name: At_100uM_ABA_Mutants_cDNA_P Parameter: Treatment Value: 100uM ABA vs. No Treatment
  misc_feature: MA Experiment ID: 20000088 Result: Up-regulated in Transcription
  misc_feature: MA Experiment 20000088 PARAMETER Experiment Name: At_100uM_ABA_Mutants_cDNA_P Parameter: Plant Line Value: Landsberg
  misc_feature: MA Experiment 20000088 PARAMETER Experiment Name: At_100uM_ABA_Mutants_cDNA_P Parameter: Timepoint (hr) Value: 6
  misc_feature: MA Experiment 20000088 PARAMETER Experiment Name: At_100uM_ABA_Mutants_cDNA_P Parameter: Tissue Value: Aerial
  misc_feature: MA Experiment 20000088 PARAMETER Experiment Name: At_100uM_ABA_Mutants_cDNA_P Parameter: Treatment Value: 100uM ABA vs. No Treatment
  misc_feature: MA Experiment ID: 20000090 Result: Up-regulated in Transcription
  misc_feature: MA Experiment ID: 20000111 Result: Down-regulated in Transcription
  misc_feature: MA Experiment 20000111 PARAMETER Experiment Name: At_42deg_Heat_cDNA_P Parameter: Temperature (deg C) Value: 42 vs. 22
  misc_feature: MA Experiment 20000111 PARAMETER Experiment Name: At_42deg_Heat_cDNA_P Parameter: Timepoint (hr) Value: 6
  misc_feature: MA Experiment 20000111 PARAMETER Experiment Name: At_42deg_Heat_cDNA_P Parameter: Tissue Value: Aerial
  misc_feature: MA Experiment ID: 20000113 Result: Down-regulated in Transcription
  misc_feature: MA Experiment 20000113 PARAMETER Experiment Name: At_42deg_Heat_cDNA_P Parameter: Temperature (deg C) Value: 42 vs. 22
  misc_feature: MA Experiment 20000113 PARAMETER Experiment Name: At_42deg_Heat_cDNA_P Parameter: Timepoint (hr) Value: 8
  misc_feature: MA Experiment 20000113 PARAMETER Experiment Name: At_42deg_Heat_cDNA_P Parameter: Tissue Value: Aerial
  misc_feature: MA Experiment ID: 20000117 Result: Up-regulated in Transcription
  misc_feature: MA Experiment 20000117 PARAMETER Experiment Name: At_100uM_ABA_Mutants_cDNA_P Parameter: Plant Line Value: Columbia
  misc_feature: MA Experiment 20000117 PARAMETER Experiment Name: At_100uM_ABA_Mutants_cDNA_P Parameter: Timepoint (hr) Value: 6
  misc_feature: MA Experiment 20000117 PARAMETER Experiment Name: At_100uM_ABA_Mutants_cDNA_P Parameter: Tissue Value: Aerial
  misc_feature: MA Experiment 20000117 PARAMETER Experiment Name: At_100uM_ABA_Mutants_cDNA_P Parameter: Treatment Value: 100uM ABA vs. No Treatment
  misc_feature: MA Experiment ID: 20000169 Result: Up-regulated in Transcription
  misc_feature: MA Experiment 20000169 PARAMETER Experiment Name: At_100uM_ABA_P Parameter: Age (day) Value: 14
  misc_feature: MA Experiment 20000169 PARAMETER Experiment Name: At_100uM_ABA_P Parameter: Organism Value: A. thaliana
  misc_feature: MA Experiment 20000169 PARAMETER Experiment Name: At_100uM_ABA_P Parameter: Plant Line Value: WS
  misc_feature: MA Experiment 20000169 PARAMETER Experiment Name: At_100uM_ABA_P Parameter: Timepoint (hr) Value: 6
  misc_feature: MA Experiment 20000169 PARAMETER Experiment Name: At_100uM_ABA_P Parameter: Tissue Value: Aerial
  misc_feature: MA Experiment 20000169 PARAMETER Experiment Name: At_100uM_ABA_P Parameter: Treatment Value: 100uM ABA vs. No Treatment
  misc_feature: MA Experiment ID: 20000173 Result: Down-regulated in Transcription
  misc_feature: MA Experiment 20000173 PARAMETER Experiment Name: At_42deg_Heat_P Parameter: Age (day) Value: 14
  misc_feature: MA Experiment 20000173 PARAMETER Experiment Name: At_42deg_Heat_P Parameter: Organism Value: A. thaliana
  misc_feature: MA Experiment 20000173 PARAMETER Experiment Name: At_42deg_Heat_P Parameter: Plant Line Value: WS
  misc_feature: MA Experiment 20000173 PARAMETER Experiment Name: At_42deg_Heat_P Parameter: Temperature (deg C) Value: 42 vs. 22
  misc_feature: MA Experiment 20000173 PARAMETER Experiment Name: At_42deg_Heat_P Parameter: Timepoint (hr) Value: 6
  misc_feature: MA Experiment 20000173 PARAMETER Experiment Name: At_42deg_Heat_P Parameter: Tissue Value: Aerial
  misc_feature: MA Experiment ID: 20000179 Result: Up-regulated in Transcription
  misc_feature: MA Experiment 20000179 PARAMETER Experiment Name: At_Germinating_Seeds_P Parameter: Age (hr) Value: 6 vs. 0
  misc_feature: MA Experiment 20000179 PARAMETER Experiment Name: At_Germinating_Seeds_P Parameter: Tissue Value: Germinating Seeds
  misc_feature: MA Experiment ID: 20000180 Result: Up-regulated in Transcription
  misc_feature: MA Experiment 20000180 PARAMETER Experiment Name: At_Germinating_Seeds_P Parameter: Age (hr) Value: 24 vs. 0
  misc_feature: MA Experiment 20000180 PARAMETER Experiment Name: At_Germinating_Seeds_P Parameter: Tissue Value: Germinating Seeds
  misc_feature: MA Experiment ID: 20000182 Result: Up-regulated in Transcription
  misc_feature: MA Experiment 20000182 PARAMETER Experiment Name: At_2mM_SA_P Parameter: Age (day) Value: 14
  misc_feature: MA Experiment 20000182 PARAMETER Experiment Name: At_2mM_SA_P Parameter: Organism Value: A. thaliana
  misc_feature: MA Experiment 20000182 PARAMETER Experiment Name: At_2mM_SA_P Parameter: Plant Line Value: WS
  misc_feature: MA Experiment 20000182 PARAMETER Experiment Name: At_2mM_SA_P Parameter: Timepoint (hr) Value: 6
  misc_feature: MA Experiment 20000182 PARAMETER Experiment Name: At_2mM_SA_P Parameter: Tissue Value: Aerial
  misc_feature: MA Experiment 20000182 PARAMETER Experiment Name: At_2mM_SA_P Parameter: Treatment Value: 2mM SA vs. No Treatment
  misc_feature: MA Experiment ID: 20000184 Result: Down-regulated in Transcription
  misc_feature: MA Experiment 20000184 PARAMETER Experiment Name: At_Shoots__P Parameter: Age (day) Value: 7
  misc_feature: MA Experiment 20000184 PARAMETER Experiment Name: At_Shoots__P Parameter: Tissue Value: Shoots vs. Whole Plant
  misc_feature: MA Experiment ID: 20000185 Result: Up-regulated in Transcription
  misc_feature: MA Experiment 20000185 PARAMETER Experiment Name: At_Roots__P Parameter: Age (day) Value: 7 vs. 21
  misc_feature: MA Experiment 20000185 PARAMETER Experiment Name: At_Roots__P Parameter: Organism Value: A. thaliana
  misc_feature: MA Experiment 20000185 PARAMETER Experiment Name: At_Roots__P Parameter: Tissue Value: Roots vs. Whole Plant
  misc_feature: MA Experiment ID: 20000264 Result: Up-regulated in Transcription
  misc_feature: MA Experiment 20000264 PARAMETER Experiment Name: At_Open_Flower_P Parameter: Age (day) Value: 21
  misc_feature: MA Experiment 20000264 PARAMETER Experiment Name: At_Open_Flower_P Parameter: Plant Line Value: WS
  misc_feature: MA Experiment 20000264 PARAMETER Experiment Name: At_Open_Flower_P Parameter: Tissue Value: Open Flower vs. Whole Plant
  misc_feature: MA Experiment ID: 20000438 Result: Down-regulated in Transcription
  misc_feature: MA Experiment 20000438 PARAMETER Experiment Name: At_Shoots__P Parameter: Age (day) Value: 14
  misc_feature: MA Experiment 20000438 PARAMETER Experiment Name: At_Shoots__P Parameter: Tissue Value: Shoots vs. Whole Plant
  misc_feature: MA Experiment ID: 20000495 Result: Up-regulated in Transcription
  misc_feature: MA Experiment 20000495 PARAMETER Experiment Name: At_Guard_Cells_P Parameter: Harvest Date Value: 8/2/2002
  misc_feature: MA Experiment 20000495 PARAMETER Experiment Name: At_Guard_Cells_P Parameter: Organism Value: A. thaliana
  misc_feature: MA Experiment 20000495 PARAMETER Experiment Name: At_Guard_Cells_P Parameter: Tissue Value: Guard Cells vs. Leaves
  misc_feature: MA Experiment ID: 20000794 Result: Up-regulated in Transcription
  misc_feature: MA Experiment 20000794 PARAMETER Experiment Name: At_Petals_P Parameter: Age (day) Value: 23-25 days
  misc_feature: MA Experiment 20000794 PARAMETER Experiment Name: At_Petals_P Parameter: Plant Line Value: WS
  misc_feature: MA Experiment 20000794 PARAMETER Experiment Name: At_Petals_P Parameter: Tissue Value: Petals vs. Whole plant
  misc_feature: MA Experiment ID: 20001757 Result: Down-regulated in Transcription
  misc_feature: MA Experiment 20001757 PARAMETER Experiment Name: At_50mM_NH4NO3_L-to-H_P Parameter: Timepoint (hr) Value: 6
  misc_feature: MA Experiment 20001757 PARAMETER Experiment Name: At_50mM_NH4NO3_L-to-H_P Parameter: Tissue Value: Leaf
  misc_feature: MA Experiment 20001757 PARAMETER Experiment Name: At_50mM_NH4NO3_L-to-H_P Parameter: Treatment Value: 50mM NH4NO3 vs 100mM Mannitol
  misc_feature: MA Experiment ID: 20001904 Result: Up-regulated in Transcription
  misc_feature: MA Experiment 20001904 PARAMETER Experiment Name: At_Drought_Reproduction_P Parameter: Age (day) Value: 37
  misc_feature: MA Experiment 20001904 PARAMETER Experiment Name: At_Drought_Reproduction_P Parameter: Organism Value: A. thaliana
  misc_feature: MA Experiment 20001904 PARAMETER Experiment Name: At_Drought_Reproduction_P Parameter: Plant Line Value: WS
  misc_feature: MA Experiment 20001904 PARAMETER Experiment Name: At_Drought_Reproduction_P Parameter: Timepoint (day) Value: 7
  misc_feature: MA Experiment 20001904 PARAMETER Experiment Name: At_Drought_Reproduction_P Parameter: Tissue Value: Rosettes
  misc_feature: MA Experiment 20001904 PARAMETER Experiment Name: At_Drought_Reproduction_P Parameter: Treatment Value: Drought vs. No Drought
  misc_feature: MA Experiment ID: 20001905 Result: Up-regulated in Transcription
  misc_feature: MA Experiment 20001905 PARAMETER Experiment Name: At_Drought_Reproduction_P Parameter: Age (day) Value: 40
  misc_feature: MA Experiment 20001905 PARAMETER Experiment Name: At_Drought_Reproduction_P Parameter: Organism Value: A. thaliana
  misc_feature: MA Experiment 20001905 PARAMETER Experiment Name: At_Drought_Reproduction_P Parameter: Plant Line Value: WS
  misc_feature: MA Experiment 20001905 PARAMETER Experiment Name: At_Drought_Reproduction_P Parameter: Timepoint (day) Value: 10
  misc_feature: MA Experiment 20001905 PARAMETER Experiment Name: At_Drought_Reproduction_P Parameter: Tissue Value: Rosettes
  misc_feature: MA Experiment 20001905 PARAMETER Experiment Name: At_Drought_Reproduction_P Parameter: Treatment Value: Drought vs. No Drought
  misc_feature: MA Experiment ID: 20001906 Result: Up-regulated in Transcription
  misc_feature: MA Experiment 20001906 PARAMETER Experiment Name: At_Drought_Reproduction_P Parameter: Age (day) Value: 35
  misc_feature: MA Experiment 20001906 PARAMETER Experiment Name: At_Drought_Reproduction_P Parameter: Organism Value: A. thaliana
  misc_feature: MA Experiment 20001906 PARAMETER Experiment Name: At_Drought_Reproduction_P Parameter: Plant Line Value: WS
  misc_feature: MA Experiment 20001906 PARAMETER Experiment Name: At_Drought_Reproduction_P Parameter: Timepoint (day) Value: 5
  misc_feature: MA Experiment 20001906 PARAMETER Experiment Name: At_Drought_Reproduction_P Parameter: Tissue Value: Siliques
  misc_feature: MA Experiment 20001906 PARAMETER Experiment Name: At_Drought_Reproduction_P Parameter: Treatment Value: Drought vs. No Drought
  misc_feature: MA Experiment ID: 20001908 Result: Up-regulated in Transcription
  misc_feature: MA Experiment 20001908 PARAMETER Experiment Name: At_Drought_Reproduction_P Parameter: Age (day) Value: 40
  misc_feature: MA Experiment 20001908 PARAMETER Experiment Name: At_Drought_Reproduction_P Parameter: Organism Value: A. thaliana
  misc_feature: MA Experiment 20001908 PARAMETER Experiment Name: At_Drought_Reproduction_P Parameter: Plant Line Value: WS
  misc_feature: MA Experiment 20001908 PARAMETER Experiment Name: At_Drought_Reproduction_P Parameter: Timepoint (day) Value: 10
  misc_feature: MA Experiment 20001908 PARAMETER Experiment Name: At_Drought_Reproduction_P Parameter: Tissue Value: Siliques
  misc_feature: MA Experiment 20001908 PARAMETER Experiment Name: At_Drought_Reproduction_P Parameter: Treatment Value: Drought vs. No Drought
  misc_feature: MA Experiment ID: 20001911 Result: Up-regulated in Transcription
  misc_feature: MA Experiment 20001911 PARAMETER Experiment Name: At_Drought_Reproduction_P Parameter: Age (day) Value: 40
  misc_feature: MA Experiment 20001911 PARAMETER Experiment Name: At_Drought_Reproduction_P Parameter: Organism Value: A. thaliana
  misc_feature: MA Experiment 20001911 PARAMETER Experiment Name: At_Drought_Reproduction_P Parameter: Plant Line Value: WS
  misc_feature: MA Experiment 20001911 PARAMETER Experiment Name: At_Drought_Reproduction_P Parameter: Timepoint (day) Value: 10
  misc_feature: MA Experiment 20001911 PARAMETER Experiment Name: At_Drought_Reproduction_P Parameter: Tissue Value: Flowers
  misc_feature: MA Experiment 20001911 PARAMETER Experiment Name: At_Drought_Reproduction_P Parameter: Treatment Value: Drought vs. No Drought
ataaatttcgtaacaaaagaaaaaacagaacacagaatcttgttctcccaccgatcaccaccggagatatggaatcgccgattactcaaccccaaatgtttagattgcagtttcttcgtcttcttcatagtcgacgatcaccccaagttccattaatagccgattcttcaaatcctatcgagaatcctctctttcaagctgatgttccttctaccacagcaatagagtcttgtccaaaagaaaacattggattcagagcaagggaaattacctttgcttattttaagcttgaaagagagaagtgaagaaaaaaggccagcgattgtgtttatgcatggcacaaacacaaacaaagaatggttaaggccatggcttgaagcatatgcttcgcggggatatgtagccatcggtttagactctcgttaccacggtgaacgtgctgattgcaaaactgcatatcgagatgctcttatatcatcttggagaaatggaaacactatgccttttatctttgatactgtatgggatttgatcaaactagctgaatatcttactcagagggatgatatagacccgaaaaagataggaatcaccggtatttcgctaggagggatgcatgcttggtttgctgctgcagctgacactcgctattccgtggttgtcccattaatcggtgttcagggttttagatgggcaatagagaatgatgagtgggaagcaagagtcaacagtatcaaacctttatttgaagaagcaaggattgatctcggaaagaacataatcgacaaagaactagtcgagaaggtgtggaacagaatagctcctggcctagcttcgaagtttgattcaccgtactcattaccagtgattgctccacggcctctttacatccttaacggcgcaaatgatcctcgatgtcctcttggcggactagaacttgcgttaaagagagctgaaaaggcgtataaggaaacagcttctcctggaaacttcaagttcaaagcagaagatggagttggacacgaagcgacgagtttcatgatcaaagaatcatcagactggtttgacaaattccttaaacaagaagatatgacaacttgacagattgtaatattgtgaactaataaagaagaatcatcttcttctcgttaataatgtattcactctcgcaaatcaatatcattacaaatttc

SEQ ID NO: 36759 - protein, 256 aa, Arabidopsis thaliana; identical to SEQ ID NO: 24153
  peptide (1)..(256): Ceres Seq. ID no. 12337555
  misc_feature (1)..(20): Homolog of NCBI NO: 34898368 NR Description: ESTs C19441(E10423),C99201(E10423) correspond to
  misc_feature (39)..(249): Homolog of NCBI NO: 34898368 NR Description: ESTs C19441(E10423),C99201(E10423) correspond to
  misc_feature (1)..(256): Homolog of NCBI NO: 30689997 NR Description: expressed protein [Arabidopsis thaliana]

SEQ ID NO: 36760 - protein, 200 aa, Arabidopsis thaliana
  peptide (1)..(200): Ceres Seq. ID no. 12337556
  misc_feature (1)..(193): Homolog of NCBI NO: 34898368 NR Description: ESTs C19441(E10423),C99201(E10423) correspond to
  misc_feature (1)..(200): Homolog of NCBI NO: 30689997 NR Description: expressed protein [Arabidopsis thaliana]
MPFIFDTVWDLIKLAEYLTQRDDIDPKKIGITGISLGGMHAWFAAAADTRYSVVVPLIGVQGFRWAIENDEWEARVNSIKPLFEEARIDLGKNIIDKELVEKVWNRIAPGLASKFDSPYSLPVIAPRPLYILNGANDPRCPLGGLELALKRAEKAYKETASPGNFKFKAEDGVGHEATSFMIKESSDWFDKFLKQEDMTT

SEQ ID NO: 36761 - protein, 162 aa, Arabidopsis thaliana
  peptide (1)..(162): Ceres Seq. ID no. 12337557
  misc_feature (1)..(155): Homolog of NCBI NO: 34898368 NR Description: ESTs C19441(E10423),C99201(E10423) correspond to
  misc_feature (1)..(162): Homolog of NCBI NO: 30689997 NR Description: expressed protein [Arabidopsis thaliana]
MHAWFAAAADTRYSVVVPLIGVQGFRWAIENDEWEARVNSIKPLFEEARIDLGKNIIDKELVEKVWNRIAPGLASKFDSPYSLPVIAPRPLYILNGANDPRCPLGGLELALKRAEKAYKETASPGNFKFKAEDGVGHEATSFMIKESSDWFDKFLKQEDMTT

SEQ ID NO: 36762 - DNA, 1654 bp, Arabidopsis thaliana
  misc_feature (1)..(1654): Ceres Seq. ID no. 12337569
  misc_feature: MA Experiment ID: 108464 Result: Up-regulated in Transcription
  misc_feature: MA Experiment 108464 PARAMETER Experiment Name: At_Germinating_Seeds_cDNA_P Parameter: Age (day) Value: 4 vs. 0
  misc_feature: MA Experiment 108464 PARAMETER Experiment Name: At_Germinating_Seeds_cDNA_P Parameter: Tissue Value: Germinating Seeds
  misc_feature: MA Experiment ID: 108488 Result: Down-regulated in Transcription
  misc_feature: MA Experiment ID: 20000089 Result: Down-regulated in Transcription
  misc_feature: MA Experiment ID: 20000184 Result: Up-regulated in Transcription
  misc_feature: MA Experiment 20000184 PARAMETER Experiment Name: At_Shoots__P Parameter: Age (day) Value: 7
  misc_feature: MA Experiment 20000184 PARAMETER Experiment Name: At_Shoots__P Parameter: Tissue Value: Shoots vs. Whole Plant
  misc_feature: MA Experiment ID: 20000224 Result: Down-regulated in Transcription
  misc_feature: MA Experiment ID: 20000234 Result: Down-regulated in Transcription
  misc_feature: MA Experiment 20000234 PARAMETER Experiment Name: At_Siliques_P Parameter: Age (day) Value: 21
  misc_feature: MA Experiment 20000234 PARAMETER Experiment Name: At_Siliques_P Parameter: Organism Value: A. thaliana
  misc_feature: MA Experiment 20000234 PARAMETER Experiment Name: At_Siliques_P Parameter: Plant Line Value: WS
  misc_feature: MA Experiment 20000234 PARAMETER Experiment Name: At_Siliques_P Parameter: Tissue Value: Less Than 5mm Siliques vs. Whole Plant
  misc_feature: MA Experiment ID: 20000265 Result: Down-regulated in Transcription
  misc_feature: MA Experiment 20000265 PARAMETER Experiment Name: At_Open_Flower_P Parameter: Age (day) Value: 21
  misc_feature: MA Experiment 20000265 PARAMETER Experiment Name: At_Open_Flower_P Parameter: Plant Line Value: WS
  misc_feature: MA Experiment 20000265 PARAMETER Experiment Name: At_Open_Flower_P Parameter: Tissue Value: Closed Flower vs. Whole Plant
  misc_feature: MA Experiment ID: 20000437 Result: Down-regulated in Transcription
  misc_feature: MA Experiment 20000437 PARAMETER Experiment Name: At_Drought_P Parameter: Age (day) Value: 8
  misc_feature: MA Experiment 20000437 PARAMETER Experiment Name: At_Drought_P Parameter: Organism Value: A. thaliana
  misc_feature: MA Experiment 20000437 PARAMETER Experiment Name: At_Drought_P Parameter: Plant Line Value: WS
  misc_feature: MA Experiment 20000437 PARAMETER Experiment Name: At_Drought_P Parameter: Timepoint (hr) Value: 24
  misc_feature: MA Experiment 20000437 PARAMETER Experiment Name: At_Drought_P Parameter: Tissue Value: Whole Plant
  misc_feature: MA Experiment 20000437 PARAMETER Experiment Name: At_Drought_P Parameter: Treatment Value: Drought vs. No Drought
  misc_feature: MA Experiment ID: 20000573 Result: Down-regulated in Transcription
  misc_feature: MA Experiment 20000573 PARAMETER Experiment Name: At_100uM_ABA_Mutants__P Parameter: Organism Value: A. thaliana
  misc_feature: MA Experiment 20000573 PARAMETER Experiment Name: At_100uM_ABA_Mutants__P Parameter: Plant Line Value: CS22 vs. Ler wt
  misc_feature: MA Experiment 20000573 PARAMETER Experiment Name: At_100uM_ABA_Mutants__P Parameter: Timepoint (hr) Value: N/A
  misc_feature: MA Experiment 20000573 PARAMETER Experiment Name: At_100uM_ABA_Mutants__P Parameter: Tissue Value: Whole Plant
  misc_feature: MA Experiment 20000573 PARAMETER Experiment Name: At_100uM_ABA_Mutants__P Parameter: Treatment Value: None
  misc_feature: MA Experiment ID: 20000574 Result: Down-regulated in Transcription
  misc_feature: MA Experiment 20000574 PARAMETER Experiment Name: At_100uM_ABA_Mutants__P Parameter: Organism Value: A. thaliana
  misc_feature: MA Experiment 20000574 PARAMETER Experiment Name: At_100uM_ABA_Mutants__P Parameter: Plant Line Value: CS23 vs. Ler wt
  misc_feature: MA Experiment 20000574 PARAMETER Experiment Name: At_100uM_ABA_Mutants__P Parameter: Timepoint (hr) Value: N/A
  misc_feature: MA Experiment 20000574 PARAMETER Experiment Name: At_100uM_ABA_Mutants__P Parameter: Tissue Value: Whole Plant
  misc_feature: MA Experiment 20000574 PARAMETER Experiment Name: At_100uM_ABA_Mutants__P Parameter: Treatment Value: None
  misc_feature: MA Experiment ID: 20001247 Result: Up-regulated in Transcription
  misc_feature: MA Experiment 20001247 PARAMETER Experiment Name: At_Far-red-induction_P Parameter: Age (day) Value: 7
  misc_feature: MA Experiment 20001247 PARAMETER Experiment Name: At_Far-red-induction_P Parameter: Light Value: Far-red vs. White
  misc_feature: MA Experiment 20001247 PARAMETER Experiment Name: At_Far-red-induction_P Parameter: Organism Value: A. thaliana
  misc_feature: MA Experiment 20001247 PARAMETER Experiment Name: At_Far-red-induction_P Parameter: Plant Line Value: Columbia
  misc_feature: MA Experiment 20001247 PARAMETER Experiment Name: At_Far-red-induction_P Parameter: Timepoint (hr) Value: 1
  misc_feature: MA Experiment 20001247 PARAMETER Experiment Name: At_Far-red-induction_P Parameter: Tissue Value: Whole Plant
  misc_feature: MA Experiment ID: 20001450 Result: Up-regulated in Transcription
  misc_feature: MA Experiment 20001450 PARAMETER Experiment Name: At_Far-red-induction_P Parameter: Age (day) Value: 7
  misc_feature: MA Experiment 20001450 PARAMETER Experiment Name: At_Far-red-induction_P Parameter: Light Value: Far-red vs. White
  misc_feature: MA Experiment 20001450 PARAMETER Experiment Name: At_Far-red-induction_P Parameter: Organism Value: A. thaliana
  misc_feature: MA Experiment 20001450 PARAMETER Experiment Name: At_Far-red-induction_P Parameter: Plant Line Value: Columbia
  misc_feature: MA Experiment 20001450 PARAMETER Experiment Name: At_Far-red-induction_P Parameter: Timepoint (hr) Value: 8
  misc_feature: MA Experiment 20001450 PARAMETER Experiment Name: At_Far-red-induction_P Parameter: Tissue Value: Whole Plant
  misc_feature: MA Experiment ID: 20001451 Result: Up-regulated in Transcription
  misc_feature: MA Experiment 20001451 PARAMETER Experiment Name: At_Far-red-induction_P Parameter: Age (day) Value: 7
  misc_feature: MA Experiment 20001451 PARAMETER Experiment Name: At_Far-red-induction_P Parameter: Light Value: Far-red vs. White
  misc_feature: MA Experiment 20001451 PARAMETER Experiment Name: At_Far-red-induction_P Parameter: Organism Value: A. thaliana
  misc_feature: MA Experiment 20001451 PARAMETER Experiment Name: At_Far-red-induction_P Parameter: Plant Line Value: Columbia
  misc_feature: MA Experiment 20001451 PARAMETER Experiment Name: At_Far-red-induction_P Parameter: Timepoint (hr) Value: 24
  misc_feature: MA Experiment 20001451 PARAMETER Experiment Name: At_Far-red-induction_P Parameter: Tissue Value: Whole Plant
  misc_feature: MA Experiment ID: 20001757 Result: Down-regulated in Transcription
  misc_feature: MA Experiment 20001757 PARAMETER Experiment Name: At_50mM_NH4NO3_L-to-H_P Parameter: Timepoint (hr) Value: 6
  misc_feature: MA Experiment 20001757 PARAMETER Experiment Name: At_50mM_NH4NO3_L-to-H_P Parameter: Tissue Value: Leaf
  misc_feature: MA Experiment 20001757 PARAMETER Experiment Name: At_50mM_NH4NO3_L-to-H_P Parameter: Treatment Value: 50mM NH4NO3 vs 100mM Mannitol
  misc_feature: MA Experiment ID: 20001905 Result: Up-regulated in Transcription
  misc_feature: MA Experiment 20001905 PARAMETER Experiment Name: At_Drought_Reproduction_P Parameter: Age (day) Value: 40
  misc_feature: MA Experiment 20001905 PARAMETER Experiment Name: At_Drought_Reproduction_P Parameter: Organism Value: A. thaliana
  misc_feature: MA Experiment 20001905 PARAMETER Experiment Name: At_Drought_Reproduction_P Parameter: Plant Line Value: WS
  misc_feature: MA Experiment 20001905 PARAMETER Experiment Name: At_Drought_Reproduction_P Parameter: Timepoint (day) Value: 10
  misc_feature: MA Experiment 20001905 PARAMETER Experiment Name: At_Drought_Reproduction_P Parameter: Tissue Value: Rosettes
  misc_feature: MA Experiment 20001905 PARAMETER Experiment Name: At_Drought_Reproduction_P Parameter: Treatment Value: Drought vs. No Drought
ccacaaaacatatttacgtatatatcatctcatgatgttcacttgattaaaaattaacatcacgaatttaacagaatatattattaaataatccagcaggtaacaaagttataaatggcacacgtgtgggctcatacccagataagctctcgttcctcatactcttaacgctcacaacaaacaatctcacctttcttcttcttcttcttctctctgtttctcaagtttcttaatgcctaggaatatagaaccattggatcttggaatccaaataccatatcatttcagatgtccaatatcactcgaacttatgcaagacccagtcaccgtctgcaccggccaaacctacgaccgagccagcatcgagtcatgggtctccatcggtaacaacacgacatgtccagtcacacgagctcctctctccgacttcacactcatccctaaccacactctccgtcgtctcatccaagaatggtgcgtcgctaaccgctccaatggagtcgaacgtatccctactcctaaacaaccagctgatccaacctctgttcgtgctcttctcagtcaagcctctgctataacaggaacccacgtctctgttcgttcacgcgccgccgctctccgccgtttacgtggtttcgctcgtgattctgataaaaatcgcgttttgatcgcagctcataacgctacagagattttgattaagattctgttctctgaaacgacgtcgtcggagttagtctctgagtctttagctctacttgttatgttaccgataacggagccgaaccagtttgtttcgatatcgtcggatccgggtcgggtcgagtttttgacccggttgttattcgattcgtcgattgaaacacgcgttaacgccgccgcgttgatcgagattgtttcgacgggaaccaaatcggcggacctgaaaggttcgatttcgaattcagaatctgtattcgaaggagttctcgatcttctgagaaatccgatttcgtcacgacgagctctcaaaatcggaatcaaaactctgttcgcgctctgttcagtgaaatcgacgcgacacatcgcgatcacagccggtgcgccggagattctaatagacagactcgcggcggatttcgatagatgcgatacggagcgagccttagcgacggtggagctactctgccgaacgccggaaggatgcgcggcgttcggtgagcacgctttaacggtgccgttgttagttaaaacgatattgagagtttcggatcgcgcgacggagtatgcggcgggggcgttgttagcgctttgtacggcggaggaaaggtggagggaggaagcggcgggggcgggagtggtggtacagttgttgttgatggtgcagagtgagtgtacggagagagcgaagaagaaagcacagaagttattgaagcttctgagagattcatggcctgactacaattccttcgctaactccgatgactttggttgcagcagccaagtggtccctttttgatttctcgatttttttttttcaaaacattgttttttcacagtaattattaaaaaaatgttttttttttaattagaaggaaaaataatggtcattttttgtgtgtatttgatggaaagatgtgaagaagaaaagataatatacagaagctttttgatg

SEQ ID NO: 36763 - protein, 421 aa, Arabidopsis thaliana
  peptide (1)..(421): Ceres Seq. ID no. 12337570
  misc_feature (13)..(88): Pfam Name: U-box domain Pfam Description: U-box domain
  misc_feature (13)..(400): Homolog of NCBI NO: 34908566 NR Description: P0505D12.10 [Oryza sativa (japonica
  misc_feature (1)..(362): Homolog of NCBI NO: 37530696 NR Description: hypothetical protein [Oryza sativa (japonica
  misc_feature (9)..(396): Homolog of NCBI NO: 30013683 NR Description: Avr9/Cf-9 rapidly elicited protein 74 [Nicotiana
  misc_feature (6)..(400): Homolog of NCBI NO: 21741126 NR Description: OSJNBa0070M12.4 [Oryza sativa (japonica
  misc_feature (9)..(396): Homolog of NCBI NO: 14582200 NR Description: immediate-early fungal elicitor protein CMPG1
  misc_feature (8)..(402): Homolog of NCBI NO: 30686609 NR Description: expressed protein [Arabidopsis thaliana]
  misc_feature (8)..(402): Homolog of NCBI NO: 25408431 NR Description: hypothetical protein At2g35930 [imported] -
  misc_feature (1)..(421): Homolog of NCBI NO: 26451730 NR Description: unknown protein [Arabidopsis thaliana]
  misc_feature (1)..(421): Homolog of NCBI NO: 15222819 NR Description: hypothetical protein; protein id: At1g49780.1
  misc_feature (1)..(421): Homolog of NCBI NO: 18402223 NR Description: expressed protein
MPRNIEPLDLGIQIPYHFRCPISLELMQDPVTVCTGQTYDRASIESWVSIGNNTTCPVTRAPLSDFTLIPNHTLRRLIQEWCVANRSNGVERIPTPKQPADPTSVRALLSQASAITGTHVSVRSRAAALRRLRGFARDSDKNRVLIAAHNATEILIKILFSETTSSELVSESLALLVMLPITEPNQFVSISSDPGRVEFLTRLLFDSSIETRVNAAALIEIVSTGTKSADLKGSISNSESVFEGVLDLLRNPISSRRALKIGIKTLFALCSVKSTRHIAITAGAPEILIDRLAADFDRCDTERALATVELLCRTPEGCAAFGEHALTVPLLVKTILRVSDRATEYAAGALLALCTAEERWREEAAGAGVVVQLLLMVQSECTERAKKKAQKLLKLLRDSWPDYNSFANSDDFGCSSQVVPF

SEQ ID NO: 36764 - protein, 395 aa, Arabidopsis thaliana
  peptide (1)..(395): Ceres Seq. ID no. 12337571
  misc_feature (1)..(62): Pfam Name: U-box domain Pfam Description: U-box domain
  misc_feature (1)..(374): Homolog of NCBI NO: 34908566 NR Description: P0505D12.10 [Oryza sativa (japonica
  misc_feature (1)..(336): Homolog of NCBI NO: 37530696 NR Description: hypothetical protein [Oryza sativa (japonica
  misc_feature (1)..(370): Homolog of NCBI NO: 30013683 NR Description: Avr9/Cf-9 rapidly elicited protein 74 [Nicotiana
  misc_feature (1)..(374): Homolog of NCBI NO: 21741126 NR Description: OSJNBa0070M12.4 [Oryza sativa (japonica
  misc_feature (1)..(370): Homolog of NCBI NO: 14582200 NR Description: immediate-early fungal elicitor protein CMPG1
  misc_feature (1)..(376): Homolog of NCBI NO: 30686609 NR Description: expressed protein [Arabidopsis thaliana]
  misc_feature (1)..(376): Homolog of NCBI NO: 25408431 NR Description: hypothetical protein At2g35930 [imported] -
  misc_feature (1)..(395): Homolog of NCBI NO: 26451730 NR Description: unknown protein [Arabidopsis thaliana]
  misc_feature (1)..(395): Homolog of NCBI NO: 15222819 NR Description: hypothetical protein; protein id: At1g49780.1
  misc_feature (1)..(395): Homolog of NCBI NO: 18402223 NR Description: expressed protein
MQDPVTVCTGQTYDRASIESWVSIGNNTTCPVTRAPLSDFTLIPNHTLRRLIQEWCVANRSNGVERIPTPKQPADPTSVRALLSQASAITGTHVSVRSRAAALRRLRGFARDSDKNRVLIAAHNATEILIKILFSETTSSELVSESLALLVMLPITEPNQFVSISSDPGRVEFLTRLLFDSSIETRVNAAALIEIVSTGTKSADLKGSISNSESVFEGVLDLLRNPISSRRALKIGIKTLFALCSVKSTRHIAITAGAPEILIDRLAADFDRCDTERALATVELLCRTPEGCAAFGEHALTVPLLVKTILRVSDRATEYAAGALLALCTAEERWREEAAGAGVVVQLLLMVQSECTERAKKKAQKLLKLLRDSWPDYNSFANSDDFGCSSQVVPF

SEQ ID NO: 36765 - protein, 244 aa, Arabidopsis thaliana
  peptide (1)..(244): Ceres Seq. ID no. 12337572
  misc_feature (1)..(223): Homolog of NCBI NO: 34908566 NR Description: P0505D12.10 [Oryza sativa (japonica
  misc_feature (1)..(185): Homolog of NCBI NO: 37530696 NR Description: hypothetical protein [Oryza sativa (japonica
  misc_feature (1)..(219): Homolog of NCBI NO: 30013683 NR Description: Avr9/Cf-9 rapidly elicited protein 74 [Nicotiana
  misc_feature (1)..(223): Homolog of NCBI NO: 21741126 NR Description: OSJNBa0070M12.4 [Oryza sativa (japonica
  misc_feature (1)..(219): Homolog of NCBI NO: 14582200 NR Description: immediate-early fungal elicitor protein CMPG1
  misc_feature (1)..(225): Homolog of NCBI NO: 30686609 NR Description: expressed protein [Arabidopsis thaliana]
  misc_feature (1)..(225): Homolog of NCBI NO: 25408431 NR Description: hypothetical protein At2g35930 [imported] -
  misc_feature (1)..(244): Homolog of NCBI NO: 26451730 NR Description: unknown protein [Arabidopsis thaliana]
  misc_feature (1)..(244): Homolog of NCBI NO: 15222819 NR Description: hypothetical protein; protein id: At1g49780.1
  misc_feature (1)..(244): Homolog of NCBI NO: 18402223 NR Description: expressed protein
MLPITEPNQFVSISSDPGRVEFLTRLLFDSSIETRVNAAALIEIVSTGTKSADLKGSISNSESVFEGVLDLLRNPISSRRALKIGIKTLFALCSVKSTRHIAITAGAPEILIDRLAADFDRCDTERALATVELLCRTPEGCAAFGEHALTVPLLVKTILRVSDRATEYAAGALLALCTAEERWREEAAGAGVVVQLLLMVQSECTERAKKKAQKLLKLLRDSWPDYNSFANSDDFGCSSQVVPF

SEQ ID NO: 36766 - DNA, 1367 bp, Arabidopsis thaliana
  misc_feature (1)..(1367): Ceres Seq. ID no. 12580251
  misc_feature: MA Experiment ID: 108462 Result: Down-regulated in Transcription
  misc_feature: MA Experiment 108462 PARAMETER Experiment Name: At_Germinating_Seeds_cDNA_P Parameter: Age (day) Value: 2 vs. 0
  misc_feature: MA Experiment 108462 PARAMETER Experiment Name: At_Germinating_Seeds_cDNA_P Parameter: Tissue Value: Germinating Seeds
  misc_feature: MA Experiment ID: 108463 Result: Down-regulated in Transcription
  misc_feature: MA Experiment 108463 PARAMETER Experiment Name: At_Germinating_Seeds_cDNA_P Parameter: Age (day) Value: 3 vs. 0
  misc_feature: MA Experiment 108463 PARAMETER Experiment Name: At_Germinating_Seeds_cDNA_P Parameter: Tissue Value: Germinating Seeds
  misc_feature: MA Experiment ID: 108464 Result: Down-regulated in Transcription
  misc_feature: MA Experiment 108464 PARAMETER Experiment Name: At_Germinating_Seeds_cDNA_P Parameter: Age (day) Value: 4 vs. 0
  misc_feature: MA Experiment 108464 PARAMETER Experiment Name: At_Germinating_Seeds_cDNA_P Parameter: Tissue Value: Germinating Seeds
  misc_feature: MA Experiment ID: 108488 Result: Up-regulated in Transcription
  misc_feature: MA Experiment ID: 108489 Result: Up-regulated in Transcription
  misc_feature: MA Experiment ID: 108561 Result: Down-regulated in Transcription
  misc_feature: MA Experiment 108561 PARAMETER Experiment Name: At_100uM_ABA_cDNA_P Parameter: Timepoint (hr) Value: 6
  misc_feature: MA Experiment 108561 PARAMETER Experiment Name: At_100uM_ABA_cDNA_P Parameter: Tissue Value: Aerial
  misc_feature: MA Experiment 108561 PARAMETER Experiment Name: At_100uM_ABA_cDNA_P Parameter: Treatment Value: 100uM ABA vs. No Treatment
  misc_feature: MA Experiment ID: 108569 Result: Up-regulated in Transcription
  misc_feature: MA Experiment 108569 PARAMETER Experiment Name: At_0.001%_MeJA__cDNA_P Parameter: Timepoint (hr) Value: 6
  misc_feature: MA Experiment 108569 PARAMETER Experiment Name: At_0.001%_MeJA__cDNA_P Parameter: Tissue Value: Aerial
  misc_feature: MA Experiment 108569 PARAMETER Experiment Name: At_0.001%_MeJA__cDNA_P Parameter: Treatment Value: 0.001% MeJA vs. No Treatment
  misc_feature: MA Experiment ID: 108573 Result: Up-regulated in Transcription
  misc_feature: MA Experiment 108573 PARAMETER Experiment Name: At_Drought_cDNA_P Parameter: Timepoint (hr) Value: 6
  misc_feature: MA Experiment 108573 PARAMETER Experiment Name: At_Drought_cDNA_P Parameter: Tissue Value: Aerial
  misc_feature: MA Experiment 108573 PARAMETER Experiment Name: At_Drought_cDNA_P Parameter: Treatment Value: Drought vs. No Drought
  misc_feature: MA Experiment ID: 108576 Result: Down-regulated in Transcription
  misc_feature: MA Experiment 108576 PARAMETER Experiment Name: At_42deg_Heat_cDNA_P Parameter: Temperature (deg C) Value: 42 vs. 22
  misc_feature: MA Experiment 108576 PARAMETER Experiment Name: At_42deg_Heat_cDNA_P Parameter: Timepoint (hr) Value: 1
  misc_feature: MA Experiment 108576 PARAMETER Experiment Name: At_42deg_Heat_cDNA_P Parameter: Tissue Value: Aerial
  misc_feature: MA Experiment ID: 108577 Result: Down-regulated in Transcription
  misc_feature: MA Experiment 108577 PARAMETER Experiment Name: At_42deg_Heat_cDNA_P Parameter: Temperature (deg C) Value: 42 vs. 22
  misc_feature: MA Experiment 108577 PARAMETER Experiment Name: At_42deg_Heat_cDNA_P Parameter: Timepoint (hr) Value: 6
  misc_feature: MA Experiment 108577 PARAMETER Experiment Name: At_42deg_Heat_cDNA_P Parameter: Tissue Value: Aerial
  misc_feature: MA Experiment ID: 108579 Result: Down-regulated in Transcription
  misc_feature: MA Experiment 108579 PARAMETER Experiment Name: At_4deg_Cold_cDNA_P Parameter: Temperature (deg C) Value: 4 vs. 22
  misc_feature: MA Experiment 108579 PARAMETER Experiment Name: At_4deg_Cold_cDNA_P Parameter: Timepoint (hr) Value: 6
  misc_feature: MA Experiment 108579 PARAMETER Experiment Name: At_4deg_Cold_cDNA_P Parameter: Tissue Value: Aerial
  misc_feature: MA Experiment ID: 108585 Result: Down-regulated in Transcription
  misc_feature: MA Experiment 108585 PARAMETER Experiment Name: At_5mM_NaNP_cDNA_P Parameter: Timepoint (hr) Value: 6
  misc_feature: MA Experiment 108585 PARAMETER Experiment Name: At_5mM_NaNP_cDNA_P Parameter: Tissue Value: Aerial
  misc_feature: MA Experiment 108585 PARAMETER Experiment Name: At_5mM_NaNP_cDNA_P Parameter: Treatment Value: null
  misc_feature: MA Experiment ID: 108594 Result: Down-regulated in Transcription
  misc_feature: MA Experiment 108594 PARAMETER Experiment Name: At_Ler-rhl_Root_cDNA_P Parameter: Plant Line Value: null
  misc_feature: MA Experiment ID: 108595 Result: Down-regulated in Transcription
  misc_feature: MA Experiment 108595 PARAMETER Experiment Name: At_Ler-pi_Ovule_cDNA_P Parameter: Plant Line Value: null
  misc_feature: MA Experiment ID: 108607 Result: Down-regulated in Transcription
  misc_feature: MA Experiment 108607 PARAMETER Experiment Name: At_100uM_ABA_cDNA_P Parameter: Timepoint (hr) Value: 4
  misc_feature: MA Experiment 108607 PARAMETER Experiment Name: At_100uM_ABA_cDNA_P Parameter: Tissue Value: Aerial
  misc_feature: MA Experiment 108607 PARAMETER Experiment Name: At_100uM_ABA_cDNA_P Parameter: Treatment Value: 100uM ABA vs. No Treatment
  misc_feature: MA Experiment ID: 108608 Result: Down-regulated in Transcription
  misc_feature: MA Experiment 108608 PARAMETER Experiment Name: At_100uM_ABA_cDNA_P Parameter: Timepoint (hr) Value: 1
  misc_feature: MA Experiment 108608 PARAMETER Experiment Name: At_100uM_ABA_cDNA_P Parameter: Tissue Value: Aerial
  misc_feature: MA Experiment 108608 PARAMETER Experiment Name: At_100uM_ABA_cDNA_P Parameter: Treatment Value: 100uM ABA vs. No Treatment
  misc_feature: MA Experiment ID: 108609 Result: Down-regulated in Transcription
  misc_feature: MA Experiment 108609 PARAMETER Experiment Name: At_100uM_ABA_cDNA_P Parameter: Timepoint (hr) Value: 24
  misc_feature: MA Experiment 108609 PARAMETER Experiment Name: At_100uM_ABA_cDNA_P Parameter: Tissue Value: Aerial
  misc_feature: MA Experiment 108609 PARAMETER Experiment Name: At_100uM_ABA_cDNA_P Parameter: Treatment Value: 100uM ABA vs. No Treatment
  misc_feature: MA Experiment ID: 20000069 Result: Down-regulated in Transcription
  misc_feature: MA Experiment 20000069 PARAMETER Experiment Name: At_100uM_ABA_Mutants_cDNA_P Parameter: Plant Line Value: CS23
  misc_feature: MA Experiment 20000069 PARAMETER Experiment Name: At_100uM_ABA_Mutants_cDNA_P Parameter: Timepoint (hr) Value: 6
  misc_feature: MA Experiment 20000069 PARAMETER Experiment Name: At_100uM_ABA_Mutants_cDNA_P Parameter: Tissue Value: Aerial
  misc_feature: MA Experiment 20000069 PARAMETER Experiment Name: At_100uM_ABA_Mutants_cDNA_P Parameter: Treatment Value: 100uM ABA vs. No Treatment
  misc_feature: MA Experiment ID: 20000070 Result: Down-regulated in Transcription
  misc_feature: MA Experiment 20000070 PARAMETER Experiment Name: At_100uM_ABA_Mutants_cDNA_P Parameter: Plant Line Value: CS24
  misc_feature: MA Experiment 20000070 PARAMETER Experiment Name: At_100uM_ABA_Mutants_cDNA_P Parameter: Timepoint (hr) Value: 6
  misc_feature: MA Experiment 20000070 PARAMETER Experiment Name: At_100uM_ABA_Mutants_cDNA_P Parameter: Tissue Value: Aerial
  misc_feature: MA Experiment 20000070 PARAMETER Experiment Name: At_100uM_ABA_Mutants_cDNA_P Parameter: Treatment Value: 100uM ABA vs. No Treatment
  misc_feature: MA Experiment ID: 20000071 Result: Down-regulated in Transcription
  misc_feature: MA Experiment 20000071 PARAMETER Experiment Name: At_100uM_ABA_Mutants_cDNA_P Parameter: Plant Line Value: CS8104
  misc_feature: MA Experiment 20000071 PARAMETER Experiment Name: At_100uM_ABA_Mutants_cDNA_P Parameter: Timepoint (hr) Value: 6
  misc_feature: MA Experiment 20000071 PARAMETER Experiment Name: At_100uM_ABA_Mutants_cDNA_P Parameter: Tissue Value: Aerial
  misc_feature: MA Experiment 20000071 PARAMETER Experiment Name: At_100uM_ABA_Mutants_cDNA_P Parameter: Treatment Value: 100uM ABA vs. No Treatment
  misc_feature: MA Experiment ID: 20000072 Result: Down-regulated in Transcription
  misc_feature: MA Experiment 20000072 PARAMETER Experiment Name: At_100uM_ABA_Mutants_cDNA_P Parameter: Plant Line Value: CS8105
  misc_feature: MA Experiment 20000072 PARAMETER Experiment Name: At_100uM_ABA_Mutants_cDNA_P Parameter: Timepoint (hr) Value: 6
  misc_feature: MA Experiment 20000072 PARAMETER Experiment Name: At_100uM_ABA_Mutants_cDNA_P Parameter: Tissue Value: Aerial
  misc_feature: MA Experiment 20000072 PARAMETER Experiment Name: At_100uM_ABA_Mutants_cDNA_P Parameter: Treatment Value: 100uM ABA vs. No Treatment
  misc_feature: MA Experiment ID: 20000086 Result: Down-regulated in Transcription
  misc_feature: MA Experiment 20000086 PARAMETER Experiment Name: At_100uM_ABA_Mutants_cDNA_P Parameter: Plant Line Value: CS22
  misc_feature: MA Experiment 20000086 PARAMETER Experiment Name: At_100uM_ABA_Mutants_cDNA_P Parameter: Timepoint (hr) Value: 6
  misc_feature: MA Experiment 20000086 PARAMETER Experiment Name: At_100uM_ABA_Mutants_cDNA_P Parameter: Tissue Value: Aerial
  misc_feature: MA Experiment 20000086 PARAMETER Experiment Name: At_100uM_ABA_Mutants_cDNA_P Parameter: Treatment Value: 100uM ABA vs. No Treatment
  misc_feature: MA Experiment ID: 20000087 Result: Down-regulated in Transcription
  misc_feature: MA Experiment 20000087 PARAMETER Experiment Name: At_100uM_ABA_Mutants_cDNA_P Parameter: Plant Line Value: WS
  misc_feature: MA Experiment 20000087 PARAMETER Experiment Name: At_100uM_ABA_Mutants_cDNA_P Parameter: Timepoint (hr) Value: 6
  misc_feature: MA Experiment 20000087 PARAMETER Experiment Name: At_100uM_ABA_Mutants_cDNA_P Parameter: Tissue Value: Aerial
  misc_feature: MA Experiment 20000087 PARAMETER Experiment Name: At_100uM_ABA_Mutants_cDNA_P Parameter: Treatment Value: 100uM ABA vs. No Treatment
  misc_feature: MA Experiment ID: 20000088 Result: Down-regulated in Transcription
  misc_feature: MA Experiment 20000088 PARAMETER Experiment Name: At_100uM_ABA_Mutants_cDNA_P Parameter: Plant Line Value: Landsberg
  misc_feature: MA Experiment 20000088 PARAMETER Experiment Name: At_100uM_ABA_Mutants_cDNA_P Parameter: Timepoint (hr) Value: 6
  misc_feature: MA Experiment 20000088 PARAMETER Experiment Name: At_100uM_ABA_Mutants_cDNA_P Parameter: Tissue Value: Aerial
  misc_feature: MA Experiment 20000088 PARAMETER Experiment Name: At_100uM_ABA_Mutants_cDNA_P Parameter: Treatment Value: 100uM ABA vs. No Treatment
  misc_feature: MA Experiment ID: 20000093 Result: Down-regulated in Transcription
  misc_feature: MA Experiment 20000093 PARAMETER Experiment Name: At_42deg_Heat_cDNA_P Parameter: Temperature (deg C) Value: 42 vs. 22
  misc_feature: MA Experiment 20000093 PARAMETER Experiment Name: At_42deg_Heat_cDNA_P Parameter: Timepoint (hr) Value: 0.5
  misc_feature: MA Experiment 20000093 PARAMETER Experiment Name: At_42deg_Heat_cDNA_P Parameter: Tissue Value: Aerial
  misc_feature: MA Experiment ID: 20000111 Result: Down-regulated in Transcription
  misc_feature: MA Experiment 20000111 PARAMETER Experiment Name: At_42deg_Heat_cDNA_P Parameter: Temperature (deg C) Value: 42 vs. 22
  misc_feature: MA Experiment 20000111 PARAMETER Experiment Name: At_42deg_Heat_cDNA_P Parameter: Timepoint (hr) Value: 6
  misc_feature: MA Experiment 20000111 PARAMETER Experiment Name: At_42deg_Heat_cDNA_P Parameter: Tissue Value: Aerial
  misc_feature: MA Experiment ID: 20000112 Result: Down-regulated in Transcription
  misc_feature: MA Experiment 20000112 PARAMETER Experiment Name: At_42deg_Heat_cDNA_P Parameter: Temperature (deg C) Value: 42 vs. 22
  misc_feature: MA Experiment 20000112 PARAMETER Experiment Name: At_42deg_Heat_cDNA_P Parameter: Timepoint (hr) Value: 2
  misc_feature: MA Experiment 20000112 PARAMETER Experiment Name: At_42deg_Heat_cDNA_P Parameter: Tissue Value: Aerial
  misc_feature: MA Experiment ID: 20000113 Result: Down-regulated in Transcription
  misc_feature: MA Experiment 20000113 PARAMETER Experiment Name: At_42deg_Heat_cDNA_P Parameter: Temperature (deg C) Value: 42 vs. 22
  misc_feature: MA Experiment 20000113 PARAMETER Experiment Name: At_42deg_Heat_cDNA_P Parameter: Timepoint (hr) Value: 8
  misc_feature: MA Experiment 20000113 PARAMETER Experiment Name: At_42deg_Heat_cDNA_P Parameter: Tissue Value: Aerial
  misc_feature: MA Experiment ID: 20000117 Result: Down-regulated in Transcription
  misc_feature: MA Experiment 20000117 PARAMETER Experiment Name: At_100uM_ABA_Mutants_cDNA_P Parameter: Plant Line Value: Columbia
  misc_feature: MA Experiment 20000117 PARAMETER Experiment Name: At_100uM_ABA_Mutants_cDNA_P Parameter: Timepoint (hr) Value: 6
  misc_feature: MA Experiment 20000117 PARAMETER Experiment Name: At_100uM_ABA_Mutants_cDNA_P Parameter: Tissue Value: Aerial
  misc_feature: MA Experiment 20000117 PARAMETER Experiment Name: At_100uM_ABA_Mutants_cDNA_P Parameter: Treatment Value: 100uM ABA vs. No Treatment
  misc_feature: MA Experiment ID: 20000144 Result: Down-regulated in Transcription
  misc_feature: MA Experiment 20000144 PARAMETER Experiment Name: At_42deg_Heat_cDNA_P Parameter: Temperature (deg C) Value: 42 vs. 22
  misc_feature: MA Experiment 20000144 PARAMETER Experiment Name: At_42deg_Heat_cDNA_P Parameter: Timepoint (hr) Value: 1
  misc_feature: MA Experiment 20000144 PARAMETER Experiment Name: At_42deg_Heat_cDNA_P Parameter: Tissue Value: Aerial
  misc_feature: MA Experiment ID: 20000166 Result: Down-regulated in Transcription
  misc_feature: MA Experiment 20000166 PARAMETER Experiment Name: At_100uM_ABA_P Parameter: Age (day) Value: 14
  misc_feature: MA Experiment 20000166 PARAMETER Experiment Name: At_100uM_ABA_P Parameter: Organism Value: A. thaliana
  misc_feature: MA Experiment 20000166 PARAMETER Experiment Name: At_100uM_ABA_P Parameter: Plant Line Value: WS
  misc_feature: MA Experiment 20000166 PARAMETER Experiment Name: At_100uM_ABA_P Parameter: Timepoint (hr) Value: 1
  misc_feature: MA Experiment 20000166 PARAMETER Experiment Name: At_100uM_ABA_P Parameter: Tissue Value: Aerial
  misc_feature: MA Experiment 20000166 PARAMETER Experiment Name: At_100uM_ABA_P Parameter: Treatment Value: 100uM ABA vs. No Treatment
  misc_feature: MA Experiment ID: 20000171 Result: Down-regulated in Transcription
  misc_feature: MA Experiment 20000171 PARAMETER Experiment Name: At_42deg_Heat_P Parameter: Age (day) Value: 14
  misc_feature: MA Experiment 20000171 PARAMETER Experiment Name: At_42deg_Heat_P Parameter: Organism Value: A. thaliana
  misc_feature: MA Experiment 20000171 PARAMETER Experiment Name: At_42deg_Heat_P Parameter: Plant Line Value: WS
  misc_feature: MA Experiment 20000171 PARAMETER Experiment Name: At_42deg_Heat_P Parameter: Temperature (deg C) Value: 42 vs. 22
  misc_feature: MA Experiment 20000171 PARAMETER Experiment Name: At_42deg_Heat_P Parameter: Timepoint (hr) Value: 1
  misc_feature: MA Experiment 20000171 PARAMETER Experiment Name: At_42deg_Heat_P Parameter: Tissue Value: Aerial
  misc_feature: MA Experiment ID: 20000173 Result: Down-regulated in Transcription
  misc_feature: MA Experiment 20000173 PARAMETER Experiment Name: At_42deg_Heat_P Parameter: Age (day) Value: 14
  misc_feature: MA Experiment 20000173 PARAMETER Experiment Name: At_42deg_Heat_P Parameter: Organism Value: A. thaliana
  misc_feature: MA Experiment 20000173 PARAMETER Experiment Name: At_42deg_Heat_P Parameter: Plant Line Value: WS
  misc_feature: MA Experiment 20000173 PARAMETER Experiment Name: At_42deg_Heat_P Parameter: Temperature (deg C) Value: 42 vs. 22
  misc_feature: MA Experiment 20000173 PARAMETER Experiment Name: At_42deg_Heat_P Parameter: Timepoint (hr) Value: 6
  misc_feature: MA Experiment 20000173 PARAMETER Experiment Name: At_42deg_Heat_P Parameter: Tissue Value: Aerial
  misc_feature: MA Experiment ID: 20000180 Result: Down-regulated in Transcription
  misc_feature: MA Experiment 20000180 PARAMETER Experiment Name: At_Germinating_Seeds_P Parameter: Age (hr) Value: 24 vs. 0
  misc_feature: MA Experiment 20000180 PARAMETER Experiment Name: At_Germinating_Seeds_P Parameter: Tissue Value: Germinating Seeds
  misc_feature: MA Experiment ID: 20000184 Result: Up-regulated in Transcription
  misc_feature: MA Experiment 20000184 PARAMETER Experiment Name: At_Shoots__P Parameter: Age (day) Value: 7
  misc_feature: MA Experiment 20000184 PARAMETER Experiment Name: At_Shoots__P Parameter: Tissue Value: Shoots vs. Whole Plant
  misc_feature: MA Experiment ID: 20000185 Result: Down-regulated in Transcription
  misc_feature: MA Experiment 20000185 PARAMETER Experiment Name: At_Roots__P Parameter: Age (day) Value: 7 vs. 21
  misc_feature: MA Experiment 20000185 PARAMETER Experiment Name: At_Roots__P Parameter: Organism Value: A. thaliana
  misc_feature: MA Experiment 20000185 PARAMETER Experiment Name: At_Roots__P Parameter: Tissue Value: Roots vs. Whole Plant
  misc_feature: MA Experiment ID: 20000214 Result: Up-regulated in Transcription
  misc_feature: MA Experiment 20000214 PARAMETER Experiment Name: At_4deg_Cold_P Parameter: Timepoint (hr) Value: 6
  misc_feature: MA Experiment ID: 20000234 Result: Down-regulated in Transcription
  misc_feature: MA Experiment 20000234 PARAMETER Experiment Name: At_Siliques_P Parameter: Age (day) Value: 21
  misc_feature: MA Experiment 20000234 PARAMETER Experiment Name: At_Siliques_P Parameter: Organism Value: A. thaliana
  misc_feature: MA Experiment 20000234 PARAMETER Experiment Name: At_Siliques_P Parameter: Plant Line Value: WS
  misc_feature: MA Experiment 20000234 PARAMETER Experiment Name: At_Siliques_P Parameter: Tissue Value: Less Than 5mm Siliques vs. Whole Plant
  misc_feature: MA Experiment ID: 20000264 Result: Down-regulated in Transcription
  misc_feature: MA Experiment 20000264 PARAMETER Experiment Name: At_Open_Flower_P Parameter: Age (day) Value: 21
  misc_feature: MA Experiment 20000264 PARAMETER Experiment Name: At_Open_Flower_P Parameter: Plant Line Value: WS
  misc_feature: MA Experiment 20000264 PARAMETER Experiment Name: At_Open_Flower_P Parameter: Tissue Value: Open Flower vs. Whole Plant
  misc_feature: MA Experiment ID: 20000267 Result: Down-regulated in Transcription
  misc_feature: MA Experiment 20000267 PARAMETER Experiment Name: At_Drought_P Parameter: Age (day) Value: 7
  misc_feature: MA Experiment 20000267 PARAMETER Experiment Name: At_Drought_P Parameter: Organism Value: A. thaliana
  misc_feature: MA Experiment 20000267 PARAMETER Experiment Name: At_Drought_P Parameter: Plant Line Value: WS
  misc_feature: MA Experiment 20000267 PARAMETER Experiment Name: At_Drought_P Parameter: Timepoint (hr) Value: 6
  misc_feature: MA Experiment 20000267 PARAMETER Experiment Name: At_Drought_P Parameter: Tissue Value: Whole Plant
  misc_feature: MA Experiment 20000267 PARAMETER Experiment Name: At_Drought_P Parameter: Treatment Value: Drought vs. No Drought
  misc_feature: MA Experiment ID: 20000288 Result: Down-regulated in Transcription
  misc_feature: MA Experiment 20000288 PARAMETER Experiment Name: At_Drought_P Parameter: Age (day) Value: 7
  misc_feature: MA Experiment 20000288 PARAMETER Experiment Name: At_Drought_P Parameter: Organism Value: A. thaliana
  misc_feature: MA Experiment 20000288 PARAMETER Experiment Name: At_Drought_P Parameter: Plant Line Value: WS
  misc_feature: MA Experiment 20000288 PARAMETER Experiment Name: At_Drought_P Parameter: Timepoint (hr) Value: 1
  misc_feature: MA Experiment 20000288 PARAMETER Experiment Name: At_Drought_P Parameter: Tissue Value: Whole Plant
  misc_feature: MA Experiment 20000288 PARAMETER Experiment Name: At_Drought_P Parameter: Treatment Value: Drought vs. No Drought
  misc_feature: MA Experiment ID: 20000436 Result: Down-regulated in Transcription
  misc_feature: MA Experiment 20000436 PARAMETER Experiment Name: At_Drought_P Parameter: Age (day) Value: 7
  misc_feature: MA Experiment 20000436 PARAMETER Experiment Name: At_Drought_P Parameter: Organism Value: A. thaliana
  misc_feature: MA Experiment 20000436 PARAMETER Experiment Name: At_Drought_P Parameter: Plant Line Value: WS
  misc_feature: MA Experiment 20000436 PARAMETER Experiment Name: At_Drought_P Parameter: Timepoint (hr) Value: 12
  misc_feature: MA Experiment 20000436 PARAMETER Experiment Name: At_Drought_P Parameter: Tissue Value: Whole Plant
  misc_feature: MA Experiment 20000436 PARAMETER Experiment Name: At_Drought_P Parameter: Treatment Value: Drought vs. No Drought
  misc_feature: MA Experiment ID: 20000437 Result: Down-regulated in Transcription
  misc_feature: MA Experiment 20000437 PARAMETER Experiment Name: At_Drought_P Parameter: Age (day) Value: 8
  misc_feature: MA Experiment 20000437 PARAMETER Experiment Name: At_Drought_P Parameter: Organism Value: A. thaliana
  misc_feature: MA Experiment 20000437 PARAMETER Experiment Name: At_Drought_P Parameter: Plant Line Value: WS
  misc_feature: MA Experiment 20000437 PARAMETER Experiment Name: At_Drought_P Parameter: Timepoint (hr) Value: 24
  misc_feature: MA Experiment 20000437 PARAMETER Experiment Name: At_Drought_P Parameter: Tissue Value: Whole Plant
  misc_feature: MA Experiment 20000437 PARAMETER Experiment Name: At_Drought_P Parameter: Treatment Value: Drought vs. No Drought
  misc_feature: MA Experiment ID: 20000438 Result: Up-regulated in Transcription
  misc_feature: MA Experiment 20000438 PARAMETER Experiment Name: At_Shoots__P Parameter: Age (day) Value: 14
  misc_feature: MA Experiment 20000438 PARAMETER Experiment Name: At_Shoots__P Parameter: Tissue Value: Shoots vs. Whole Plant
  misc_feature: MA Experiment ID: 20000439 Result: Down-regulated in Transcription
  misc_feature: MA Experiment 20000439 PARAMETER Experiment Name: At_Roots__P Parameter: Age (day) Value: 14 vs. 21
  misc_feature: MA Experiment 20000439 PARAMETER Experiment Name: At_Roots__P Parameter: Organism Value: A. thaliana
  misc_feature: MA Experiment 20000439 PARAMETER Experiment Name: At_Roots__P Parameter: Tissue Value: Roots vs. Whole Plant
  misc_feature: MA Experiment ID: 20000451 Result: Up-regulated in Transcription
  misc_feature: MA Experiment 20000451 PARAMETER Experiment Name: At_CS6879_Shoots-Roots_P Parameter: Age (day) Value: 14
  misc_feature: MA Experiment 20000451 PARAMETER Experiment Name: At_CS6879_Shoots-Roots_P Parameter: Organism Value: A. thaliana
  misc_feature: MA Experiment 20000451 PARAMETER Experiment Name: At_CS6879_Shoots-Roots_P Parameter: Plant Line Value: CS6879 vs. WS
  misc_feature: MA Experiment 20000451 PARAMETER Experiment Name: At_CS6879_Shoots-Roots_P Parameter: Tissue Value: Roots
  misc_feature: MA Experiment ID: 20000453 Result: Down-regulated in Transcription
  misc_feature: MA Experiment 20000453 PARAMETER Experiment Name: At_100uM_ABA_P Parameter: Age (day) Value: 15
  misc_feature: MA Experiment 20000453 PARAMETER Experiment Name: At_100uM_ABA_P Parameter: Organism Value: A. thaliana
  misc_feature: MA Experiment 20000453 PARAMETER Experiment Name: At_100uM_ABA_P Parameter: Plant Line Value: WS
  misc_feature: MA Experiment 20000453 PARAMETER Experiment Name: At_100uM_ABA_P Parameter: Timepoint (hr) Value: 24
  misc_feature: MA Experiment 20000453 PARAMETER Experiment Name: At_100uM_ABA_P Parameter: Tissue Value: Aerial
  misc_feature: MA Experiment 20000453 PARAMETER Experiment Name: At_100uM_ABA_P Parameter: Treatment Value: 100uM ABA vs. No Treatment
  misc_feature: MA Experiment ID: 20000455 Result: Down-regulated in Transcription
  misc_feature: MA Experiment 20000455 PARAMETER Experiment Name: At_100uM_ABA_P Parameter: Age (day) Value: 16
  misc_feature: MA Experiment 20000455 PARAMETER Experiment Name: At_100uM_ABA_P Parameter: Organism Value: A. thaliana
  misc_feature: MA Experiment 20000455 PARAMETER Experiment Name: At_100uM_ABA_P Parameter: Plant Line Value: WS
  misc_feature: MA Experiment 20000455 PARAMETER Experiment Name: At_100uM_ABA_P Parameter: Timepoint (hr) Value: 48
  misc_feature: MA Experiment 20000455 PARAMETER Experiment Name: At_100uM_ABA_P Parameter: Tissue Value: Aerial
  misc_feature: MA Experiment 20000455 PARAMETER Experiment Name: At_100uM_ABA_P Parameter: Treatment Value: 100uM ABA vs. No Treatment
  misc_feature: MA Experiment ID: 20000456 Result: Up-regulated in Transcription
  misc_feature: MA Experiment 20000456 PARAMETER Experiment Name: At_100uM_BA_P Parameter: Age (day) Value: 14
  misc_feature: MA Experiment 20000456 PARAMETER Experiment Name: At_100uM_BA_P Parameter: Organism Value: A. thaliana
  misc_feature: MA Experiment 20000456 PARAMETER Experiment Name: At_100uM_BA_P Parameter: Plant Line Value: WS
  misc_feature: MA Experiment 20000456 PARAMETER Experiment Name: At_100uM_BA_P Parameter: Timepoint (hr) Value: 6
  misc_feature: MA Experiment 20000456 PARAMETER Experiment Name: At_100uM_BA_P Parameter: Tissue Value: Aerial
  misc_feature: MA Experiment 20000456 PARAMETER Experiment Name: At_100uM_BA_P Parameter: Treatment Value: 100uM BA vs. No Treatment
  misc_feature: MA Experiment ID: 20000573 Result: Down-regulated in Transcription
  misc_feature: MA Experiment 20000573 PARAMETER Experiment Name: At_100uM_ABA_Mutants__P Parameter: Organism Value: A. thaliana
  misc_feature: MA Experiment 20000573 PARAMETER Experiment Name: At_100uM_ABA_Mutants__P Parameter: Plant Line Value: CS22 vs. Ler wt
  misc_feature: MA Experiment 20000573 PARAMETER Experiment Name: At_100uM_ABA_Mutants__P Parameter: Timepoint (hr) Value: N/A
  misc_feature: MA Experiment 20000573 PARAMETER Experiment Name: At_100uM_ABA_Mutants__P Parameter: Tissue Value: Whole Plant
  misc_feature: MA Experiment 20000573 PARAMETER Experiment Name: At_100uM_ABA_Mutants__P Parameter: Treatment Value: None
  misc_feature: MA Experiment ID: 20000574 Result: Down-regulated in Transcription
  misc_feature: MA Experiment 20000574 PARAMETER Experiment Name: At_100uM_ABA_Mutants__P Parameter: Organism Value: A. thaliana
  misc_feature: MA Experiment 20000574 PARAMETER Experiment Name: At_100uM_ABA_Mutants__P Parameter: Plant Line Value: CS23 vs. Ler wt
  misc_feature: MA Experiment 20000574 PARAMETER Experiment Name: At_100uM_ABA_Mutants__P Parameter: Timepoint (hr) Value: N/A
  misc_feature: MA Experiment 20000574 PARAMETER Experiment Name: At_100uM_ABA_Mutants__P Parameter: Tissue Value: Whole Plant
  misc_feature: MA Experiment 20000574 PARAMETER Experiment Name: At_100uM_ABA_Mutants__P Parameter: Treatment Value: None
  misc_feature: MA Experiment ID: 20001451 Result: Down-regulated in Transcription
  misc_feature: MA Experiment 20001451 PARAMETER Experiment Name: At_Far-red-induction_P Parameter: Age (day) Value: 7
  misc_feature: MA Experiment 20001451 PARAMETER Experiment Name: At_Far-red-induction_P Parameter: Light Value: Far-red vs. White
  misc_feature: MA Experiment 20001451 PARAMETER Experiment Name: At_Far-red-induction_P Parameter: Organism Value: A. thaliana
  misc_feature: MA Experiment 20001451 PARAMETER Experiment Name: At_Far-red-induction_P Parameter: Plant Line Value: Columbia
  misc_feature: MA Experiment 20001451 PARAMETER Experiment Name: At_Far-red-induction_P Parameter: Timepoint (hr) Value: 24
  misc_feature: MA Experiment 20001451 PARAMETER Experiment Name: At_Far-red-induction_P Parameter: Tissue Value: Whole Plant
  misc_feature: MA Experiment ID: 20001458 Result: Up-regulated in Transcription
  misc_feature: MA Experiment 20001458 PARAMETER Experiment Name: At_50mM_NH4NO3_L-to-H_P Parameter: Age (day) Value: Undefined
  misc_feature: MA Experiment 20001458 PARAMETER Experiment Name: At_50mM_NH4NO3_L-to-H_P Parameter: Organism Value: Undefined
  misc_feature: MA Experiment 20001458 PARAMETER Experiment Name: At_50mM_NH4NO3_L-to-H_P Parameter: Plant Line Value: Undefined
  misc_feature: MA Experiment 20001458 PARAMETER Experiment Name: At_50mM_NH4NO3_L-to-H_P Parameter: Timepoint (hr) Value: 2
  misc_feature: MA Experiment 20001458 PARAMETER Experiment Name: At_50mM_NH4NO3_L-to-H_P Parameter: Tissue Value: Siliques
  misc_feature: MA Experiment 20001458 PARAMETER Experiment Name: At_50mM_NH4NO3_L-to-H_P Parameter: Treatment Value: 50mM NH4NO3 vs. 100mM Manitol
  misc_feature: MA Experiment ID: 20001554 Result: Down-regulated in Transcription
  misc_feature: MA Experiment 20001554 PARAMETER Experiment Name: At_Drought_Soil_Dry_P Parameter: Age (day) Value: 21
  misc_feature: MA Experiment 20001554 PARAMETER Experiment Name: At_Drought_Soil_Dry_P Parameter: Organism Value: A. thaliana
  misc_feature: MA Experiment 20001554 PARAMETER Experiment Name: At_Drought_Soil_Dry_P Parameter: Plant Line Value: WS
  misc_feature: MA Experiment 20001554 PARAMETER Experiment Name: At_Drought_Soil_Dry_P Parameter: Post Timepoint (hr) Value: None
  misc_feature: MA Experiment 20001554 PARAMETER Experiment Name: At_Drought_Soil_Dry_P Parameter: Post-Treatment Value: None
  misc_feature: MA Experiment 20001554 PARAMETER Experiment Name: At_Drought_Soil_Dry_P Parameter: Timepoint (day) Value: 7
  misc_feature: MA Experiment 20001554 PARAMETER Experiment Name: At_Drought_Soil_Dry_P Parameter: Treatment Value: Drought vs. No Drought
  misc_feature: MA Experiment ID: 20001555 Result: Down-regulated in Transcription
  misc_feature: MA Experiment 20001555 PARAMETER Experiment Name: At_Drought_Soil_Dry_P Parameter: Age (day) Value: 24
  misc_feature: MA Experiment 20001555 PARAMETER Experiment Name: At_Drought_Soil_Dry_P Parameter: Organism Value: A. thaliana
  misc_feature: MA Experiment 20001555 PARAMETER Experiment Name: At_Drought_Soil_Dry_P Parameter: Plant Line Value: WS
  misc_feature: MA Experiment 20001555 PARAMETER Experiment Name: At_Drought_Soil_Dry_P Parameter: Post Timepoint (hr) Value: None
  misc_feature: MA Experiment 20001555 PARAMETER Experiment Name: At_Drought_Soil_Dry_P Parameter: Post-Treatment Value: None
  misc_feature: MA Experiment 20001555 PARAMETER Experiment Name: At_Drought_Soil_Dry_P Parameter: Timepoint (day) Value: 10
  misc_feature: MA Experiment 20001555 PARAMETER Experiment Name: At_Drought_Soil_Dry_P Parameter: Treatment Value: Drought vs. No Drought
  misc_feature: MA Experiment ID: 20001556 Result: Down-regulated in Transcription
  misc_feature: MA Experiment 20001556 PARAMETER Experiment Name: At_Drought_Soil_Dry_P Parameter: Age (day) Value: 26
  misc_feature: MA Experiment 20001556 PARAMETER Experiment Name: At_Drought_Soil_Dry_P Parameter: Organism Value: A. thaliana
  misc_feature: MA Experiment 20001556 PARAMETER Experiment Name: At_Drought_Soil_Dry_P Parameter: Plant Line Value: WS
  misc_feature: MA Experiment 20001556 PARAMETER Experiment Name: At_Drought_Soil_Dry_P Parameter: Post Timepoint (hr) Value: None
  misc_feature: MA Experiment 20001556 PARAMETER Experiment Name: At_Drought_Soil_Dry_P Parameter: Post-Treatment Value: None
  misc_feature: MA Experiment 20001556 PARAMETER Experiment Name: At_Drought_Soil_Dry_P Parameter: Timepoint (day) Value: 12
  misc_feature: MA Experiment 20001556 PARAMETER Experiment Name: At_Drought_Soil_Dry_P Parameter: Treatment Value: Drought vs. No Drought
  misc_feature: MA Experiment ID: 20001557 Result: Up-regulated in Transcription
  misc_feature: MA Experiment 20001557 PARAMETER Experiment Name: At_Drought_Soil_Dry_P Parameter: Age (day) Value: 27
  misc_feature: MA Experiment 20001557 PARAMETER Experiment Name: At_Drought_Soil_Dry_P Parameter: Organism Value: A. thaliana
  misc_feature: MA Experiment 20001557 PARAMETER Experiment Name: At_Drought_Soil_Dry_P Parameter: Plant Line Value: WS
  misc_feature: MA Experiment 20001557 PARAMETER Experiment Name: At_Drought_Soil_Dry_P Parameter: Post Timepoint (hr) Value: 3
  misc_feature: MA Experiment 20001557 PARAMETER Experiment Name: At_Drought_Soil_Dry_P Parameter: Post-Treatment Value: Re-Water vs. No Drought
  misc_feature: MA Experiment 20001557 PARAMETER Experiment Name: At_Drought_Soil_Dry_P Parameter: Timepoint (day) Value: 13
  misc_feature: MA Experiment 20001557 PARAMETER Experiment Name: At_Drought_Soil_Dry_P Parameter: Treatment Value: Drought vs. No Drought
  misc_feature: MA Experiment ID: 20001558 Result: Up-regulated in Transcription
  misc_feature: MA Experiment 20001558 PARAMETER Experiment Name: At_Drought_Soil_Dry_P Parameter: Age (day) Value: 27
  misc_feature: MA Experiment 20001558 PARAMETER Experiment Name: At_Drought_Soil_Dry_P Parameter: Organism Value: A. thaliana
  misc_feature: MA Experiment 20001558 PARAMETER Experiment Name: At_Drought_Soil_Dry_P Parameter: Plant Line Value: WS
  misc_feature: MA Experiment 20001558 PARAMETER Experiment Name: At_Drought_Soil_Dry_P Parameter: Post Timepoint (hr) Value: 6
  misc_feature: MA Experiment 20001558 PARAMETER Experiment Name: At_Drought_Soil_Dry_P Parameter: Post-Treatment Value: Re-Water vs. No Drought
  misc_feature: MA Experiment 20001558 PARAMETER Experiment Name: At_Drought_Soil_Dry_P Parameter: Timepoint (day) Value: 13
  misc_feature: MA Experiment 20001558 PARAMETER Experiment Name: At_Drought_Soil_Dry_P Parameter: Treatment Value: Drought vs. No Drought
  misc_feature: MA Experiment ID: 20001560 Result: Down-regulated in Transcription
  misc_feature: MA Experiment 20001560 PARAMETER Experiment Name: At_Drought_Soil_Dry_P Parameter: Age (day) Value: 28
  misc_feature: MA Experiment 20001560 PARAMETER Experiment Name: At_Drought_Soil_Dry_P Parameter: Organism Value: A. thaliana
  misc_feature: MA Experiment 20001560 PARAMETER Experiment Name: At_Drought_Soil_Dry_P Parameter: Plant Line Value: WS
  misc_feature: MA Experiment 20001560 PARAMETER Experiment Name: At_Drought_Soil_Dry_P Parameter: Post Timepoint (hr) Value: None
  misc_feature: MA Experiment 20001560 PARAMETER Experiment Name: At_Drought_Soil_Dry_P Parameter: Post-Treatment Value: None
  misc_feature: MA Experiment 20001560 PARAMETER Experiment Name: At_Drought_Soil_Dry_P Parameter: Timepoint (day) Value: 14
  misc_feature: MA Experiment 20001560 PARAMETER Experiment Name: At_Drought_Soil_Dry_P Parameter: Treatment Value: Drought vs. No Drought
  misc_feature: MA Experiment ID: 20001755 Result: Up-regulated in Transcription
  misc_feature: MA Experiment 20001755 PARAMETER Experiment Name: At_50mM_NH4NO3_L-to-H_P Parameter: Timepoint (hr) Value: 2
  misc_feature: MA Experiment 20001755 PARAMETER Experiment Name: At_50mM_NH4NO3_L-to-H_P Parameter: Tissue Value: Leaf
  misc_feature: MA Experiment 20001755 PARAMETER Experiment Name: At_50mM_NH4NO3_L-to-H_P Parameter: Treatment Value: 50mM NH4NO3 vs 100mM Mannitol
  misc_feature: MA Experiment ID: 20001757 Result: Up-regulated in Transcription
  misc_feature: MA Experiment 20001757 PARAMETER Experiment Name: At_50mM_NH4NO3_L-to-H_P Parameter: Timepoint (hr) Value: 6
  misc_feature: MA Experiment 20001757 PARAMETER Experiment Name: At_50mM_NH4NO3_L-to-H_P Parameter: Tissue Value: Leaf
  misc_feature: MA Experiment 20001757 PARAMETER Experiment Name: At_50mM_NH4NO3_L-to-H_P Parameter: Treatment Value: 50mM NH4NO3 vs 100mM Mannitol
  misc_feature: MA Experiment ID: 20001905 Result: Down-regulated in Transcription
  misc_feature: MA Experiment 20001905 PARAMETER Experiment Name: At_Drought_Reproduction_P Parameter: Age (day) Value: 40
  misc_feature: MA Experiment 20001905 PARAMETER Experiment Name: At_Drought_Reproduction_P Parameter: Organism Value: A. thaliana
  misc_feature: MA Experiment 20001905 PARAMETER Experiment Name: At_Drought_Reproduction_P Parameter: Plant Line Value: WS
  misc_feature: MA Experiment 20001905 PARAMETER Experiment Name: At_Drought_Reproduction_P Parameter: Timepoint (day) Value: 10
  misc_feature: MA Experiment 20001905 PARAMETER Experiment Name: At_Drought_Reproduction_P Parameter: Tissue Value: Rosettes
  misc_feature: MA Experiment 20001905 PARAMETER Experiment Name: At_Drought_Reproduction_P Parameter: Treatment Value: Drought vs. No Drought
ccaattctaaaccaaacaacagattctcataatcatctcttcttttttcctctttacgaaaagaagaaagatcaaaccttccaagtaatcattttctttctctctctcacacacacacattcactagttttagcttcacaaaatgtgatctaacttcatttacctatatgcaggtttacacaaaaagaaaaaagaacgatggctcttgtcaccttcttgtttattgctacccttggagcaatgacgtcacatgtcaatggttacgccggaggaggttgggtcaacgcacacgccacattctacggtggtggtgatgcttccggcacaatgggaggtgcttgtggatacggaaacctatatagccaaggctatggaaccaacacggcggcgctaagcacggctctattcaataatggtctaagttgtggtgcttgcttcgagataagatgtcaaaacgatggaaaatggtgtcttcctggctcaattgtcgtcacagccacaaacttttgccctcctaacaacgccttaccgaacaacgcaggaggttggtgtaaccctcctcagcagcattttgatctctctcagcccgtatttcaacgcatcgctcaatacagagccggcattgtccccgtcgcttaccgaagagtgccgtgcgtgagaagaggaggaataaggtttacgataaacggacactcttacttcaacctagttctgatcactaacgtcggaggagccggagatgttcactcagcgatggttaaaggttcaagaactggatggcaagcgatgtcaagaaactggggacagaactggcagagtaactcttaccttaacggacaatctctctcattcaaagttacaacaagcgatggccaaaccattgtctctaacaacgttgctaacgcaggctggtctttcggccagaccttcacaggtgcgcagctacgttaggaagagtgattcggtgaaaattcatctcattgatcgtgtggtattgacgtgttgtagtagaagcagttagagagaggggcatgatagtaatttggtcctttctttcaattgaggtttacctaaaaagaagtggtgcttcgagtgcttgattttgcacgaggccttgatgatgtcatcttttgggaaccttttcttatctttcttcatttttattggtaaggttttatgttatactgatgcagaggtggtattgagttgaagtaccacccgctagtagtagtagtctctcatgtcatttgtatcccttctcgaagcgagagggagagttttagatttttattaatctcgttaaagtcatttgtatgttgtaaatttttcaatttctacaagtaagaaatattggagatttgtttgtt

SEQ ID NO: 36767 - protein, 250 aa, Arabidopsis thaliana; identical to SEQ ID NO: 24990
  peptide (1)..(250): Ceres Seq. ID no. 12580252
  misc_feature (158)..(235): Pfam Name: Pollen allergen Pfam Description: Pollen allergen
  misc_feature (1)..(250): Homolog of NCBI NO: 21553381 NR Description: alpha-expansin 10 precursor (At-EXP10) (AtEx10)
  misc_feature (1)..(250): Homolog of NCBI NO: 10180019 NR Description: expansin 2 [Prunus avium]
  misc_feature (1)..(250): Homolog of NCBI NO: 29466641 NR Description: expansin [Prunus persica]
  misc_feature (1)..(250): Homolog of NCBI NO: 17484121 NR Description: alpha-expansin [Prunus cerasus]
  misc_feature (1)..(250): Homolog of NCBI NO: 29467507 NR Description: expansin [Pyrus communis]
  misc_feature (1)..(250): Homolog of NCBI NO: 15223347 NR Description: expansin, putative
  misc_feature (1)..(250): Homolog of NCBI NO: 38046730 NR Description: alpha-expansin 3 [Populus tremula x Populus
  misc_feature (19)..(250): Homolog of NCBI NO: 11281293 NR Description: expansin EXP1 [imported] - Arabidopsis thaliana
  misc_feature (1)..(250): Homolog of NCBI NO: 15222356 NR Description: expansin (At-EXP1)
  misc_feature (1)..(250): Homolog of NCBI NO: 30697882 NR Description: expansin, putative (EXP1) [Arabidopsis thaliana]

SEQ ID NO: 36768 - protein, 236 aa, Arabidopsis thaliana; identical to SEQ ID NO: 24991
  peptide (1)..(236): Ceres Seq. ID no. 12580253
  misc_feature (144)..(221): Pfam Name: Pollen allergen Pfam Description: Pollen allergen
  misc_feature (1)..(236): Homolog of NCBI NO: 21553381 NR Description: alpha-expansin 10 precursor (At-EXP10) (AtEx10)
  misc_feature (1)..(236): Homolog of NCBI NO: 10180019 NR Description: expansin 2 [Prunus avium]
  misc_feature (1)..(236): Homolog of NCBI NO: 29466641 NR Description: expansin [Prunus persica]
  misc_feature (1)..(236): Homolog of NCBI NO: 17484121 NR Description: alpha-expansin [Prunus cerasus]
  misc_feature (1)..(236): Homolog of NCBI NO: 29467507 NR Description: expansin [Pyrus communis]
  misc_feature (1)..(236): Homolog of NCBI NO: 15223347 NR Description: expansin, putative
  misc_feature (1)..(236): Homolog of NCBI NO: 38046730 NR Description: alpha-expansin 3 [Populus tremula x Populus
  misc_feature (5)..(236): Homolog of NCBI NO: 11281293 NR Description: expansin EXP1 [imported] - Arabidopsis thaliana
  misc_feature (1)..(236): Homolog of NCBI NO: 15222356 NR Description: expansin (At-EXP1)
  misc_feature (1)..(236): Homolog of NCBI NO: 30697882 NR Description: expansin, putative (EXP1) [Arabidopsis thaliana]

SEQ ID NO: 36769 - protein, 207 aa, Arabidopsis thaliana; identical to SEQ ID NO: 24992
  peptide (1)..(207): Ceres Seq. ID no. 12580254
  misc_feature (115)..(192): Pfam Name: Pollen allergen Pfam Description: Pollen allergen
  misc_feature (1)..(207): Homolog of NCBI NO: 21553381 NR Description: alpha-expansin 10 precursor (At-EXP10) (AtEx10)
  misc_feature (1)..(207): Homolog of NCBI NO: 10180019 NR Description: expansin 2 [Prunus avium]
  misc_feature (1)..(207): Homolog of NCBI NO: 29466641 NR Description: expansin [Prunus persica]
  misc_feature (1)..(207): Homolog of NCBI NO: 17484121 NR Description: alpha-expansin [Prunus cerasus]
  misc_feature (1)..(207): Homolog of NCBI NO: 29467507 NR Description: expansin [Pyrus communis]
  misc_feature (1)..(207): Homolog of NCBI NO: 15223347 NR Description: expansin, putative
  misc_feature (1)..(207): Homolog of NCBI NO: 38046730 NR Description: alpha-expansin 3 [Populus tremula x Populus
  misc_feature (1)..(207): Homolog of NCBI NO: 11281293 NR Description: expansin EXP1 [imported] - Arabidopsis thaliana
  misc_feature (1)..(207): Homolog of NCBI NO: 15222356 NR Description: expansin (At-EXP1)
  misc_feature (1)..(207): Homolog of NCBI NO: 30697882 NR Description: expansin, putative (EXP1) [Arabidopsis thaliana]

SEQ ID NO: 36770 - DNA, 927 bp, Arabidopsis thaliana
  misc_feature (1)..(927): Ceres Seq. ID no. 13501390
  misc_feature: MA Experiment ID: 20000180 Result: Down-regulated in Transcription
  misc_feature: MA Experiment 20000180 PARAMETER Experiment Name: At_Germinating_Seeds_P Parameter: Age (hr) Value: 24 vs. 0
  misc_feature: MA Experiment 20000180 PARAMETER Experiment Name: At_Germinating_Seeds_P Parameter: Tissue Value: Germinating Seeds
  misc_feature: MA Experiment ID: 20001557 Result: Up-regulated in Transcription
  misc_feature: MA Experiment 20001557 PARAMETER Experiment Name: At_Drought_Soil_Dry_P Parameter: Age (day) Value: 27
  misc_feature: MA Experiment 20001557 PARAMETER Experiment Name: At_Drought_Soil_Dry_P Parameter: Organism Value: A. thaliana
  misc_feature: MA Experiment 20001557 PARAMETER Experiment Name: At_Drought_Soil_Dry_P Parameter: Plant Line Value: WS
  misc_feature: MA Experiment 20001557 PARAMETER Experiment Name: At_Drought_Soil_Dry_P Parameter: Post Timepoint (hr) Value: 3
  misc_feature: MA Experiment 20001557 PARAMETER Experiment Name: At_Drought_Soil_Dry_P Parameter: Post-Treatment Value: Re-Water vs. No Drought
  misc_feature: MA Experiment 20001557 PARAMETER Experiment Name: At_Drought_Soil_Dry_P Parameter: Timepoint (day) Value: 13
  misc_feature: MA Experiment 20001557 PARAMETER Experiment Name: At_Drought_Soil_Dry_P Parameter: Treatment Value: Drought vs. No Drought
  misc_feature: MA Experiment ID: 20001558 Result: Up-regulated in Transcription
  misc_feature: MA Experiment 20001558 PARAMETER Experiment Name: At_Drought_Soil_Dry_P Parameter: Age (day) Value: 27
  misc_feature: MA Experiment 20001558 PARAMETER Experiment Name: At_Drought_Soil_Dry_P Parameter: Organism Value: A. thaliana
  misc_feature: MA Experiment 20001558 PARAMETER Experiment Name: At_Drought_Soil_Dry_P Parameter: Plant Line Value: WS
  misc_feature: MA Experiment 20001558 PARAMETER Experiment Name: At_Drought_Soil_Dry_P Parameter: Post Timepoint (hr) Value: 6
  misc_feature: MA Experiment 20001558 PARAMETER Experiment Name: At_Drought_Soil_Dry_P Parameter: Post-Treatment Value: Re-Water vs. No Drought
  misc_feature: MA Experiment 20001558 PARAMETER Experiment Name: At_Drought_Soil_Dry_P Parameter: Timepoint (day) Value: 13
  misc_feature: MA Experiment 20001558 PARAMETER Experiment Name: At_Drought_Soil_Dry_P Parameter: Treatment Value: Drought vs. No Drought
  misc_feature: MA Experiment ID: 20001560 Result: Up-regulated in Transcription
  misc_feature: MA Experiment 20001560 PARAMETER Experiment Name: At_Drought_Soil_Dry_P Parameter: Age (day) Value: 28
  misc_feature: MA Experiment 20001560 PARAMETER Experiment Name: At_Drought_Soil_Dry_P Parameter: Organism Value: A. thaliana
  misc_feature: MA Experiment 20001560 PARAMETER Experiment Name: At_Drought_Soil_Dry_P Parameter: Plant Line Value: WS
  misc_feature: MA Experiment 20001560 PARAMETER Experiment Name: At_Drought_Soil_Dry_P Parameter: Post Timepoint (hr) Value: None
  misc_feature: MA Experiment 20001560 PARAMETER Experiment Name: At_Drought_Soil_Dry_P Parameter: Post-Treatment Value: None
  misc_feature: MA Experiment 20001560 PARAMETER Experiment Name: At_Drought_Soil_Dry_P Parameter: Timepoint (day) Value: 14
  misc_feature: MA Experiment 20001560 PARAMETER Experiment Name: At_Drought_Soil_Dry_P Parameter: Treatment Value: Drought vs. No Drought
aatcttcatctccgtcgatctccattgatctctaacactaaaattctactactcttcactttctacagcttaggaagagttctcgacaagctgattcttcgagttctcgacaagtttcagtgtttttgtttccgggtcacagagaacaaaggcaatttacaataatggcagagactaaacaaccactgatcggtcttaaatgggaaccaaagcttccaggcttatccttagacttgaaaactggttcaaccagaagcaaaacagctgagagttctaagtcagagcttgttgatggtctttgtcttccacctaatgatccaaggaagattaacaagatgattagaaaacaactcaaagacactactggttctaactggtttgatatgcctgctccaacaatgactcctgagttgaaaagagatcttcagttgcttaagttgagaactgtaatggatcctgctctacactacaagaaatctgtgtcacggtctaaactagctgaaaaatatttccagattggtacagtaattgaaccagctgaagagttttatgggagattgacaaagaagaatagaaaagcaactcttgctgatgagttggtttcagatcctaaaactgctctctacaggaagcgtaaagttagggagattgaggagaagagtagagctgttacgaataagaaatggaataaaaagggaaaccagtctaagaacacaaagccaagaaggaactgaattatttttgttaagagtatgatcatagttttgggacacattttttctatttttaatagaatatggtcatagtattggatacactttcttgcggtgatataggttgtaatgactcttgttgtttatggcctttgtttaaaggattttgtgttattggttacacctttgataactgtaataactcttgttgttt

SEQ ID NO: 36771 - protein, 189 aa, Arabidopsis thaliana
  peptide (1)..(189): Ceres Seq. ID no. 13501391
  misc_feature (24)..(185): Homolog of NCBI NO: 6323080 NR Description: Protein required for cell viability; Ylr051cp
  misc_feature (60)..(188): Homolog of NCBI NO: 39580393 NR Description: Hypothetical protein CBG17763 [Caenorhabditis
  misc_feature (57)..(189): Homolog of NCBI NO: 17537287 NR Description: Acidic protein mRNA (29.6 kD) [Caenorhabditis
  misc_feature (46)..(177): Homolog of NCBI NO: 24418931 NR Description: expressed sequence AA408582 [Mus musculus]
  misc_feature (46)..(177): Homolog of NCBI NO: 34859943 NR Description: similar to expressed sequence AA408582 [Rattus
  misc_feature (46)..(177): Homolog of NCBI NO: 8218113 NR Description: dJ561L24.2 (acidic 82 kDa protein) [Homo sapiens]
  misc_feature (60)..(186): Homolog of NCBI NO: 19114999 NR Description: hypothetical protein [Schizosaccharomyces pombe]
  misc_feature (1)..(189): Homolog of NCBI NO: 25405768 NR Description: T22H22.18 [imported] - Arabidopsis thaliana
  misc_feature (1)..(189): Homolog of NCBI NO: 30692242 NR Description: expressed protein [Arabidopsis thaliana]
  misc_feature (1)..(189): Homolog of NCBI NO: 15221891 NR Description: expressed protein [Arabidopsis thaliana]
MAETKQPLIGLKWEPKLPGLSLDLKTGSTRSKTAESSKSELVDGLCLPPNDPRKINKMIRKQLKDTTGSNWFDMPAPTMTPELKRDLQLLKLRTVMDPALHYKKSVSRSKLAEKYFQIGTVIEPAEEFYGRLTKKNRKATLADELVSDPKTALYRKRKVREIEEKSRAVTNKKWNKKGNQSKNTKPRRN

SEQ ID NO: 36772 - protein, 132 aa, Arabidopsis thaliana
  peptide (1)..(132): Ceres Seq. ID no. 13501392
  misc_feature (1)..(128): Homolog of NCBI NO: 6323080 NR Description: Protein required for cell viability; Ylr051cp
  misc_feature (3)..(131): Homolog of NCBI NO: 39580393 NR Description: Hypothetical protein CBG17763 [Caenorhabditis
  misc_feature (1)..(132): Homolog of NCBI NO: 17537287 NR Description: Acidic protein mRNA (29.6 kD) [Caenorhabditis
  misc_feature (1)..(120): Homolog of NCBI NO: 24418931 NR Description: expressed sequence AA408582 [Mus musculus]
  misc_feature (1)..(120): Homolog of NCBI NO: 34859943 NR Description: similar to expressed sequence AA408582 [Rattus
  misc_feature (1)..(120): Homolog of NCBI NO: 8218113 NR Description: dJ561L24.2 (acidic 82 kDa protein) [Homo sapiens]
  misc_feature (3)..(129): Homolog of NCBI NO: 19114999 NR Description: hypothetical protein [Schizosaccharomyces pombe]
  misc_feature (1)..(132): Homolog of NCBI NO: 25405768 NR Description: T22H22.18 [imported] - Arabidopsis thaliana
  misc_feature (1)..(132): Homolog of NCBI NO: 30692242 NR Description: expressed protein [Arabidopsis thaliana]
  misc_feature (1)..(132): Homolog of NCBI NO: 15221891 NR Description: expressed protein [Arabidopsis thaliana]
MIRKQLKDTTGSNWFDMPAPTMTPELKRDLQLLKLRTVMDPALHYKKSVSRSKLAEKYFQIGTVIEPAEEFYGRLTKKNRKATLADELVSDPKTALYRKRKVREIEEKSRAVTNKKWNKKGNQSKNTKPRRN

SEQ ID NO: 36773 - protein, 116 aa, Arabidopsis thaliana
  peptide (1)..(116): Ceres Seq. ID no. 13501393
  misc_feature (1)..(112): Homolog of NCBI NO: 6323080 NR Description: Protein required for cell viability; Ylr051cp
  misc_feature (1)..(115): Homolog of NCBI NO: 39580393 NR Description: Hypothetical protein CBG17763 [Caenorhabditis
  misc_feature (1)..(116): Homolog of NCBI NO: 17537287 NR Description: Acidic protein mRNA (29.6 kD) [Caenorhabditis
  misc_feature (1)..(104): Homolog of NCBI NO: 24418931 NR Description: expressed sequence AA408582 [Mus musculus]
  misc_feature (1)..(104): Homolog of NCBI NO: 34859943 NR Description: similar to expressed sequence AA408582 [Rattus
  misc_feature (1)..(104): Homolog of NCBI NO: 8218113 NR Description: dJ561L24.2 (acidic 82 kDa protein) [Homo sapiens]
  misc_feature (1)..(113): Homolog of NCBI NO: 19114999 NR Description: hypothetical protein [Schizosaccharomyces pombe]
  misc_feature (1)..(116): Homolog of NCBI NO: 25405768 NR Description: T22H22.18 [imported] - Arabidopsis thaliana
  misc_feature (1)..(116): Homolog of NCBI NO: 30692242 NR Description: expressed protein [Arabidopsis thaliana]
  misc_feature (1)..(116): Homolog of NCBI NO: 15221891 NR Description: expressed protein [Arabidopsis thaliana]
MPAPTMTPELKRDLQLLKLRTVMDPALHYKKSVSRSKLAEKYFQIGTVIEPAEEFYGRLTKKNRKATLADELVSDPKTALYRKRKVREIEEKSRAVTNKKWNKKGNQSKNTKPRRN

SEQ ID NO: 36774 - DNA, 646 bp, Arabidopsis thaliana
  misc_feature (1)..(646): Ceres Seq. ID no. 13496920
  misc_feature: MA Experiment ID: 108569 Result: Down-regulated in Transcription
  misc_feature: MA Experiment 108569 PARAMETER Experiment Name: At_0.001%_MeJA__cDNA_P Parameter: Timepoint (hr) Value: 6
  misc_feature: MA Experiment 108569 PARAMETER Experiment Name: At_0.001%_MeJA__cDNA_P Parameter: Tissue Value: Aerial
  misc_feature: MA Experiment 108569 PARAMETER Experiment Name: At_0.001%_MeJA__cDNA_P Parameter: Treatment Value: 0.001% MeJA vs. No Treatment
  misc_feature: MA Experiment ID: 108668 Result: Up-regulated in Transcription
  misc_feature: MA Experiment 108668 PARAMETER Experiment Name: At_2mM_SA_cDNA_P Parameter: Plant Line Value: WS
  misc_feature: MA Experiment 108668 PARAMETER Experiment Name: At_2mM_SA_cDNA_P Parameter: Timepoint (hr) Value: 6
  misc_feature: MA Experiment 108668 PARAMETER Experiment Name: At_2mM_SA_cDNA_P Parameter: Treatment Value: 2mM SA vs. No Treatment
  misc_feature: MA Experiment ID: 20000173 Result: Up-regulated in Transcription
  misc_feature: MA Experiment 20000173 PARAMETER Experiment Name: At_42deg_Heat_P Parameter: Age (day) Value: 14
  misc_feature: MA Experiment 20000173 PARAMETER Experiment Name: At_42deg_Heat_P Parameter: Organism Value: A. thaliana
  misc_feature: MA Experiment 20000173 PARAMETER Experiment Name: At_42deg_Heat_P Parameter: Plant Line Value: WS
  misc_feature: MA Experiment 20000173 PARAMETER Experiment Name: At_42deg_Heat_P Parameter: Temperature (deg C) Value: 42 vs. 22
  misc_feature: MA Experiment 20000173 PARAMETER Experiment Name: At_42deg_Heat_P Parameter: Timepoint (hr) Value: 6
  misc_feature: MA Experiment 20000173 PARAMETER Experiment Name: At_42deg_Heat_P Parameter: Tissue Value: Aerial
  misc_feature: MA Experiment ID: 20000182 Result: Up-regulated in Transcription
  misc_feature: MA Experiment 20000182 PARAMETER Experiment Name: At_2mM_SA_P Parameter: Age (day) Value: 14
  misc_feature: MA Experiment 20000182 PARAMETER Experiment Name: At_2mM_SA_P Parameter: Organism Value: A. thaliana
  misc_feature: MA Experiment 20000182 PARAMETER Experiment Name: At_2mM_SA_P Parameter: Plant Line Value: WS
  misc_feature: MA Experiment 20000182 PARAMETER Experiment Name: At_2mM_SA_P Parameter: Timepoint (hr) Value: 6
  misc_feature: MA Experiment 20000182 PARAMETER Experiment Name: At_2mM_SA_P Parameter: Tissue Value: Aerial
  misc_feature: MA Experiment 20000182 PARAMETER Experiment Name: At_2mM_SA_P Parameter: Treatment Value: 2mM SA vs. No Treatment
  misc_feature: MA Experiment ID: 20000184 Result: Down-regulated in Transcription
  misc_feature: MA Experiment 20000184 PARAMETER Experiment Name: At_Shoots__P Parameter: Age (day) Value: 7
  misc_feature: MA Experiment 20000184 PARAMETER Experiment Name: At_Shoots__P Parameter: Tissue Value: Shoots vs. Whole Plant
  misc_feature: MA Experiment ID: 20000227 Result: Down-regulated in Transcription
  misc_feature: MA Experiment 20000227 PARAMETER Experiment Name: At_Root-Tips-vs-Tops_P Parameter: Tissue Value: Root Tips vs. Root Tops
atccgattttatttgtttgataagttcgtgtcgtcttcgtctctctaacccaattctgtggtgtctgaagaaagcagaatcaaatcctttctttcagaggacttagcaggccaaatgcaatatctggaatgggtgttgcagatgagagcaaaaccacatttctagagcttcaaaggaaaaaaactcatcgctatgtggtcttcaagattgatgaatccaaaaaagaagttgttgttgagaaaactggaaatcctacagagagctacgatgatttcttagcttcacttcctgataatgactgcagatacgctgtttatgactttgatttcgttacttctgagaattgtcaaaagagcaaaatcttcttctttgcttggtctccttcgacctctggaattcgagccaaggtgctttactcgacttctaaagaccagttaagtagggagcttcaagggattcactatgagattcaagctactgatcctactgaggttgatcttgaagtgttacgcgaacgagcgaactgagagcaagcaagattgctatgtctattcaaaacttatggtaatgtaatgaataattcgtattctctgtggattgatttgtgtaaacacagtttcatgttctatgtcaaactgtataaccg

SEQ ID NO: 36775 - protein, 132 aa, Arabidopsis thaliana; identical to SEQ ID NO: 28359
  peptide (1)..(132): Ceres Seq. ID no. 13496921
  misc_feature (5)..(132): Pfam Name: Cofilin/tropomyosin-type actin-binding protein Pfam Description: Cofilin/tropomyosin-type actin-binding protein
  misc_feature (3)..(132): Homolog of NCBI NO: 37536154 NR Description: putative actin depolymerizing factor
  misc_feature (1)..(132): Homolog of NCBI NO: 30697300 NR Description: actin depolymerizing factor 4 - like protein
  misc_feature (1)..(132): Homolog of NCBI NO: 17366768 NR Description: Actin-depolymerizing factor 1 (ADF 1)
  misc_feature (1)..(132): Homolog of NCBI NO: 34897072 NR Description: putative actin-depolymerizing factor
  misc_feature (1)..(131): Homolog of NCBI NO: 7330254 NR Description: actin depolymerizing factor [Elaeis guineensis]
  misc_feature (1)..(131): Homolog of NCBI NO: 24745620 NR Description: actin depolymerizing factor 6 [Solanum tuberosum]
  misc_feature (1)..(132): Homolog of NCBI NO: 4566614 NR Description: actin depolymerizing factor [Populus x canescens]
  misc_feature (1)..(132): Homolog of NCBI NO: 25295741 NR Description: actin depolymerizing factor 6 [imported] -
  misc_feature (1)..(132): Homolog of NCBI NO: 21554405 NR Description: Actin-depolymerizing factor ADF-6 [Arabidopsis
  misc_feature (1)..(132): Homolog of NCBI NO: 18402587 NR Description: actin depolymerizing factor 6 [Arabidopsis

SEQ ID NO: 36776 - DNA, 1674 bp, Arabidopsis thaliana
  misc_feature (1)..(1674): Ceres Seq. ID no. 12482626
  misc_feature: MA Experiment ID: 108462 Result: Up-regulated in Transcription
  misc_feature: MA Experiment 108462 PARAMETER Experiment Name: At_Germinating_Seeds_cDNA_P Parameter: Age (day) Value: 2 vs. 0
  misc_feature: MA Experiment 108462 PARAMETER Experiment Name: At_Germinating_Seeds_cDNA_P Parameter: Tissue Value: Germinating Seeds
  misc_feature: MA Experiment ID: 108463 Result: Up-regulated in Transcription
  misc_feature: MA Experiment 108463 PARAMETER Experiment Name: At_Germinating_Seeds_cDNA_P Parameter: Age (day) Value: 3 vs. 0
  misc_feature: MA Experiment 108463 PARAMETER Experiment Name: At_Germinating_Seeds_cDNA_P Parameter: Tissue Value: Germinating Seeds
  misc_feature: MA Experiment ID: 108576 Result: Down-regulated in Transcription
  misc_feature: MA Experiment 108576 PARAMETER Experiment Name: At_42deg_Heat_cDNA_P Parameter: Temperature (deg C) Value: 42 vs. 22
  misc_feature: MA Experiment 108576 PARAMETER Experiment Name: At_42deg_Heat_cDNA_P Parameter: Timepoint (hr) Value: 1
  misc_feature: MA Experiment 108576 PARAMETER Experiment Name: At_42deg_Heat_cDNA_P Parameter: Tissue Value: Aerial
  misc_feature: MA Experiment ID: 108585 Result: Down-regulated in Transcription
  misc_feature: MA Experiment 108585 PARAMETER Experiment Name: At_5mM_NaNP_cDNA_P Parameter: Timepoint (hr) Value: 6
  misc_feature: MA Experiment 108585 PARAMETER Experiment Name: At_5mM_NaNP_cDNA_P Parameter: Tissue Value: Aerial
  misc_feature: MA Experiment 108585 PARAMETER Experiment Name: At_5mM_NaNP_cDNA_P Parameter: Treatment Value: null
  misc_feature: MA Experiment ID: 108595 Result: Down-regulated in Transcription
  misc_feature: MA Experiment 108595 PARAMETER Experiment Name: At_Ler-pi_Ovule_cDNA_P Parameter: Plant Line Value: null
  misc_feature: MA Experiment ID: 20000089 Result: Down-regulated in Transcription
  misc_feature: MA Experiment ID: 20000090 Result: Down-regulated in Transcription
  misc_feature: MA Experiment ID: 20000166 Result: Up-regulated in Transcription
  misc_feature: MA Experiment 20000166 PARAMETER Experiment Name: At_100uM_ABA_P Parameter: Age (day) Value: 14
  misc_feature: MA Experiment 20000166 PARAMETER Experiment Name: At_100uM_ABA_P Parameter: Organism Value: A. thaliana
  misc_feature: MA Experiment 20000166 PARAMETER Experiment Name: At_100uM_ABA_P Parameter: Plant Line Value: WS
  misc_feature: MA Experiment 20000166 PARAMETER Experiment Name: At_100uM_ABA_P Parameter: Timepoint (hr) Value: 1
  misc_feature: MA Experiment 20000166 PARAMETER Experiment Name: At_100uM_ABA_P Parameter: Tissue Value: Aerial
  misc_feature: MA Experiment 20000166 PARAMETER Experiment Name: At_100uM_ABA_P Parameter: Treatment Value: 100uM ABA vs. No Treatment
  misc_feature: MA Experiment ID: 20000184 Result: Up-regulated in Transcription
  misc_feature: MA Experiment 20000184 PARAMETER Experiment Name: At_Shoots__P Parameter: Age (day) Value: 7
  misc_feature: MA Experiment 20000184 PARAMETER Experiment Name: At_Shoots__P Parameter: Tissue Value: Shoots vs. Whole Plant
  misc_feature: MA Experiment ID: 20000224 Result: Down-regulated in Transcription
  misc_feature: MA Experiment ID: 20000227 Result: Down-regulated in Transcription
  misc_feature: MA Experiment 20000227 PARAMETER Experiment Name: At_Root-Tips-vs-Tops_P Parameter: Tissue Value: Root Tips vs. Root Tops
  misc_feature: MA Experiment ID: 20000438 Result: Up-regulated in Transcription
  misc_feature: MA Experiment 20000438 PARAMETER Experiment Name: At_Shoots__P Parameter: Age (day) Value: 14
  misc_feature: MA Experiment 20000438 PARAMETER Experiment Name: At_Shoots__P Parameter: Tissue Value: Shoots vs. Whole Plant
  misc_feature: MA Experiment ID: 20001247 Result: Up-regulated in Transcription
  misc_feature: MA Experiment 20001247 PARAMETER Experiment Name: At_Far-red-induction_P Parameter: Age (day) Value: 7
  misc_feature: MA Experiment 20001247 PARAMETER Experiment Name: At_Far-red-induction_P Parameter: Light Value: Far-red vs. White
  misc_feature: MA Experiment 20001247 PARAMETER Experiment Name: At_Far-red-induction_P Parameter: Organism Value: A. thaliana
  misc_feature: MA Experiment 20001247 PARAMETER Experiment Name: At_Far-red-induction_P Parameter: Plant Line Value: Columbia
  misc_feature: MA Experiment 20001247 PARAMETER Experiment Name: At_Far-red-induction_P Parameter: Timepoint (hr) Value: 1
  misc_feature: MA Experiment 20001247 PARAMETER Experiment Name: At_Far-red-induction_P Parameter: Tissue Value: Whole Plant
  misc_feature: MA Experiment ID: 20001450 Result: Up-regulated in Transcription
  misc_feature: MA Experiment 20001450 PARAMETER Experiment Name: At_Far-red-induction_P Parameter: Age (day) Value: 7
  misc_feature: MA Experiment 20001450 PARAMETER Experiment Name: At_Far-red-induction_P Parameter: Light Value: Far-red vs. White
  misc_feature: MA Experiment 20001450 PARAMETER Experiment Name: At_Far-red-induction_P Parameter: Organism Value: A. thaliana
  misc_feature: MA Experiment 20001450 PARAMETER Experiment Name: At_Far-red-induction_P Parameter: Plant Line Value: Columbia
  misc_feature: MA Experiment 20001450 PARAMETER Experiment Name: At_Far-red-induction_P Parameter: Timepoint (hr) Value: 8
  misc_feature: MA Experiment 20001450 PARAMETER Experiment Name: At_Far-red-induction_P Parameter: Tissue Value: Whole Plant
  misc_feature: MA Experiment ID: 20001557 Result: Down-regulated in Transcription
  misc_feature: MA Experiment 20001557 PARAMETER Experiment Name: At_Drought_Soil_Dry_P Parameter: Age (day) Value: 27
  misc_feature: MA Experiment 20001557 PARAMETER Experiment Name: At_Drought_Soil_Dry_P Parameter: Organism Value: A. thaliana
  misc_feature: MA Experiment 20001557 PARAMETER Experiment Name: At_Drought_Soil_Dry_P Parameter: Plant Line Value: WS
  misc_feature: MA Experiment 20001557 PARAMETER Experiment Name: At_Drought_Soil_Dry_P Parameter: Post Timepoint (hr) Value: 3
  misc_feature: MA Experiment 20001557 PARAMETER Experiment Name: At_Drought_Soil_Dry_P Parameter: Post-Treatment Value: Re-Water vs. No Drought
  misc_feature: MA Experiment 20001557 PARAMETER Experiment Name: At_Drought_Soil_Dry_P Parameter: Timepoint (day) Value: 13
  misc_feature: MA Experiment 20001557 PARAMETER Experiment Name: At_Drought_Soil_Dry_P Parameter: Treatment Value: Drought vs. No Drought
  misc_feature: MA Experiment ID: 20001905 Result: Down-regulated in Transcription
  misc_feature: MA Experiment 20001905 PARAMETER Experiment Name: At_Drought_Reproduction_P Parameter: Age (day) Value: 40
  misc_feature: MA Experiment 20001905 PARAMETER Experiment Name: At_Drought_Reproduction_P Parameter: Organism Value: A. thaliana
  misc_feature: MA Experiment 20001905 PARAMETER Experiment Name: At_Drought_Reproduction_P Parameter: Plant Line Value: WS
  misc_feature: MA Experiment 20001905 PARAMETER Experiment Name: At_Drought_Reproduction_P Parameter: Timepoint (day) Value: 10
  misc_feature: MA Experiment 20001905 PARAMETER Experiment Name: At_Drought_Reproduction_P Parameter: Tissue Value: Rosettes
  misc_feature: MA Experiment 20001905 PARAMETER Experiment Name: At_Drought_Reproduction_P Parameter: Treatment Value: Drought vs. No Drought
agatgtaatttgtataattttagtaactcttcagtttttttttgttttaaaaatatattttctctctctctgtcttcctgcaatctatcgccggccgattcaataatttcgctttactctgccaaaaaagtttgttcttttgttttctgggattatccaaagagaagaaacagaggaaatcagtctcttttttagtttcagaccctaaatcctaggttttgaagttttgtttctttagtaattttgtcaggttttgtgtctggtgttgggatttttcggagcttggtttcttgaaccagctccattttctaaaaattccttctttaaatccccattgttgtaagtcttaaagaaaaaagaagatgacttgttgtttctcttgtttgaatcctcgaaccaaggacataagagtcgacattgataacgctcgatgcaactctcgttaccaaaccgattcatcagttcatggaagtgatacaacaggaacagagtcgatttcgggtatcttagtaaatggtaaagtgaatagtccgatacctggtggtggagctcggagcttcacgttcaaggagttagctgcagctacaagaaacttccgggaagttaatttgctcggagaaggaggttttggcagagtttataagggacgtttagattcaggacaagtagtggctattaagcaattgaatccagatgggcttcaagggaaccgagagtttatagtagaagttcttatgcttagcttattgcatcatcccaatctcgttacattgatcggttactgtacttctggtgatcaaagacttcttgtctatgaatacatgccaatgggaagcttagaagatcacctttttgatcttgagtctaatcaagaaccattaagctggaatactcgaatgaaaatcgcggttggtgcagctcgaggaatagagtatcttcactgcacagctaacccgccagtgatttaccgtgatttgaaatccgcaaacatattgttagataaagagttcagtccaaaactctcggatttcggattggcgaaactcggtccagttggtgatcgaactcatgtatcgactcgtgtcatgggaacttacggttactgtgctcctgaatacgcaatgagcgggaaattaactgttaaatcggatatctactgcttcggtgtagtgttgcttgagctgattactgggagaaaagctattgatttaggtcaaaagcaaggcgagcagaatcttgttacttggtcacgtccatacctcaaggatcagaagaagtttggacatttagtggatccgtctctacgaggaaaatacccaagacggtgtttaaactatgcgattgcgattattgcaatgtgtcttaatgaagaagctcattatcgaccgttcataggtgacatagttgtggcactagagtacttagccgcacagagcagatctcatgaagctcgaaacgtctcatcaccgtcaccagagatttcaagaacgccgcgacgagacttgtaaaaactcaaaaacagcttttaagaatttcagtttggtgttgtgtaaaaatggtttttttgtttctttctcagaaaacaatatatgtttggtaaatgtttcgttattagtctcttttacttgatgtatatggcaattatggaaacaattaaagttcttttatatgtgt

SEQ ID NO: 36777 - protein, 381 aa, Arabidopsis thaliana
  peptide (1)..(381): Ceres Seq. ID no. 12482627
  misc_feature (63)..(357): Homolog of NCBI NO: 11259782 NR Description: protein kinase-like - Arabidopsis thaliana
  misc_feature (61)..(376): Homolog of NCBI NO: 34899302 NR Description: putative protein serine/threonine kinase
  misc_feature (1)..(370): Homolog of NCBI NO: 34394036 NR Description: putative protein serine/threonine kinase BNK1
  misc_feature (4)..(358): Homolog of NCBI NO: 15240038 NR Description: protein kinase-like
  misc_feature (4)..(376): Homolog of NCBI NO: 34395193 NR Description: putative protein serine/threonine kinase
  misc_feature (1)..(381): Homolog of NCBI NO: 15238886 NR Description: protein kinase -like protein; protein id:
  misc_feature (12)..(381): Homolog of NCBI NO: 34907210 NR Description: putative serine/threonine kinase PBS1 protein
  misc_feature (4)..(378): Homolog of NCBI NO: 15223033 NR Description: putative protein kinase; protein id: At1g76370.1
  misc_feature (33)..(381): Homolog of NCBI NO: 15217992 NR Description: protein kinase, putative; protein id: At1g20650.1
  misc_feature (1)..(381): Homolog of NCBI NO: 8778594 NR Description: F5M15.3 [Arabidopsis thaliana]
MTCCFSCLNPRTKDIRVDIDNARCNSRYQTDSSVHGSDTTGTESISGILVNGKVNSPIPGGGARSFTFKELAAATRNFREVNLLGEGGFGRVYKGRLDSGQVVAIKQLNPDGLQGNREFIVEVLMLSLLHHPNLVTLIGYCTSGDQRLLVYEYMPMGSLEDHLFDLESNQEPLSWNTRMKIAVGAARGIEYLHCTANPPVIYRDLKSANILLDKEFSPKLSDFGLAKLGPVGDRTHVSTRVMGTYGYCAPEYAMSGKLTVKSDIYCFGVVLLELITGRKAIDLGQKQGEQNLVTWSRPYLKDQKKFGHLVDPSLRGKYPRRCLNYAIAIIAMCLNEEAHYRPFIGDIVVALEYLAAQSRSHEARNVSSPSPEISRTPRRDL

SEQ ID NO: 36778 - protein, 257 aa, Arabidopsis thaliana
  peptide (1)..(257): Ceres Seq. ID no. 12482628
  misc_feature (1)..(233): Homolog of NCBI NO: 11259782 NR Description: protein kinase-like - Arabidopsis thaliana
  misc_feature (1)..(252): Homolog of NCBI NO: 34899302 NR Description: putative protein serine/threonine kinase
  misc_feature (1)..(246): Homolog of NCBI NO: 34394036 NR Description: putative protein serine/threonine kinase BNK1
  misc_feature (1)..(234): Homolog of NCBI NO: 15240038 NR Description: protein kinase-like
  misc_feature (1)..(252): Homolog of NCBI NO: 34395193 NR Description: putative protein serine/threonine kinase
  misc_feature (1)..(257): Homolog of NCBI NO: 15238886 NR Description: protein kinase -like protein; protein id:
  misc_feature (1)..(257): Homolog of NCBI NO: 34907210 NR Description: putative serine/threonine kinase PBS1 protein
  misc_feature (1)..(254): Homolog of NCBI NO: 15223033 NR Description: putative protein kinase; protein id: At1g76370.1
  misc_feature (1)..(257): Homolog of NCBI NO: 15217992 NR Description: protein kinase, putative; protein id: At1g20650.1
  misc_feature (1)..(257): Homolog of NCBI NO: 8778594 NR Description: F5M15.3 [Arabidopsis thaliana]
MLSLLHHPNLVTLIGYCTSGDQRLLVYEYMPMGSLEDHLFDLESNQEPLSWNTRMKIAVGAARGIEYLHCTANPPVIYRDLKSANILLDKEFSPKLSDFGLAKLGPVGDRTHVSTRVMGTYGYCAPEYAMSGKLTVKSDIYCFGVVLLELITGRKAIDLGQKQGEQNLVTWSRPYLKDQKKFGHLVDPSLRGKYPRRCLNYAIAIIAMCLNEEAHYRPFIGDIVVALEYLAAQSRSHEARNVSSPSPEISRTPRRDL

SEQ ID NO: 36779 - protein, 228 aa, Arabidopsis thaliana
  peptide (1)..(228): Ceres Seq. ID no. 12482629
  misc_feature (1)..(204): Homolog of NCBI NO: 11259782 NR Description: protein kinase-like - Arabidopsis thaliana
  misc_feature (1)..(223): Homolog of NCBI NO: 34899302 NR Description: putative protein serine/threonine kinase
  misc_feature (1)..(217): Homolog of NCBI NO: 34394036 NR Description: putative protein serine/threonine kinase BNK1
  misc_feature (1)..(205): Homolog of NCBI NO: 15240038 NR Description: protein kinase-like
  misc_feature (1)..(223): Homolog of NCBI NO: 34395193 NR Description: putative protein serine/threonine kinase
  misc_feature (1)..(228): Homolog of NCBI NO: 15238886 NR Description: protein kinase -like protein; protein id:
  misc_feature (1)..(228): Homolog of NCBI NO: 34907210 NR Description: putative serine/threonine kinase PBS1 protein
  misc_feature (1)..(225): Homolog of NCBI NO: 15223033 NR Description: putative protein kinase; protein id: At1g76370.1
  misc_feature (1)..(228): Homolog of NCBI NO: 15217992 NR Description: protein kinase, putative; protein id: At1g20650.1
  misc_feature (1)..(228): Homolog of NCBI NO: 8778594 NR Description: F5M15.3 [Arabidopsis thaliana]
MPMGSLEDHLFDLESNQEPLSWNTRMKIAVGAARGIEYLHCTANPPVIYRDLKSANILLDKEFSPKLSDFGLAKLGPVGDRTHVSTRVMGTYGYCAPEYAMSGKLTVKSDIYCFGVVLLELITGRKAIDLGQKQGEQNLVTWSRPYLKDQKKFGHLVDPSLRGKYPRRCLNYAIAIIAMCLNEEAHYRPFIGDIVVALEYLAAQSRSHEARNVSSPSPEISRTPRRDL

SEQ ID NO: 36780 - DNA, 1690 bp, Arabidopsis thaliana
  misc_feature (1)..(1690): Ceres Seq. ID no. 12421376
  misc_feature: MA Experiment ID: 20000184 Result: Down-regulated in Transcription
  misc_feature: MA Experiment 20000184 PARAMETER Experiment Name: At_Shoots__P Parameter: Age (day) Value: 7
  misc_feature: MA Experiment 20000184 PARAMETER Experiment Name: At_Shoots__P Parameter: Tissue Value: Shoots vs. Whole Plant
  misc_feature: MA Experiment ID: 20000185 Result: Down-regulated in Transcription
  misc_feature: MA Experiment 20000185 PARAMETER Experiment Name: At_Roots__P Parameter: Age (day) Value: 7 vs. 21
  misc_feature: MA Experiment 20000185 PARAMETER Experiment Name: At_Roots__P Parameter: Organism Value: A. thaliana
  misc_feature: MA Experiment 20000185 PARAMETER Experiment Name: At_Roots__P Parameter: Tissue Value: Roots vs. Whole Plant
  misc_feature: MA Experiment ID: 20000264 Result: Up-regulated in Transcription
  misc_feature: MA Experiment 20000264 PARAMETER Experiment Name: At_Open_Flower_P Parameter: Age (day) Value: 21
  misc_feature: MA Experiment 20000264 PARAMETER Experiment Name: At_Open_Flower_P Parameter: Plant Line Value: WS
  misc_feature: MA Experiment 20000264 PARAMETER Experiment Name: At_Open_Flower_P Parameter: Tissue Value: Open Flower vs. Whole Plant
  misc_feature: MA Experiment ID: 20000265 Result: Up-regulated in Transcription
  misc_feature: MA Experiment 20000265 PARAMETER Experiment Name: At_Open_Flower_P Parameter: Age (day) Value: 21
  misc_feature: MA Experiment 20000265 PARAMETER Experiment Name: At_Open_Flower_P Parameter: Plant Line Value: WS
  misc_feature: MA Experiment 20000265 PARAMETER Experiment Name: At_Open_Flower_P Parameter: Tissue Value: Closed Flower vs. Whole Plant
  misc_feature: MA Experiment ID: 20000286 Result: Up-regulated in Transcription
  misc_feature: MA Experiment 20000286 PARAMETER Experiment Name: At_Open_Flower_P Parameter: Age (day) Value: 21
  misc_feature: MA Experiment 20000286 PARAMETER Experiment Name: At_Open_Flower_P Parameter: Plant Line Value: WS
  misc_feature: MA Experiment 20000286 PARAMETER Experiment Name: At_Open_Flower_P Parameter: Tissue Value: Half Open vs. Whole Plant
  misc_feature: MA Experiment ID: 20000438 Result: Down-regulated in Transcription
  misc_feature: MA Experiment 20000438 PARAMETER Experiment Name: At_Shoots__P Parameter: Age (day) Value: 14
  misc_feature: MA Experiment 20000438 PARAMETER Experiment Name: At_Shoots__P Parameter: Tissue Value: Shoots vs. Whole Plant
  misc_feature: MA Experiment ID: 20000439 Result: Down-regulated in Transcription
  misc_feature: MA Experiment 20000439 PARAMETER Experiment Name: At_Roots__P Parameter: Age (day) Value: 14 vs. 21
  misc_feature: MA Experiment 20000439 PARAMETER Experiment Name: At_Roots__P Parameter: Organism Value: A. thaliana
  misc_feature: MA Experiment 20000439 PARAMETER Experiment Name: At_Roots__P Parameter: Tissue Value: Roots vs. Whole Plant
  misc_feature: MA Experiment ID: 20000794 Result: Up-regulated in Transcription
  misc_feature: MA Experiment 20000794 PARAMETER Experiment Name: At_Petals_P Parameter: Age (day) Value: 23-25 days
  misc_feature: MA Experiment 20000794 PARAMETER Experiment Name: At_Petals_P Parameter: Plant Line Value: WS
  misc_feature: MA Experiment 20000794 PARAMETER Experiment Name: At_Petals_P Parameter: Tissue Value: Petals vs. Whole plant
  misc_feature: MA Experiment ID: 20001757 Result: Down-regulated in Transcription
  misc_feature: MA Experiment 20001757 PARAMETER Experiment Name: At_50mM_NH4NO3_L-to-H_P Parameter: Timepoint (hr) Value: 6
  misc_feature: MA Experiment 20001757 PARAMETER Experiment Name: At_50mM_NH4NO3_L-to-H_P Parameter: Tissue Value: Leaf
  misc_feature: MA Experiment 20001757 PARAMETER Experiment Name: At_50mM_NH4NO3_L-to-H_P Parameter: Treatment Value: 50mM NH4NO3 vs 100mM Mannitol
  misc_feature: MA Experiment ID: 20001768 Result: Up-regulated in Transcription
  misc_feature: MA Experiment 20001768 PARAMETER Experiment Name: At_Far-red-enriched-adult_P Parameter: Age (day) Value: 28
  misc_feature: MA Experiment 20001768 PARAMETER Experiment Name: At_Far-red-enriched-adult_P Parameter: Light Value: Far-red enriched vs. White
  misc_feature: MA Experiment 20001768 PARAMETER Experiment Name: At_Far-red-enriched-adult_P Parameter: Organism Value: A. thaliana
  misc_feature: MA Experiment 20001768 PARAMETER Experiment Name: At_Far-red-enriched-adult_P Parameter: Plant Line Value: Columbia
  misc_feature: MA Experiment 20001768 PARAMETER Experiment Name: At_Far-red-enriched-adult_P Parameter: Timepoint (hr) Value: 1
  misc_feature: MA Experiment 20001768 PARAMETER Experiment Name: At_Far-red-enriched-adult_P Parameter: Tissue Value: Aerial
  misc_feature: MA Experiment ID: 20001773 Result: Up-regulated in Transcription
  misc_feature: MA Experiment 20001773 PARAMETER Experiment Name: At_Far-red-enriched-adult_P Parameter: Age (day) Value: 30
  misc_feature: MA Experiment 20001773 PARAMETER Experiment Name: At_Far-red-enriched-adult_P Parameter: Light Value: Far-red enriched vs. White
  misc_feature: MA Experiment 20001773 PARAMETER Experiment Name: At_Far-red-enriched-adult_P Parameter: Organism Value: A. thaliana
  misc_feature: MA Experiment 20001773 PARAMETER Experiment Name: At_Far-red-enriched-adult_P Parameter: Plant Line Value: Columbia
  misc_feature: MA Experiment 20001773 PARAMETER Experiment Name: At_Far-red-enriched-adult_P Parameter: Timepoint (hr) Value: 48
  misc_feature: MA Experiment 20001773 PARAMETER Experiment Name: At_Far-red-enriched-adult_P Parameter: Tissue Value: Aerial
  misc_feature: MA Experiment ID: 20001909 Result: Up-regulated in Transcription
  misc_feature: MA Experiment 20001909 PARAMETER Experiment Name: At_Drought_Reproduction_P Parameter: Age (day) Value: 35
  misc_feature: MA Experiment 20001909 PARAMETER Experiment Name: At_Drought_Reproduction_P Parameter: Organism Value: A. thaliana
  misc_feature: MA Experiment 20001909 PARAMETER Experiment Name: At_Drought_Reproduction_P Parameter: Plant Line Value: WS
  misc_feature: MA Experiment 20001909 PARAMETER Experiment Name: At_Drought_Reproduction_P Parameter: Timepoint (day) Value: 5
  misc_feature: MA Experiment 20001909 PARAMETER Experiment Name: At_Drought_Reproduction_P Parameter: Tissue Value: Flowers
  misc_feature: MA Experiment 20001909 PARAMETER Experiment Name: At_Drought_Reproduction_P Parameter: Treatment Value: Drought vs. No Drought
  misc_feature: MA Experiment ID: 20001910 Result: Up-regulated in Transcription
  misc_feature: MA Experiment 20001910 PARAMETER Experiment Name: At_Drought_Reproduction_P Parameter: Age (day) Value: 37
  misc_feature: MA Experiment 20001910 PARAMETER Experiment Name: At_Drought_Reproduction_P Parameter: Organism Value: A. thaliana
  misc_feature: MA Experiment 20001910 PARAMETER Experiment Name: At_Drought_Reproduction_P Parameter: Plant Line Value: WS
  misc_feature: MA Experiment 20001910 PARAMETER Experiment Name: At_Drought_Reproduction_P Parameter: Timepoint (day) Value: 7
  misc_feature: MA Experiment 20001910 PARAMETER Experiment Name: At_Drought_Reproduction_P Parameter: Tissue Value: Flowers
  misc_feature: MA Experiment 20001910 PARAMETER Experiment Name: At_Drought_Reproduction_P Parameter: Treatment Value: Drought vs. No Drought
  misc_feature: MA Experiment ID: 20001911 Result: Up-regulated in Transcription
  misc_feature: MA Experiment 20001911 PARAMETER Experiment Name: At_Drought_Reproduction_P Parameter: Age (day) Value: 40
  misc_feature: MA Experiment 20001911 PARAMETER Experiment Name: At_Drought_Reproduction_P Parameter: Organism Value: A. thaliana
  misc_feature: MA Experiment 20001911 PARAMETER Experiment Name: At_Drought_Reproduction_P Parameter: Plant Line Value: WS
  misc_feature: MA Experiment 20001911 PARAMETER Experiment Name: At_Drought_Reproduction_P Parameter: Timepoint (day) Value: 10
  misc_feature: MA Experiment 20001911 PARAMETER Experiment Name: At_Drought_Reproduction_P Parameter: Tissue Value: Flowers
  misc_feature: MA Experiment 20001911 PARAMETER Experiment Name: At_Drought_Reproduction_P Parameter: Treatment Value: Drought vs. No Drought
atcaataaacacaaaaacaaaagaagaagagaataaacaaaagaagaaaaaaaactaataaaacaaaatcaataaaaagagaataaaaaatggtgggttctcacaaagcaagcggagtgcttcttgtgctactagtggttatggccaccacaatagcaaacgggacaccggttgtcgataaagcaaaaaatgcagctacagcagttgaagatacagcaaaaaatgcagctacagcagttggcggtgcagctgcatcagttggtgctaaagtatcaggtgccaaaccaggcgcagcagttgatgttaaagcatcaggagccaaaggagacagcaaaactgatgatagtgcggcatttgcggctgcatggaaagaagcttgtgcagcagggagcacaattacagtgccaaaaggtgagtatatggtagagagcctagagttcaaaggtccatgcaaaggtccagtcactttggaattgaatggcaatttcaaggctccggctacggtcaagaccactaagccacatgccggatggattgatttcgaaaatatagctgatttcactttgaatggaaacaaagctatttttgacggtcaagggtccctcgcttggaaggccaatgattgtgccaaaactggcaaatgcaactctctccctatcaacatccgattcactggtctaacaaactcaaagattaatagtattacatcaacaaacagcaaacttttccacatgaacatccttaactgcaagaacattactctttcggatattggtattgatgcacctccggagagtctcaacaccgatggtatccacatcggaaggtccaatggagtcaacttaattggggcaaagatcaaaaccggagatgactgcgtttccattggagatggtaccgaaaatctcattgttgagaacgtagaatgtggaccaggacacggaatttccattggaagtcttggaagataccctaatgagcaaccagtaaaaggagtcaccgtgaggaaatgcctcatcaagaacactgacaatggtgttcgcatcaagacatggccaggatctccccccggcatcgcctccaacattcttttcgaagatatcacaatggacaatgttagccttcccgttctcatcgaccaagagtactgtccttatggccactgcaaagctggggtaccatcgcaagtgaagttgtcagacgtgactatcaagggcattaagggtacatcagcaacaaaggtggctgtgaagctaatgtgcagcaaaggagtgccttgcaccaatattgctctctctgacatcaacttggtccacaacggcaaagagggaccagctgtctcggcatgttctaacatcaagcctattctcagcggaaagttggttccagcggcttgcactgaagttgctaaaccgggtccataaattaaagtcgcttgtccaccataaatccatccaatctggtgaagacgctttgattagggtgcgatgaaaaaattttgcaatatttttttgacatataaattatatggatattttatagataagacggagtccattcaggattggagtttataacctgaagagtgactcgtgaattgggtagtaattgttgtgtggattcgcatttatgcgagaatgttttaataattattcgaaaagtaataatatcattgaaattttgaagtttt

SEQ ID NO: 36781 - protein, 444 aa, Arabidopsis thaliana
  peptide (1)..(444): Ceres Seq. ID no. 12421377
  misc_feature (97)..(436): Pfam Name: Glycosyl hydrolases family 28 Pfam Description: Glycosyl hydrolases family 28
  misc_feature (84)..(437): Homolog of NCBI NO: 129941 NR Description: EXOPOLYGALACTURONASE (EXOPG) (PECTINASE)
  misc_feature (78)..(436): Homolog of NCBI NO: 6714530 NR Description: polygalacturonase [Salix gilgiana]
  misc_feature (69)..(437): Homolog of NCBI NO: 3024385 NR Description: POLYGALACTURONASE PRECURSOR (PG) (PECTINASE)
  misc_feature (61)..(437): Homolog of NCBI NO: 3024386 NR Description: POLYGALACTURONASE PRECURSOR (PG) (PECTINASE)
  misc_feature (1)..(444): Homolog of NCBI NO: 17064742 NR Description: polygalacturonase; pectinase [Arabidopsis
  misc_feature (1)..(444): Homolog of NCBI NO: 421833 NR Description: polygalacturonase (EC 3.2.1.15) [imported] -
  misc_feature (1)..(444): Homolog of NCBI NO: 3004442 NR Description: polygalacturonase [Arabidopsis thaliana]
  misc_feature (1)..(444): Homolog of NCBI NO: 15231771 NR Description: exopolygalacturonase
  misc_feature (1)..(444): Homolog of NCBI NO: 421832 NR Description: polygalacturonase (EC 3.2.1.15) [imported] -
  misc_feature (1)..(444): Homolog of NCBI NO: 15231880 NR Description: exopolygalacturonase
MVGSHKASGVLLVLLVVMATTIANGTPVVDKAKNAATAVEDTAKNAATAVGGAAASVGAKVSGAKPGAAVDVKASGAKGDSKTDDSAAFAAAWKEACAAGSTITVPKGEYMVESLEFKGPCKGPVTLELNGNFKAPATVKTTKPHAGWIDFENIADFTLNGNKAIFDGQGSLAWKANDCAKTGKCNSLPINIRFTGLTNSKINSITSTNSKLFHMNILNCKNITLSDIGIDAPPESLNTDGIHIGRSNGVNLIGAKIKTGDDCVSIGDGTENLIVENVECGPGHGISIGSLGRYPNEQPVKGVTVRKCLIKNTDNGVRIKTWPGSPPGIASNILFEDITMDNVSLPVLIDQEYCPYGHCKAGVPSQVKLSDVTIKGIKGTSATKVAVKLMCSKGVPCTNIALSDINLVHNGKEGPAVSACSNIKPILSGKLVPAACTEVAKPGP

SEQ ID NO: 36782 - protein, 427 aa, Arabidopsis thaliana
  peptide (1)..(427): Ceres Seq. ID no. 12421378
  misc_feature (80)..(419): Pfam Name: Glycosyl hydrolases family 28 Pfam Description: Glycosyl hydrolases family 28
  misc_feature (67)..(420): Homolog of NCBI NO: 129941 NR Description: EXOPOLYGALACTURONASE (EXOPG) (PECTINASE)
  misc_feature (61)..(419): Homolog of NCBI NO: 6714530 NR Description: polygalacturonase [Salix gilgiana]
  misc_feature (52)..(420): Homolog of NCBI NO: 3024385 NR Description: POLYGALACTURONASE PRECURSOR (PG) (PECTINASE)
  misc_feature (44)..(420): Homolog of NCBI NO: 3024386 NR Description: POLYGALACTURONASE PRECURSOR (PG) (PECTINASE)
  misc_feature (1)..(427): Homolog of NCBI NO: 17064742 NR Description: polygalacturonase; pectinase [Arabidopsis
  misc_feature (1)..(427): Homolog of NCBI NO: 421833 NR Description: polygalacturonase (EC 3.2.1.15) [imported] -
  misc_feature (1)..(427): Homolog of NCBI NO: 3004442 NR Description: polygalacturonase [Arabidopsis thaliana]
  misc_feature (1)..(427): Homolog of NCBI NO: 15231771 NR Description: exopolygalacturonase
  misc_feature (1)..(427): Homolog of NCBI NO: 421832 NR Description: polygalacturonase (EC 3.2.1.15) [imported] -
  misc_feature (1)..(427): Homolog of NCBI NO: 15231880 NR Description: exopolygalacturonase
MATTIANGTPVVDKAKNAATAVEDTAKNAATAVGGAAASVGAKVSGAKPGAAVDVKASGAKGDSKTDDSAAFAAAWKEACAAGSTITVPKGEYMVESLEFKGPCKGPVTLELNGNFKAPATVKTTKPHAGWIDFENIADFTLNGNKAIFDGQGSLAWKANDCAKTGKCNSLPINIRFTGLTNSKINSITSTNSKLFHMNILNCKNITLSDIGIDAPPESLNTDGIHIGRSNGVNLIGAKIKTGDDCVSIGDGTENLIVENVECGPGHGISIGSLGRYPNEQPVKGVTVRKCLIKNTDNGVRIKTWPGSPPGIASNILFEDITMDNVSLPVLIDQEYCPYGHCKAGVPSQVKLSDVTIKGIKGTSATKVAVKLMCSKGVPCTNIALSDINLVHNGKEGPAVSACSNIKPILSGKLVPAACTEVAKPGP

SEQ ID NO: 36783 - protein, 334 aa, Arabidopsis thaliana
  peptide (1)..(334): Ceres Seq. ID no. 12421379
  misc_feature (1)..(326): Pfam Name: Glycosyl hydrolases family 28 Pfam Description: Glycosyl hydrolases family 28
  misc_feature (1)..(327): Homolog of NCBI NO: 129941 NR Description: EXOPOLYGALACTURONASE (EXOPG) (PECTINASE)
  misc_feature (1)..(326): Homolog of NCBI NO: 6714530 NR Description: polygalacturonase [Salix gilgiana]
  misc_feature (1)..(327): Homolog of NCBI NO: 3024385 NR Description: POLYGALACTURONASE PRECURSOR (PG) (PECTINASE)
  misc_feature (1)..(327): Homolog of NCBI NO: 3024386 NR Description: POLYGALACTURONASE PRECURSOR (PG) (PECTINASE)
  misc_feature (1)..(334): Homolog of NCBI NO: 17064742 NR Description: polygalacturonase; pectinase [Arabidopsis
  misc_feature (1)..(334): Homolog of NCBI NO: 421833 NR Description: polygalacturonase (EC 3.2.1.15) [imported] -
  misc_feature (1)..(334): Homolog of NCBI NO: 3004442 NR Description: polygalacturonase [Arabidopsis thaliana]
  misc_feature (1)..(334): Homolog of NCBI NO: 15231771 NR Description: exopolygalacturonase
  misc_feature (1)..(334): Homolog of NCBI NO: 421832 NR Description: polygalacturonase (EC 3.2.1.15) [imported] -
  misc_feature (1)..(334): Homolog of NCBI NO: 15231880 NR Description: exopolygalacturonase
MVESLEFKGPCKGPVTLELNGNFKAPATVKTTKPHAGWIDFENIADFTLNGNKAIFDGQGSLAWKANDCAKTGKCNSLPINIRFTGLTNSKINSITSTNSKLFHMNILNCKNITLSDIGIDAPPESLNTDGIHIGRSNGVNLIGAKIKTGDDCVSIGDGTENLIVENVECGPGHGISIGSLGRYPNEQPVKGVTVRKCLIKNTDNGVRIKTWPGSPPGIASNILFEDITMDNVSLPVLIDQEYCPYGHCKAGVPSQVKLSDVTIKGIKGTSATKVAVKLMCSKGVPCTNIALSDINLVHNGKEGPAVSACSNIKPILSGKLVPAACTEVAKPGP

SEQ ID NO: 36784 - DNA, 1396 bp, Arabidopsis thaliana
  misc_feature (1)..(1396): Ceres Seq. ID no. 12336379
  misc_feature: MA Experiment ID: 108434 Result: Down-regulated in Transcription
  misc_feature: MA Experiment 108434 PARAMETER Experiment Name: At_Root_Tips_cDNA_P Parameter: Tissue Value: Root Tips
  misc_feature: MA Experiment ID: 108488 Result: Down-regulated in Transcription
  misc_feature: MA Experiment ID: 108489 Result: Up-regulated in Transcription
  misc_feature: MA Experiment ID: 108668 Result: Up-regulated in Transcription
  misc_feature: MA Experiment 108668 PARAMETER Experiment Name: At_2mM_SA_cDNA_P Parameter: Plant Line Value: WS
  misc_feature: MA Experiment 108668 PARAMETER Experiment Name: At_2mM_SA_cDNA_P Parameter: Timepoint (hr) Value: 6
  misc_feature: MA Experiment 108668 PARAMETER Experiment Name: At_2mM_SA_cDNA_P Parameter: Treatment Value: 2mM SA vs. No Treatment
  misc_feature: MA Experiment ID: 20000086 Result: Up-regulated in Transcription
  misc_feature: MA Experiment 20000086 PARAMETER Experiment Name: At_100uM_ABA_Mutants_cDNA_P Parameter: Plant Line Value: CS22
  misc_feature: MA Experiment 20000086 PARAMETER Experiment Name: At_100uM_ABA_Mutants_cDNA_P Parameter: Timepoint (hr) Value: 6
  misc_feature: MA Experiment 20000086 PARAMETER Experiment Name: At_100uM_ABA_Mutants_cDNA_P Parameter: Tissue Value: Aerial
  misc_feature: MA Experiment 20000086 PARAMETER Experiment Name: At_100uM_ABA_Mutants_cDNA_P Parameter: Treatment Value: 100uM ABA vs. No Treatment
  misc_feature: MA Experiment ID: 20000182 Result: Up-regulated in Transcription
  misc_feature: MA Experiment 20000182 PARAMETER Experiment Name: At_2mM_SA_P Parameter: Age (day) Value: 14
  misc_feature: MA Experiment 20000182 PARAMETER Experiment Name: At_2mM_SA_P Parameter: Organism Value: A. thaliana
  misc_feature: MA Experiment 20000182 PARAMETER Experiment Name: At_2mM_SA_P Parameter: Plant Line Value: WS
  misc_feature: MA Experiment 20000182 PARAMETER Experiment Name: At_2mM_SA_P Parameter: Timepoint (hr) Value: 6
  misc_feature: MA Experiment 20000182 PARAMETER Experiment Name: At_2mM_SA_P Parameter: Tissue Value: Aerial
  misc_feature: MA Experiment 20000182 PARAMETER Experiment Name: At_2mM_SA_P Parameter: Treatment Value: 2mM SA vs. No Treatment
  misc_feature: MA Experiment ID: 20000264 Result: Up-regulated in Transcription
  misc_feature: MA Experiment 20000264 PARAMETER Experiment Name: At_Open_Flower_P Parameter: Age (day) Value: 21
  misc_feature: MA Experiment 20000264 PARAMETER Experiment Name: At_Open_Flower_P Parameter: Plant Line Value: WS
  misc_feature: MA Experiment 20000264 PARAMETER Experiment Name: At_Open_Flower_P Parameter: Tissue Value: Open Flower vs. Whole Plant
  misc_feature: MA Experiment ID: 20000265 Result: Up-regulated in Transcription
  misc_feature: MA Experiment 20000265 PARAMETER Experiment Name: At_Open_Flower_P Parameter: Age (day) Value: 21
  misc_feature: MA Experiment 20000265 PARAMETER Experiment Name: At_Open_Flower_P Parameter: Plant Line Value: WS
  misc_feature: MA Experiment 20000265 PARAMETER Experiment Name: At_Open_Flower_P Parameter: Tissue Value: Closed Flower vs. Whole Plant
  misc_feature: MA Experiment ID: 20000438 Result: Down-regulated in Transcription
  misc_feature: MA Experiment 20000438 PARAMETER Experiment Name: At_Shoots__P Parameter: Age (day) Value: 14
  misc_feature: MA Experiment 20000438 PARAMETER Experiment Name: At_Shoots__P Parameter: Tissue Value: Shoots vs. Whole Plant
  misc_feature: MA Experiment ID: 20000495 Result: Up-regulated in Transcription
  misc_feature: MA Experiment 20000495 PARAMETER Experiment Name: At_Guard_Cells_P Parameter: Harvest Date Value: 8/2/2002
  misc_feature: MA Experiment 20000495 PARAMETER Experiment Name: At_Guard_Cells_P Parameter: Organism Value: A. thaliana
  misc_feature: MA Experiment 20000495 PARAMETER Experiment Name: At_Guard_Cells_P Parameter: Tissue Value: Guard Cells vs. Leaves
  misc_feature: MA Experiment ID: 20000527 Result: Down-regulated in Transcription
  misc_feature: MA Experiment 20000527 PARAMETER Experiment Name: At_10percent_PEG_P Parameter: Age (day) Value: 20
  misc_feature: MA Experiment 20000527 PARAMETER Experiment Name: At_10percent_PEG_P Parameter: Organism Value: A. thaliana
  misc_feature: MA Experiment 20000527 PARAMETER Experiment Name: At_10percent_PEG_P Parameter: Plant Line Value: WS
  misc_feature: MA Experiment 20000527 PARAMETER Experiment Name: At_10percent_PEG_P Parameter: Timepoint (day) Value: 20
  misc_feature: MA Experiment 20000527 PARAMETER Experiment Name: At_10percent_PEG_P Parameter: Tissue Value: Whole Plant
  misc_feature: MA Experiment 20000527 PARAMETER Experiment Name: At_10percent_PEG_P Parameter: Treatment Value: 10percent PEG vs. No Treatment
  misc_feature: MA Experiment ID: 20000794 Result: Up-regulated in Transcription
  misc_feature: MA Experiment 20000794 PARAMETER Experiment Name: At_Petals_P Parameter: Age (day) Value: 23-25 days
  misc_feature: MA Experiment 20000794 PARAMETER Experiment Name: At_Petals_P Parameter: Plant Line Value: WS
  misc_feature: MA Experiment 20000794 PARAMETER Experiment Name: At_Petals_P Parameter: Tissue Value: Petals vs. Whole plant
  misc_feature: MA Experiment ID: 20001904 Result: Up-regulated in Transcription
  misc_feature: MA Experiment 20001904 PARAMETER Experiment Name: At_Drought_Reproduction_P Parameter: Age (day) Value: 37
  misc_feature: MA Experiment 20001904 PARAMETER Experiment Name: At_Drought_Reproduction_P Parameter: Organism Value: A. thaliana
  misc_feature: MA Experiment 20001904 PARAMETER Experiment Name: At_Drought_Reproduction_P Parameter: Plant Line Value: WS
  misc_feature: MA Experiment 20001904 PARAMETER Experiment Name: At_Drought_Reproduction_P Parameter: Timepoint (day) Value: 7
  misc_feature: MA Experiment 20001904 PARAMETER Experiment Name: At_Drought_Reproduction_P Parameter: Tissue Value: Rosettes
  misc_feature: MA Experiment 20001904 PARAMETER Experiment Name: At_Drought_Reproduction_P Parameter: Treatment Value: Drought vs. No Drought
  misc_feature: MA Experiment ID: 20001911 Result: Down-regulated in Transcription
  misc_feature: MA Experiment 20001911 PARAMETER Experiment Name: At_Drought_Reproduction_P Parameter: Age (day) Value: 40
  misc_feature: MA Experiment 20001911 PARAMETER Experiment Name: At_Drought_Reproduction_P Parameter: Organism Value: A. thaliana
  misc_feature: MA Experiment 20001911 PARAMETER Experiment Name: At_Drought_Reproduction_P Parameter: Plant Line Value: WS
  misc_feature: MA Experiment 20001911 PARAMETER Experiment Name: At_Drought_Reproduction_P Parameter: Timepoint (day) Value: 10
  misc_feature: MA Experiment 20001911 PARAMETER Experiment Name: At_Drought_Reproduction_P Parameter: Tissue Value: Flowers
  misc_feature: MA Experiment 20001911 PARAMETER Experiment Name: At_Drought_Reproduction_P Parameter: Treatment Value: Drought vs. No Drought
aatgtattaagacttgacaacttgtctttctcacaccaaacccctctcctctgtttcataacatcttctctttttttttttcctaagcccctaatgacaaaccataatgccttaatctctgatgctaaaggcagcatcggagttgcggttagagttccaaaccaatctctgttttctcccggaggtggccgatacatcagcattccccggaagaaactcgtgcagaagctagaggccgacccgagtcaaacccgtatccacacttggatcgaagccatgagggcttcttccccaacccgtacccgaccggggaacatatctcccctcacggagtccgatgaggaggatgaatactcttcttggatggctcaacacccgtcagctttaaccatgtttgaagagatagctgaagcttcaaaagggaaacaaatcgtgatgtttctcgactatgacggtacattatcccccattgttgaaaaccctgatcgagcttacatgtctgaagagatgagagaggcagtgaaaggcgtggctagatatttcccgaccgcgattgtcactggaagatgccgtgataaggttcgtagatttgtgaaacttcccggactttactatgcaggtagccatggaatggacatcaaaggaccttccaaaagaaacaaacataataagaacaataaaggagttcttttccaagcggcgaatgagtttttgcctatgattgacaaggtctctaagtgtctagtagagaaaatgagagacatagaaggagcaaacgtcgagaacaacaagttttgtgtctccgtacattaccgttgtgttgatcaaaaggactggggattggtagcggaacacgtgacatcgatattgagtgagtatccgaaactgagtttgacacaaggaagaaaagtcttagagattcgaccaaccatcaaatgggataaaggcaaagctctcgagttcttgctcgaatccttaggattcgctaactctaacgatgttttgcccatctatataggagatgatcgtacggacgaggatgctttcaaggttttgagaaacaaaggacaaggctttggtatacttgtgtccaaaattccaaaggaaacgagtgctacatattctctacaagaaccttccgaggtaggagagtttttgcagcgactcgtggaatggaaacaaatgtcactaagaggaagatagccaatttcctgacataaatttattttcaattaataaatgaattagttttcactatgcaacaaaaattgttgtatatatgatcaatgtttttttaattattttactcttcatgaacaaatgtaagtttataggaactttcttaaccaagaaaaaaagtaagtttgctatataatattttcatcattctcttttt

SEQ ID NO: 36785 - protein, 400 aa, Arabidopsis thaliana
  peptide (1)..(400): Ceres Seq. ID no. 12336380
  misc_feature (147)..(380): Pfam Name: Trehalose-phosphatase Pfam Description: Trehalose-phosphatase
  misc_feature (85)..(397): Homolog of NCBI NO: 15219843 NR Description: trehalose-6-phosphate phosphatase, putative
  misc_feature (66)..(386): Homolog of NCBI NO: 11282598 NR Description: trehalose-6-phosphate phosphatase-like protein -
  misc_feature (66)..(395): Homolog of NCBI NO: 30692524 NR Description: trehalose-6-phosphate phosphatase, putative
  misc_feature (66)..(398): Homolog of NCBI NO: 30683008 NR Description: trehalose-6-phosphate phosphatase, putative
  misc_feature (32)..(390): Homolog of NCBI NO: 15238360 NR Description: trehalose-6-phosphate phosphatase; protein id:
  misc_feature (32)..(397): Homolog of NCBI NO: 15218205 NR Description: trehalose-6-phosphate phosphatase (AtTPPB)
  misc_feature (32)..(397): Homolog of NCBI NO: 25354595 NR Description: trehalose-phosphatase (EC 3.1.3.12) B
  misc_feature (32)..(400): Homolog of NCBI NO: 25354597 NR Description: probable trehalose-phosphatase [imported] -
  misc_feature (32)..(400): Homolog of NCBI NO: 18399940 NR Description: trehalose-phosphatase, putative
  misc_feature (32)..(400): Homolog of NCBI NO: 21554408 NR Description: trehalose-phosphatase, putative [Arabidopsis
NVLRLDNLSFSHQTPLLCFITSSLFFFPKPLMTNHNALISDAKGSIGVAVRVPNQSLFSPGGGRYISIPRKKLVQKLEADPSQTRIHTWIEAMRASSPTRTRPGNISPLTESDEEDEYSSWMAQHPSALTMFEEIAEASKGKQIVMFLDYDGTLSPIVENPDRAYMSEEMREAVKGVARYFPTAIVTGRCRDKVRRFVKLPGLYYAGSHGMDIKGPSKRNKHNKNNKGVLFQAANEFLPMIDKVSKCLVEKMRDIEGANVENNKFCVSVHYRCVDQKDWGLVAEHVTSILSEYPKLSLTQGRKVLEIRPTIKWDKGKALEFLLESLGFANSNDVLPIYIGDDRTDEDAFKVLRNKGQGFGILVSKIPKETSATYSLQEPSEVGEFLQRLVEWKQMSLRGR

SEQ ID NO: 36786 - protein, 369 aa, Arabidopsis thaliana
  peptide (1)..(369): Ceres Seq. ID no. 12336381
  misc_feature (116)..(349): Pfam Name: Trehalose-phosphatase Pfam Description: Trehalose-phosphatase
  misc_feature (54)..(366): Homolog of NCBI NO: 15219843 NR Description: trehalose-6-phosphate phosphatase, putative
  misc_feature (35)..(355): Homolog of NCBI NO: 11282598 NR Description: trehalose-6-phosphate phosphatase-like protein -
  misc_feature (35)..(364): Homolog of NCBI NO: 30692524 NR Description: trehalose-6-phosphate phosphatase, putative
  misc_feature (35)..(367): Homolog of NCBI NO: 30683008 NR Description: trehalose-6-phosphate phosphatase, putative
  misc_feature (1)..(359): Homolog of NCBI NO: 15238360 NR Description: trehalose-6-phosphate phosphatase; protein id:
  misc_feature (1)..(366): Homolog of NCBI NO: 15218205 NR Description: trehalose-6-phosphate phosphatase (AtTPPB)
  misc_feature (1)..(366): Homolog of NCBI NO: 25354595 NR Description: trehalose-phosphatase (EC 3.1.3.12) B
  misc_feature (1)..(369): Homolog of NCBI NO: 25354597 NR Description: probable trehalose-phosphatase [imported] -
  misc_feature (1)..(369): Homolog of NCBI NO: 18399940 NR Description: trehalose-phosphatase, putative
  misc_feature (1)..(369): Homolog of NCBI NO: 21554408 NR Description: trehalose-phosphatase, putative [Arabidopsis
MTNHNALISDAKGSIGVAVRVPNQSLFSPGGGRYISIPRKKLVQKLEADPSQTRIHTWIEAMRASSPTRTRPGNISPLTESDEEDEYSSWMAQHPSALTMFEEIAEASKGKQIVMFLDYDGTLSPIVENPDRAYMSEEMREAVKGVARYFPTAIVTGRCRDKVRRFVKLPGLYYAGSHGMDIKGPSKRNKHNKNNKGVLFQAANEFLPMIDKVSKCLVEKMRDIEGANVENNKFCVSVHYRCVDQKDWGLVAEHVTSILSEYPKLSLTQGRKVLEIRPTIKWDKGKALEFLLESLGFANSNDVLPIYIGDDRTDEDAFKVLRNKGQGFGILVSKIPKETSATYSLQEPSEVGEFLQRLVEWKQMSLRGR

SEQ ID NO: 36787 - protein, 308 aa, Arabidopsis thaliana
  peptide (1)..(308): Ceres Seq. ID no. 12336382
  misc_feature (55)..(288): Pfam Name: Trehalose-phosphatase Pfam Description: Trehalose-phosphatase
  misc_feature (1)..(305): Homolog of NCBI NO: 15219843 NR Description: trehalose-6-phosphate phosphatase, putative
  misc_feature (1)..(294): Homolog of NCBI NO: 11282598 NR Description: trehalose-6-phosphate phosphatase-like protein -
  misc_feature (1)..(303): Homolog of NCBI NO: 30692524 NR Description: trehalose-6-phosphate phosphatase, putative
  misc_feature (1)..(306): Homolog of NCBI NO: 30683008 NR Description: trehalose-6-phosphate phosphatase, putative
  misc_feature (1)..(298): Homolog of NCBI NO: 15238360 NR Description: trehalose-6-phosphate phosphatase; protein id:
  misc_feature (1)..(305): Homolog of NCBI NO: 15218205 NR Description: trehalose-6-phosphate phosphatase (AtTPPB)
  misc_feature (1)..(305): Homolog of NCBI NO: 25354595 NR Description: trehalose-phosphatase (EC 3.1.3.12) B
  misc_feature (1)..(308): Homolog of NCBI NO: 25354597 NR Description: probable trehalose-phosphatase [imported] -
  misc_feature (1)..(308): Homolog of NCBI NO: 18399940 NR Description: trehalose-phosphatase, putative
  misc_feature (1)..(308): Homolog of NCBI NO: 21554408 NR Description: trehalose-phosphatase, putative [Arabidopsis
MRASSPTRTRPGNISPLTESDEEDEYSSWMAQHPSALTMFEEIAEASKGKQIVMFLDYDGTLSPIVENPDRAYMSEEMREAVKGVARYFPTAIVTGRCRDKVRRFVKLPGLYYAGSHGMDIKGPSKRNKHNKNNKGVLFQAANEFLPMIDKVSKCLVEKMRDIEGANVENNKFCVSVHYRCVDQKDWGLVAEHVTSILSEYPKLSLTQGRKVLEIRPTIKWDKGKALEFLLESLGFANSNDVLPIYIGDDRTDEDAFKVLRNKGQGFGILVSKIPKETSATYSLQEPSEVGEFLQRLVEWKQMSLRGR

SEQ ID NO: 36788 - DNA, 1622 bp, Arabidopsis thaliana
  misc_feature (1)..(1622): Ceres Seq. ID no. 13504804
  misc_feature: MA Experiment ID: 20000166 Result: Up-regulated in Transcription
  misc_feature: MA Experiment 20000166 PARAMETER Experiment Name: At_100uM_ABA_P Parameter: Age (day) Value: 14
  misc_feature: MA Experiment 20000166 PARAMETER Experiment Name: At_100uM_ABA_P Parameter: Organism Value: A. thaliana
  misc_feature: MA Experiment 20000166 PARAMETER Experiment Name: At_100uM_ABA_P Parameter: Plant Line Value: WS
  misc_feature: MA Experiment 20000166 PARAMETER Experiment Name: At_100uM_ABA_P Parameter: Timepoint (hr) Value: 1
  misc_feature: MA Experiment 20000166 PARAMETER Experiment Name: At_100uM_ABA_P Parameter: Tissue Value: Aerial
  misc_feature: MA Experiment 20000166 PARAMETER Experiment Name: At_100uM_ABA_P Parameter: Treatment Value: 100uM ABA vs. No Treatment
  misc_feature: MA Experiment ID: 20000173 Result: Down-regulated in Transcription
  misc_feature: MA Experiment 20000173 PARAMETER Experiment Name: At_42deg_Heat_P Parameter: Age (day) Value: 14
  misc_feature: MA Experiment 20000173 PARAMETER Experiment Name: At_42deg_Heat_P Parameter: Organism Value: A. thaliana
  misc_feature: MA Experiment 20000173 PARAMETER Experiment Name: At_42deg_Heat_P Parameter: Plant Line Value: WS
  misc_feature: MA Experiment 20000173 PARAMETER Experiment Name: At_42deg_Heat_P Parameter: Temperature (deg C) Value: 42 vs. 22
  misc_feature: MA Experiment 20000173 PARAMETER Experiment Name: At_42deg_Heat_P Parameter: Timepoint (hr) Value: 6
  misc_feature: MA Experiment 20000173 PARAMETER Experiment Name: At_42deg_Heat_P Parameter: Tissue Value: Aerial
  misc_feature: MA Experiment ID: 20000179 Result: Down-regulated in Transcription
  misc_feature: MA Experiment 20000179 PARAMETER Experiment Name: At_Germinating_Seeds_P Parameter: Age (hr) Value: 6 vs. 0
  misc_feature: MA Experiment 20000179 PARAMETER Experiment Name: At_Germinating_Seeds_P Parameter: Tissue Value: Germinating Seeds
  misc_feature: MA Experiment ID: 20000180 Result: Down-regulated in Transcription
  misc_feature: MA Experiment 20000180 PARAMETER Experiment Name: At_Germinating_Seeds_P Parameter: Age (hr) Value: 24 vs. 0
  misc_feature: MA Experiment 20000180 PARAMETER Experiment Name: At_Germinating_Seeds_P Parameter: Tissue Value: Germinating Seeds
  misc_feature: MA Experiment ID: 20000182 Result: Up-regulated in Transcription
  misc_feature: MA Experiment 20000182 PARAMETER Experiment Name: At_2mM_SA_P Parameter: Age (day) Value: 14
  misc_feature: MA Experiment 20000182 PARAMETER Experiment Name: At_2mM_SA_P Parameter: Organism Value: A. thaliana
  misc_feature: MA Experiment 20000182 PARAMETER Experiment Name: At_2mM_SA_P Parameter: Plant Line Value: WS
  misc_feature: MA Experiment 20000182 PARAMETER Experiment Name: At_2mM_SA_P Parameter: Timepoint (hr) Value: 6
  misc_feature: MA Experiment 20000182 PARAMETER Experiment Name: At_2mM_SA_P Parameter: Tissue Value: Aerial
  misc_feature: MA Experiment 20000182 PARAMETER Experiment Name: At_2mM_SA_P Parameter: Treatment Value: 2mM SA vs. No Treatment
  misc_feature: MA Experiment ID: 20000184 Result: Down-regulated in Transcription
  misc_feature: MA Experiment 20000184 PARAMETER Experiment Name: At_Shoots__P Parameter: Age (day) Value: 7
  misc_feature: MA Experiment 20000184 PARAMETER Experiment Name: At_Shoots__P Parameter: Tissue Value: Shoots vs. Whole Plant
  misc_feature: MA Experiment ID: 20000227 Result: Down-regulated in Transcription
  misc_feature: MA Experiment 20000227 PARAMETER Experiment Name: At_Root-Tips-vs-Tops_P Parameter: Tissue Value: Root Tips vs. Root Tops
  misc_feature: MA Experiment ID: 20000234 Result: Down-regulated in Transcription
  misc_feature: MA Experiment 20000234 PARAMETER Experiment Name: At_Siliques_P Parameter: Age (day) Value: 21
  misc_feature: MA Experiment 20000234 PARAMETER Experiment Name: At_Siliques_P Parameter: Organism Value: A. thaliana
  misc_feature: MA Experiment 20000234 PARAMETER Experiment Name: At_Siliques_P Parameter: Plant Line Value: WS
  misc_feature: MA Experiment 20000234 PARAMETER Experiment Name: At_Siliques_P Parameter: Tissue Value: Less Than 5mm Siliques vs. Whole Plant
  misc_feature: MA Experiment ID: 20000235 Result: Down-regulated in Transcription
  misc_feature: MA Experiment 20000235 PARAMETER Experiment Name: At_Siliques_P Parameter: Age (day) Value: 21
  misc_feature: MA Experiment 20000235 PARAMETER Experiment Name: At_Siliques_P Parameter: Organism Value: A. thaliana
  misc_feature: MA Experiment 20000235 PARAMETER Experiment Name: At_Siliques_P Parameter: Plant Line Value: WS
  misc_feature: MA Experiment 20000235 PARAMETER Experiment Name: At_Siliques_P Parameter: Tissue Value: 5-10mm Siliques vs. Whole Plant
  misc_feature: MA Experiment ID: 20000264 Result: Down-regulated in Transcription
  misc_feature: MA Experiment 20000264 PARAMETER Experiment Name: At_Open_Flower_P Parameter: Age (day) Value: 21
  misc_feature: MA Experiment 20000264 PARAMETER Experiment Name: At_Open_Flower_P Parameter: Plant Line Value: WS
  misc_feature: MA Experiment 20000264 PARAMETER Experiment Name: At_Open_Flower_P Parameter: Tissue Value: Open Flower vs. Whole Plant
  misc_feature: MA Experiment ID: 20000286 Result: Down-regulated in Transcription
  misc_feature: MA Experiment 20000286 PARAMETER Experiment Name: At_Open_Flower_P Parameter: Age (day) Value: 21
  misc_feature: MA Experiment 20000286 PARAMETER Experiment Name: At_Open_Flower_P Parameter: Plant Line Value: WS
  misc_feature: MA Experiment 20000286 PARAMETER Experiment Name: At_Open_Flower_P Parameter: Tissue Value: Half Open vs. Whole Plant
  misc_feature: MA Experiment ID: 20000308 Result: Up-regulated in Transcription
  misc_feature: MA Experiment 20000308 PARAMETER Experiment Name: At_100mM_NaCl__P Parameter: Age (day) Value: 17
  misc_feature: MA Experiment 20000308 PARAMETER Experiment Name: At_100mM_NaCl__P Parameter: Organism Value: A. thaliana
  misc_feature: MA Experiment 20000308 PARAMETER Experiment Name: At_100mM_NaCl__P Parameter: Plant Line Value: WS
  misc_feature: MA Experiment 20000308 PARAMETER Experiment Name: At_100mM_NaCl__P Parameter: Timepoint (hr) Value: 72
  misc_feature: MA Experiment 20000308 PARAMETER Experiment Name: At_100mM_NaCl__P Parameter: Tissue Value: Whole Plant
  misc_feature: MA Experiment 20000308 PARAMETER Experiment Name: At_100mM_NaCl__P Parameter: Treatment Value: 100mM NaCl vs. No Treatment
  misc_feature: MA Experiment ID: 20000438 Result: Down-regulated in Transcription
  misc_feature: MA Experiment 20000438 PARAMETER Experiment Name: At_Shoots__P Parameter: Age (day) Value: 14
  misc_feature: MA Experiment 20000438 PARAMETER Experiment Name: At_Shoots__P Parameter: Tissue Value: Shoots vs. Whole Plant
  misc_feature: MA Experiment ID: 20000445 Result: Up-regulated in Transcription
  misc_feature: MA Experiment 20000445 PARAMETER Experiment Name: At_100uM_NAA__P Parameter: Age (day) Value: 14
  misc_feature: MA Experiment 20000445 PARAMETER Experiment Name: At_100uM_NAA__P Parameter: Organism Value: A. thaliana
  misc_feature: MA Experiment 20000445 PARAMETER Experiment Name: At_100uM_NAA__P Parameter: Plant Line Value: WS
  misc_feature: MA Experiment 20000445 PARAMETER Experiment Name: At_100uM_NAA__P Parameter: Timepoint (hr) Value: 6
  misc_feature: MA Experiment 20000445 PARAMETER Experiment Name: At_100uM_NAA__P Parameter: Tissue Value: Aerial
  misc_feature: MA Experiment 20000445 PARAMETER Experiment Name: At_100uM_NAA__P Parameter: Treatment Value: 100uM NAA vs. No Treatment
  misc_feature: MA Experiment ID: 20000451 Result: Up-regulated in Transcription
  misc_feature: MA Experiment 20000451 PARAMETER Experiment Name: At_CS6879_Shoots-Roots_P Parameter: Age (day) Value: 14
  misc_feature: MA Experiment 20000451 PARAMETER Experiment Name: At_CS6879_Shoots-Roots_P Parameter: Organism Value: A. thaliana
  misc_feature: MA Experiment 20000451 PARAMETER Experiment Name: At_CS6879_Shoots-Roots_P Parameter: Plant Line Value: CS6879 vs. WS
  misc_feature: MA Experiment 20000451 PARAMETER Experiment Name: At_CS6879_Shoots-Roots_P Parameter: Tissue Value: Roots
  misc_feature: MA Experiment ID: 20000456 Result: Up-regulated in Transcription
  misc_feature: MA Experiment 20000456 PARAMETER Experiment Name: At_100uM_BA_P Parameter: Age (day) Value: 14
  misc_feature: MA Experiment 20000456 PARAMETER Experiment Name: At_100uM_BA_P Parameter: Organism Value: A. thaliana
  misc_feature: MA Experiment 20000456 PARAMETER Experiment Name: At_100uM_BA_P Parameter: Plant Line Value: WS
  misc_feature: MA Experiment 20000456 PARAMETER Experiment Name: At_100uM_BA_P Parameter: Timepoint (hr) Value: 6
  misc_feature: MA Experiment 20000456 PARAMETER Experiment Name: At_100uM_BA_P Parameter: Tissue Value: Aerial
  misc_feature: MA Experiment 20000456 PARAMETER Experiment Name: At_100uM_BA_P Parameter: Treatment Value: 100uM BA vs. No Treatment
  misc_feature: MA Experiment ID: 20000460 Result: Down-regulated in Transcription
  misc_feature: MA Experiment 20000460 PARAMETER Experiment Name: At_10percent_PEG_P Parameter: Age (day) Value: 12
  misc_feature: MA Experiment 20000460 PARAMETER Experiment Name: At_10percent_PEG_P Parameter: Organism Value: A. thaliana
  misc_feature: MA Experiment 20000460 PARAMETER Experiment Name: At_10percent_PEG_P Parameter: Plant Line Value: WS
  misc_feature: MA Experiment 20000460 PARAMETER Experiment Name: At_10percent_PEG_P Parameter: Timepoint (day) Value: 12
  misc_feature: MA Experiment 20000460 PARAMETER Experiment Name: At_10percent_PEG_P Parameter: Tissue Value: Whole Plant
  misc_feature: MA Experiment 20000460 PARAMETER Experiment Name: At_10percent_PEG_P Parameter: Treatment Value: 10percent PEG vs. No Treatment
  misc_feature: MA Experiment ID: 20000527 Result: Down-regulated in Transcription
  misc_feature: MA Experiment 20000527 PARAMETER Experiment Name: At_10percent_PEG_P Parameter: Age (day) Value: 20
  misc_feature: MA Experiment 20000527 PARAMETER Experiment Name: At_10percent_PEG_P Parameter: Organism Value: A. thaliana
  misc_feature: MA Experiment 20000527 PARAMETER Experiment Name: At_10percent_PEG_P Parameter: Plant Line Value: WS
  misc_feature: MA Experiment 20000527 PARAMETER Experiment Name: At_10percent_PEG_P Parameter: Timepoint (day) Value: 20
  misc_feature: MA Experiment 20000527 PARAMETER Experiment Name: At_10percent_PEG_P Parameter: Tissue Value: Whole Plant
  misc_feature: MA Experiment 20000527 PARAMETER Experiment Name: At_10percent_PEG_P Parameter: Treatment Value: 10percent PEG vs. No Treatment
  misc_feature: MA Experiment ID: 20000573 Result: Up-regulated in Transcription
  misc_feature: MA Experiment 20000573 PARAMETER Experiment Name: At_100uM_ABA_Mutants__P Parameter: Organism Value: A. thaliana
  misc_feature: MA Experiment 20000573 PARAMETER Experiment Name: At_100uM_ABA_Mutants__P Parameter: Plant Line Value: CS22 vs. Ler wt
  misc_feature: MA Experiment 20000573 PARAMETER Experiment Name: At_100uM_ABA_Mutants__P Parameter: Timepoint (hr) Value: N/A
  misc_feature: MA Experiment 20000573 PARAMETER Experiment Name: At_100uM_ABA_Mutants__P Parameter: Tissue Value: Whole Plant
  misc_feature: MA Experiment 20000573 PARAMETER Experiment Name: At_100uM_ABA_Mutants__P Parameter: Treatment Value: None
  misc_feature: MA Experiment ID: 20000574 Result: Up-regulated in Transcription
  misc_feature: MA Experiment 20000574 PARAMETER Experiment Name: At_100uM_ABA_Mutants__P Parameter: Organism Value: A. thaliana
  misc_feature: MA Experiment 20000574 PARAMETER Experiment Name: At_100uM_ABA_Mutants__P Parameter: Plant Line Value: CS23 vs. Ler wt
  misc_feature: MA Experiment 20000574 PARAMETER Experiment Name: At_100uM_ABA_Mutants__P Parameter: Timepoint (hr) Value: N/A
  misc_feature: MA Experiment 20000574 PARAMETER Experiment Name: At_100uM_ABA_Mutants__P Parameter: Tissue Value: Whole Plant
  misc_feature: MA Experiment 20000574 PARAMETER Experiment Name: At_100uM_ABA_Mutants__P Parameter: Treatment Value: None
  misc_feature: MA Experiment ID: 20000709 Result: Up-regulated in Transcription
  misc_feature: MA Experiment 20000709 PARAMETER Experiment Name: At_15mM_NH4NO3_L-to-H_P Parameter: Age (hr) Value: 14
  misc_feature: MA Experiment 20000709 PARAMETER Experiment Name: At_15mM_NH4NO3_L-to-H_P Parameter: Organism Value: A. thaliana
  misc_feature: MA Experiment 20000709 PARAMETER Experiment Name: At_15mM_NH4NO3_L-to-H_P Parameter: Plant Line Value: WS
  misc_feature: MA Experiment 20000709 PARAMETER Experiment Name: At_15mM_NH4NO3_L-to-H_P Parameter: Timepoint (hr) Value: 4
  misc_feature: MA Experiment 20000709 PARAMETER Experiment Name: At_15mM_NH4NO3_L-to-H_P Parameter: Tissue Value: Aerial
  misc_feature: MA Experiment 20000709 PARAMETER Experiment Name: At_15mM_NH4NO3_L-to-H_P Parameter: Treatment Value: 15mM NH4NO3 vs. 30mM Mannitol
  misc_feature: MA Experiment ID: 20000794 Result: Down-regulated in Transcription
  misc_feature: MA Experiment 20000794 PARAMETER Experiment Name: At_Petals_P Parameter: Age (day) Value: 23-25 days
  misc_feature: MA Experiment 20000794 PARAMETER Experiment Name: At_Petals_P Parameter: Plant Line Value: WS
  misc_feature: MA Experiment 20000794 PARAMETER Experiment Name: At_Petals_P Parameter: Tissue Value: Petals vs. Whole plant
  misc_feature: MA Experiment ID: 20001248 Result: Up-regulated in Transcription
  misc_feature: MA Experiment 20001248 PARAMETER Experiment Name: At_Far-red-induction_P Parameter: Age (day) Value: 7
  misc_feature: MA Experiment 20001248 PARAMETER Experiment Name: At_Far-red-induction_P Parameter: Light Value: Far-red vs. White
  misc_feature: MA Experiment 20001248 PARAMETER Experiment Name: At_Far-red-induction_P Parameter: Organism Value: A. thaliana
  misc_feature: MA Experiment 20001248 PARAMETER Experiment Name: At_Far-red-induction_P Parameter: Plant Line Value: Columbia
  misc_feature: MA Experiment 20001248 PARAMETER Experiment Name: At_Far-red-induction_P Parameter: Timepoint (hr) Value: 4
  misc_feature: MA Experiment 20001248 PARAMETER Experiment Name: At_Far-red-induction_P Parameter: Tissue Value: Whole Plant
  misc_feature: MA Experiment ID: 20001554 Result: Down-regulated in Transcription
  misc_feature: MA Experiment 20001554 PARAMETER Experiment Name: At_Drought_Soil_Dry_P Parameter: Age (day) Value: 21
  misc_feature: MA Experiment 20001554 PARAMETER Experiment Name: At_Drought_Soil_Dry_P Parameter: Organism Value: A. thaliana
  misc_feature: MA Experiment 20001554 PARAMETER Experiment Name: At_Drought_Soil_Dry_P Parameter: Plant Line Value: WS
  misc_feature: MA Experiment 20001554 PARAMETER Experiment Name: At_Drought_Soil_Dry_P Parameter: Post Timepoint (hr) Value: None
  misc_feature: MA Experiment 20001554 PARAMETER Experiment Name: At_Drought_Soil_Dry_P Parameter: Post-Treatment Value: None
  misc_feature: MA Experiment 20001554 PARAMETER Experiment Name: At_Drought_Soil_Dry_P Parameter: Timepoint (day) Value: 7
  misc_feature: MA Experiment 20001554 PARAMETER Experiment Name: At_Drought_Soil_Dry_P Parameter: Treatment Value: Drought vs. No Drought
  misc_feature: MA Experiment ID: 20001555 Result: Down-regulated in Transcription
  misc_feature: MA Experiment 20001555 PARAMETER Experiment Name: At_Drought_Soil_Dry_P Parameter: Age (day) Value: 24
  misc_feature: MA Experiment 20001555 PARAMETER Experiment Name: At_Drought_Soil_Dry_P Parameter: Organism Value: A. thaliana
  misc_feature: MA Experiment 20001555 PARAMETER Experiment Name: At_Drought_Soil_Dry_P Parameter: Plant Line Value: WS
  misc_feature: MA Experiment 20001555 PARAMETER Experiment Name: At_Drought_Soil_Dry_P Parameter: Post Timepoint (hr) Value: None
  misc_feature: MA Experiment 20001555 PARAMETER Experiment Name: At_Drought_Soil_Dry_P Parameter: Post-Treatment Value: None
  misc_feature: MA Experiment 20001555 PARAMETER Experiment Name: At_Drought_Soil_Dry_P Parameter: Timepoint (day) Value: 10
  misc_feature: MA Experiment 20001555 PARAMETER Experiment Name: At_Drought_Soil_Dry_P Parameter: Treatment Value: Drought vs. No Drought
  misc_feature: MA Experiment ID: 20001556 Result: Down-regulated in Transcription
  misc_feature: MA Experiment 20001556 PARAMETER Experiment Name: At_Drought_Soil_Dry_P Parameter: Age (day) Value: 26
  misc_feature: MA Experiment 20001556 PARAMETER Experiment Name: At_Drought_Soil_Dry_P Parameter: Organism Value: A. thaliana
  misc_feature: MA Experiment 20001556 PARAMETER Experiment Name: At_Drought_Soil_Dry_P Parameter: Plant Line Value: WS
  misc_feature: MA Experiment 20001556 PARAMETER Experiment Name: At_Drought_Soil_Dry_P Parameter: Post Timepoint (hr) Value: None
  misc_feature: MA Experiment 20001556 PARAMETER Experiment Name: At_Drought_Soil_Dry_P Parameter: Post-Treatment Value: None
  misc_feature: MA Experiment 20001556 PARAMETER Experiment Name: At_Drought_Soil_Dry_P Parameter: Timepoint (day) Value: 12
  misc_feature: MA Experiment 20001556 PARAMETER Experiment Name: At_Drought_Soil_Dry_P Parameter: Treatment Value: Drought vs. No Drought
  misc_feature: MA Experiment ID: 20001558 Result: Down-regulated in Transcription
  misc_feature: MA Experiment 20001558 PARAMETER Experiment Name: At_Drought_Soil_Dry_P Parameter: Age (day) Value: 27
  misc_feature: MA Experiment 20001558 PARAMETER Experiment Name: At_Drought_Soil_Dry_P Parameter: Organism Value: A. thaliana
  misc_feature: MA Experiment 20001558 PARAMETER Experiment Name: At_Drought_Soil_Dry_P Parameter: Plant Line Value: WS
  misc_feature: MA Experiment 20001558 PARAMETER Experiment Name: At_Drought_Soil_Dry_P Parameter: Post Timepoint (hr) Value: 6
  misc_feature: MA Experiment 20001558 PARAMETER Experiment Name: At_Drought_Soil_Dry_P Parameter: Post-Treatment Value: Re-Water vs. No Drought
  misc_feature: MA Experiment 20001558 PARAMETER Experiment Name: At_Drought_Soil_Dry_P Parameter: Timepoint (day) Value: 13
  misc_feature: MA Experiment 20001558 PARAMETER Experiment Name: At_Drought_Soil_Dry_P Parameter: Treatment Value: Drought vs. No Drought
  misc_feature: MA Experiment ID: 20001560 Result: Down-regulated in Transcription
  misc_feature: MA Experiment 20001560 PARAMETER Experiment Name: At_Drought_Soil_Dry_P Parameter: Age (day) Value: 28
  misc_feature: MA Experiment 20001560 PARAMETER Experiment Name: At_Drought_Soil_Dry_P Parameter: Organism Value: A. thaliana
  misc_feature: MA Experiment 20001560 PARAMETER Experiment Name: At_Drought_Soil_Dry_P Parameter: Plant Line Value: WS
  misc_feature: MA Experiment 20001560 PARAMETER Experiment Name: At_Drought_Soil_Dry_P Parameter: Post Timepoint (hr) Value: None
  misc_feature: MA Experiment 20001560 PARAMETER Experiment Name: At_Drought_Soil_Dry_P Parameter: Post-Treatment Value: None
  misc_feature: MA Experiment 20001560 PARAMETER Experiment Name: At_Drought_Soil_Dry_P Parameter: Timepoint (day) Value: 14
  misc_feature: MA Experiment 20001560 PARAMETER Experiment Name: At_Drought_Soil_Dry_P Parameter: Treatment Value: Drought vs. No Drought
  misc_feature: MA Experiment ID: 20001773 Result: Down-regulated in Transcription
  misc_feature: MA Experiment 20001773 PARAMETER Experiment Name: At_Far-red-enriched-adult_P Parameter: Age (day) Value: 30
  misc_feature: MA Experiment 20001773 PARAMETER Experiment Name: At_Far-red-enriched-adult_P Parameter: Light Value: Far-red enriched vs. White
  misc_feature: MA Experiment 20001773 PARAMETER Experiment Name: At_Far-red-enriched-adult_P Parameter: Organism Value: A. thaliana
  misc_feature: MA Experiment 20001773 PARAMETER Experiment Name: At_Far-red-enriched-adult_P Parameter: Plant Line Value: Columbia
  misc_feature: MA Experiment 20001773 PARAMETER Experiment Name: At_Far-red-enriched-adult_P Parameter: Timepoint (hr) Value: 48
  misc_feature: MA Experiment 20001773 PARAMETER Experiment Name: At_Far-red-enriched-adult_P Parameter: Tissue Value: Aerial
  misc_feature: MA Experiment ID: 20001904 Result: Down-regulated in Transcription
  misc_feature: MA Experiment 20001904 PARAMETER Experiment Name: At_Drought_Reproduction_P Parameter: Age (day) Value: 37
  misc_feature: MA Experiment 20001904 PARAMETER Experiment Name: At_Drought_Reproduction_P Parameter: Organism Value: A. thaliana
  misc_feature: MA Experiment 20001904 PARAMETER Experiment Name: At_Drought_Reproduction_P Parameter: Plant Line Value: WS
  misc_feature: MA Experiment 20001904 PARAMETER Experiment Name: At_Drought_Reproduction_P Parameter: Timepoint (day) Value: 7
  misc_feature: MA Experiment 20001904 PARAMETER Experiment Name: At_Drought_Reproduction_P Parameter: Tissue Value: Rosettes
  misc_feature: MA Experiment 20001904 PARAMETER Experiment Name: At_Drought_Reproduction_P Parameter: Treatment Value: Drought vs. No Drought
agaaaacagaacaaaaaaaaacacaagaacagggcaaggaaaatgtcggttttcctctgtttcctcgtcctcttacccctgatcttaatcttcttgaacgttttgaaaccttcgaaatataagcttcctccgggtccaaagaagcttcccatcatcggaaacttacaccaacgcaggacactacatccgaggaatcgccgtaatctcgccgaaatgtatggaccagtggcgcttctccaatacggattcgtccccgtggtcgcgatctcttcgaaagaagcagcagaggaagtgctaaagatcaacgatcttgagtgttgtagtcgaccagaggcggccggaatgagagcaactttttacaacttcaaagacatcgggatggcacccttcggtgacgagtggagtctgatgcggaagctctcggtggtcgagctcttcagcgtgaaaaagcttcaatctttcaagtatatcatagaggaagagaataacttgtgtgtcaagaaactctctgagtttgctacgagacaatctccggtgaatcttgagagagccattttcactttagtcggaaatatagtgtgtcgtatcgggtacgggataaatctctatgagtgtgatttctttgaagctgatagagtcgtggatcttgtgctaaaggctgaagcggtcataagagaaactgtgttctctgatttctttcccggaagaatcggtaggttcatcgactgtatctccggtcagaacaggagattgaagaataatttctcggtagtagacactttctttcagaatgttcttaacgagcatcttaagcctggaagagagagctctactattgttgacttgatgatcgatatgaagaagaagcaagagaacgatggagatgctctcaagttcaccactgatcatctcaaaggaatgatctcggacatatttgtagcagggattggtggagtcgctggcataacactatggggaatgaccgagctgatcagaaacccaagagtgatgaagaaagtgcaagacgagattcggacaacacttggggacaagaaggagagaatcaaagaagaagatctaaaccaacttcactactttaagctcgtggtcaaggagacattaaggttacatccaacaactccactcttgctcccaagacagacaatgtctcatatcaagattcaaggctacgatgttcctgcgaaaacacagatcttagtcaacgtttatgcgatgggtcgtgatccaaaactctgggaaaacgcagatgagtttaaccctgacaggtttctcgacagttccgttgattttaaaggaaaaaactacgagtttataccgtttggatctggtaggagaatatgtccagggatgacaatgggtaccatacttgttgagatggcattgttgaatttgctttacttcttcgattggggattggcgaagcaggaggaagccaaagagatcatcaatggggaagaaaattttctagccttctttcaagttcttcaccactgaatatatggtttggttcctatcaaaaaaaatatatatatatggttttgttatgtacactagtttctaagataataaatgaaaattgtatctgcttttgatttagtttc

SEQ ID NO: 36789 - protein, 504 aa, Arabidopsis thaliana
  peptide (1)..(504): Ceres Seq. ID no. 13504805
  misc_feature (15)..(495): Homolog of NCBI NO: 15229913 NR Description: cytochrome P450 family [Arabidopsis thaliana]
  misc_feature (15)..(495): Homolog of NCBI NO: 30923413 NR Description: Cytochrome P450 71B38
  misc_feature (15)..(488): Homolog of NCBI NO: 15231525 NR Description: cytochrome P450 71B22 [Arabidopsis thaliana]
  misc_feature (15)..(504): Homolog of NCBI NO: 15231524 NR Description: cytochrome P450 71B21 [Arabidopsis thaliana]
  misc_feature (15)..(493): Homolog of NCBI NO: 15231526 NR Description: cytochrome P450 71B23 [Arabidopsis thaliana]
  misc_feature (15)..(493): Homolog of NCBI NO: 15222182 NR Description: cytochrome P450 71B7 [Arabidopsis thaliana]
  misc_feature (15)..(504): Homolog of NCBI NO: 15222180 NR Description: cytochrome P450 71B29 [Arabidopsis thaliana]
  misc_feature (15)..(504): Homolog of NCBI NO: 21618278 NR Description: putative cytochrome P450 monooxygenase
  misc_feature (15)..(504): Homolog of NCBI NO: 15222177 NR Description: cytochrome P450 71B28 [Arabidopsis thaliana]
  misc_feature (15)..(504): Homolog of NCBI NO: 15231632 NR Description: cytochrome P450 71B15 [Arabidopsis thaliana]
RKQNKKKHKNRARKMSVFLCFLVLLPLILIFLNVLKPSKYKLPPGPKKLPIIGNLHQRRTLHPRNRRNLAEMYGPVALLQYGFVPVVAISSKEAAEEVLKINDLECCSRPEAAGMRATFYNFKDIGMAPFGDEWSLMRKLSVVELFSVKKLQSFKYIIEEENNLCVKKLSEFATRQSPVNLERAIFTLVGNIVCRIGYGINLYECDFFEADRVVDLVLKAEAVIRETVFSDFFPGRIGRFIDCISGQNRRLKNNFSVVDTFFQNVLNEHLKPGRESSTIVDLMIDMKKKQENDGDALKFTTDHLKGMISDIFVAGIGGVAGITLWGMTELIRNPRVMKKVQDEIRTTLGDKKERIKEEDLNQLHYFKLVVKETLRLHPTTPLLLPRQTMSHIKIQGYDVPAKTQILVNVYAMGRDPKLWENADEFNPDRFLDSSVDFKGKNYEFIPFGSGRRICPGMTMGTILVEMALLNLLYFFDWGLAKQEEAKEIINGEENFLAFFQVLHH

SEQ ID NO: 36790 - protein, 490 aa, Arabidopsis thaliana
  peptide (1)..(490): Ceres Seq. ID no. 13504806
  misc_feature (1)..(481): Homolog of NCBI NO: 15229913 NR Description: cytochrome P450 family [Arabidopsis thaliana]
  misc_feature (1)..(481): Homolog of NCBI NO: 30923413 NR Description: Cytochrome P450 71B38
  misc_feature (1)..(474): Homolog of NCBI NO: 15231525 NR Description: cytochrome P450 71B22 [Arabidopsis thaliana]
  misc_feature (1)..(490): Homolog of NCBI NO: 15231524 NR Description: cytochrome P450 71B21 [Arabidopsis thaliana]
  misc_feature (1)..(479): Homolog of NCBI NO: 15231526 NR Description: cytochrome P450 71B23 [Arabidopsis thaliana]
  misc_feature (1)..(479): Homolog of NCBI NO: 15222182 NR Description: cytochrome P450 71B7 [Arabidopsis thaliana]
  misc_feature (1)..(490): Homolog of NCBI NO: 15222180 NR Description: cytochrome P450 71B29 [Arabidopsis thaliana]
  misc_feature (1)..(490): Homolog of NCBI NO: 21618278 NR Description: putative cytochrome P450 monooxygenase
  misc_feature (1)..(490): Homolog of NCBI NO: 15222177 NR Description: cytochrome P450 71B28 [Arabidopsis thaliana]
  misc_feature (1)..(490): Homolog of NCBI NO: 15231632 NR Description: cytochrome P450 71B15 [Arabidopsis thaliana]
MSVFLCFLVLLPLILIFLNVLKPSKYKLPPGPKKLPIIGNLHQRRTLHPRNRRNLAEMYGPVALLQYGFVPVVAISSKEAAEEVLKINDLECCSRPEAAGMRATFYNFKDIGMAPFGDEWSLMRKLSVVELFSVKKLQSFKYIIEEENNLCVKKLSEFATRQSPVNLERAIFTLVGNIVCRIGYGINLYECDFFEADRVVDLVLKAEAVIRETVFSDFFPGRIGRFIDCISGQNRRLKNNFSVVDTFFQNVLNEHLKPGRESSTIVDLMIDMKKKQENDGDALKFTTDHLKGMISDIFVAGIGGVAGITLWGMTELIRNPRVMKKVQDEIRTTLGDKKERIKEEDLNQLHYFKLVVKETLRLHPTTPLLLPRQTMSHIKIQGYDVPAKTQILVNVYAMGRDPKLWENADEFNPDRFLDSSVDFKGKNYEFIPFGSGRRICPGMTMGTILVEMALLNLLYFFDWGLAKQEEAKEIINGEENFLAFFQVLHH

SEQ ID NO: 36791 - protein, 433 aa, Arabidopsis thaliana
  peptide (1)..(433): Ceres Seq. ID no. 13504807
  misc_feature (1)..(424): Homolog of NCBI NO: 15229913 NR Description: cytochrome P450 family [Arabidopsis thaliana]
  misc_feature (1)..(424): Homolog of NCBI NO: 30923413 NR Description: Cytochrome P450 71B38
  misc_feature (1)..(417): Homolog of NCBI NO: 15231525 NR Description: cytochrome P450 71B22 [Arabidopsis thaliana]
  misc_feature (1)..(433): Homolog of NCBI NO: 15231524 NR Description: cytochrome P450 71B21 [Arabidopsis thaliana]
  misc_feature (1)..(422): Homolog of NCBI NO: 15231526 NR Description: cytochrome P450 71B23 [Arabidopsis thaliana]
  misc_feature (1)..(422): Homolog of NCBI NO: 15222182 NR Description: cytochrome P450 71B7 [Arabidopsis thaliana]
  misc_feature (1)..(433): Homolog of NCBI NO: 15222180 NR Description: cytochrome P450 71B29 [Arabidopsis thaliana]
  misc_feature (1)..(433): Homolog of NCBI NO: 21618278 NR Description: putative cytochrome P450 monooxygenase
  misc_feature (1)..(433): Homolog of NCBI NO: 15222177 NR Description: cytochrome P450 71B28 [Arabidopsis thaliana]
  misc_feature (1)..(433): Homolog of NCBI NO: 15231632 NR Description: cytochrome P450 71B15 [Arabidopsis thaliana]
MYGPVALLQYGFVPVVAISSKEAAEEVLKINDLECCSRPEAAGMRATFYNFKDIGMAPFGDEWSLMRKLSVVELFSVKKLQSFKYIIEEENNLCVKKLSEFATRQSPVNLERAIFTLVGNIVCRIGYGINLYECDFFEADRVVDLVLKAEAVIRETVFSDFFPGRIGRFIDCISGQNRRLKNNFSVVDTFFQNVLNEHLKPGRESSTIVDLMIDMKKKQENDGDALKFTTDHLKGMISDIFVAGIGGVAGITLWGMTELIRNPRVMKKVQDEIRTTLGDKKERIKEEDLNQLHYFKLVVKETLRLHPTTPLLLPRQTMSHIKIQGYDVPAKTQILVNVYAMGRDPKLWENADEFNPDRFLDSSVDFKGKNYEFIPFGSGRRICPGMTMGTILVEMALLNLLYFFDWGLAKQEEAKEIINGEENFLAFFQVLHH

SEQ ID NO: 36792 - DNA, 1463 bp, Arabidopsis thaliana
  misc_feature (1)..(1463): Ceres Seq. ID no. 12560077
  misc_feature: MA Experiment ID: 20000185 Result: Down-regulated in Transcription
  misc_feature: MA Experiment 20000185 PARAMETER Experiment Name: At_Roots__P Parameter: Age (day) Value: 7 vs. 21
  misc_feature: MA Experiment 20000185 PARAMETER Experiment Name: At_Roots__P Parameter: Organism Value: A. thaliana
  misc_feature: MA Experiment 20000185 PARAMETER Experiment Name: At_Roots__P Parameter: Tissue Value: Roots vs. Whole Plant
  misc_feature: MA Experiment ID: 20000264 Result: Down-regulated in Transcription
  misc_feature: MA Experiment 20000264 PARAMETER Experiment Name: At_Open_Flower_P Parameter: Age (day) Value: 21
  misc_feature: MA Experiment 20000264 PARAMETER Experiment Name: At_Open_Flower_P Parameter: Plant Line Value: WS
  misc_feature: MA Experiment 20000264 PARAMETER Experiment Name: At_Open_Flower_P Parameter: Tissue Value: Open Flower vs. Whole Plant
  misc_feature: MA Experiment ID: 20000439 Result: Down-regulated in Transcription
  misc_feature: MA Experiment 20000439 PARAMETER Experiment Name: At_Roots__P Parameter: Age (day) Value: 14 vs. 21
  misc_feature: MA Experiment 20000439 PARAMETER Experiment Name: At_Roots__P Parameter: Organism Value: A. thaliana
  misc_feature: MA Experiment 20000439 PARAMETER Experiment Name: At_Roots__P Parameter: Tissue Value: Roots vs. Whole Plant
  misc_feature: MA Experiment ID: 20000495 Result: Down-regulated in Transcription
  misc_feature: MA Experiment 20000495 PARAMETER Experiment Name: At_Guard_Cells_P Parameter: Harvest Date Value: 8/2/2002
  misc_feature: MA Experiment 20000495 PARAMETER Experiment Name: At_Guard_Cells_P Parameter: Organism Value: A. thaliana
  misc_feature: MA Experiment 20000495 PARAMETER Experiment Name: At_Guard_Cells_P Parameter: Tissue Value: Guard Cells vs. Leaves
  misc_feature: MA Experiment ID: 20001247 Result: Up-regulated in Transcription
  misc_feature: MA Experiment 20001247 PARAMETER Experiment Name: At_Far-red-induction_P Parameter: Age (day) Value: 7
  misc_feature: MA Experiment 20001247 PARAMETER Experiment Name: At_Far-red-induction_P Parameter: Light Value: Far-red vs. White
  misc_feature: MA Experiment 20001247 PARAMETER Experiment Name: At_Far-red-induction_P Parameter: Organism Value: A. thaliana
  misc_feature: MA Experiment 20001247 PARAMETER Experiment Name: At_Far-red-induction_P Parameter: Plant Line Value: Columbia
  misc_feature: MA Experiment 20001247 PARAMETER Experiment Name: At_Far-red-induction_P Parameter: Timepoint (hr) Value: 1
  misc_feature: MA Experiment 20001247 PARAMETER Experiment Name: At_Far-red-induction_P Parameter: Tissue Value: Whole Plant
ataattctagccaaatctttttagggtttcacaagttcacttaaaaagttgaaaagagtctttcttcttcaactattgtaaatgcgaaatggatcgaagagatgcaatgggattatccgggtcaggttcttactatatccatagaggattatccgggtcgggtcctccaacgtttcatggatcaccacagcaacagcaaggtcttcgtcacttacctaatcaaaactctccattcgggtcaggctccactggtttcggatctccttctttacacggtgatccttctctggcaacagcagccggaggagccggagctcttcctcatcatatcggcgttaatatgattgctcctcctccacctcccagtgaaactccgatgaaacgaaagagaggacggcctagaaaatacggtcaagacggctctgtttctttggctctgtcgtcttcctctgtttcgaccattactcccaacaactctaacaaacgcggccgtggtcgacctccgggctccggcaagaaacagagaatggcttccgttggtgaactgatgccttcatcttctggaatgagcttcacgccacatgttatcgcggtttcaataggagaagatattgcatcaaaggttatagctttctctcaacaaggtccgagagccatttgcgttttatctgcaagtggtgcagtctctactgcaacacttattcaaccatcagcatctcccggagccattaaatacgagggccggtttgaaatcctagcgttatcaacatcttatatagtggcaactgatggaagcttccgtaaccgaactggaaacttatcggtttcgcttgctagccccgatgggcgtgtgattggcggtgccattggtgggcctttaatagctgcaagtcctgttcaggttattgtagggagctttatatgggcagctccaaagatcaagagcaagaaacgagaagaagaagcttctgaagttgttcaagaaactgatgatcaccacgttctggacaataataacaacacgatttcgcctgtccctcagcagcagccaaaccaaaacctgatttggtcaacaggttcaaggcaaatggatatgcgtcatgctcatgctgatattgatttaatgcgcggttgatgatagcgagaaagaactctgtgtatataaagcatggaatctaggaagaagaagaaggaatataagctaacctctgaacaaaagtatgtggaaatgttagggaaaaagattatgtggaaatgttagggaaaaagattaactctattagtgtacctctcatatctctaagcttgtttggttttactgtttctgtgactctgaagatttgcagagttcctttctttctctgttttagattgttcagtctttatgtaatttgcttgcaattctgattctacagcttagattcagtacattgtgtagaagtttacatgggaacctgaaaatt

SEQ ID NO: 36793 - protein, 348 aa, Arabidopsis thaliana
  peptide (1)..(348): Ceres Seq. ID no. 12560078
  misc_feature (89)..(348): Homolog of NCBI NO: 6633838 NR Description: F2K11.15 [Arabidopsis thaliana]
  misc_feature (1)..(317): Homolog of NCBI NO: 6633838 NR Description: F2K11.15 [Arabidopsis thaliana]
  misc_feature (1)..(348): Homolog of NCBI NO: 22330402 NR Description: DNA-binding protein, putative
  misc_feature (1)..(321): Homolog of NCBI NO: 6633838 NR Description: F2K11.15 [Arabidopsis thaliana]
  misc_feature (1)..(348): Homolog of NCBI NO: 30696854 NR Description: DNA-binding protein -related [Arabidopsis
  misc_feature (1)..(337): Homolog of NCBI NO: 2213534 NR Description: DNA-binding PD1-like protein [Pisum sativum]
  misc_feature (1)..(348): Homolog of NCBI NO: 7488825 NR Description: probable DNA-binding protein - garden pea
  misc_feature (7)..(348): Homolog of NCBI NO: 11281387 NR Description: probable DNA-binding protein - Arabidopsis
  misc_feature (1)..(348): Homolog of NCBI NO: 30695388 NR Description: DNA-binding protein -related [Arabidopsis
  misc_feature (1)..(348): Homolog of NCBI NO: 15225902 NR Description: putative AT-hook DNA-binding protein
MDRRDAMGLSGSGSYYIHRGLSGSGPPTFHGSPQQQQGLRHLPNQNSPFGSGSTGFGSPSLHGDPSLATAAGGAGALPHHIGVNMIAPPPPPSETPMKRKRGRPRKYGQDGSVSLALSSSSVSTITPNNSNKRGRGRPPGSGKKQRMASVGELMPSSSGMSFTPHVIAVSIGEDIASKVIAFSQQGPRAICVLSASGAVSTATLIQPSASPGAIKYEGRFEILALSTSYIVATDGSFRNRTGNLSVSLASPDGRVIGGAIGGPLIAASPVQVIVGSFIWAAPKIKSKKREEEASEVVQETDDHHVLDNNNNTISPVPQQQPNQNLIWSTGSRQMDMRHAHADIDLMRG

SEQ ID NO: 36794 - protein, 342 aa, Arabidopsis thaliana
  peptide (1)..(342): Ceres Seq. ID no. 12560079
  misc_feature (83)..(342): Homolog of NCBI NO: 6633838 NR Description: F2K11.15 [Arabidopsis thaliana]
  misc_feature (1)..(311): Homolog of NCBI NO: 6633838 NR Description: F2K11.15 [Arabidopsis thaliana]
  misc_feature (1)..(342): Homolog of NCBI NO: 22330402 NR Description: DNA-binding protein, putative
  misc_feature (1)..(315): Homolog of NCBI NO: 6633838 NR Description: F2K11.15 [Arabidopsis thaliana]
  misc_feature (1)..(342): Homolog of NCBI NO: 30696854 NR Description: DNA-binding protein -related [Arabidopsis
  misc_feature (1)..(331): Homolog of NCBI NO: 2213534 NR Description: DNA-binding PD1-like protein [Pisum sativum]
  misc_feature (1)..(342): Homolog of NCBI NO: 7488825 NR Description: probable DNA-binding protein - garden pea
  misc_feature (1)..(342): Homolog of NCBI NO: 11281387 NR Description: probable DNA-binding protein - Arabidopsis
  misc_feature (1)..(342): Homolog of NCBI NO: 30695388 NR Description: DNA-binding protein -related [Arabidopsis
  misc_feature (1)..(342): Homolog of NCBI NO: 15225902 NR Description: putative AT-hook DNA-binding protein
MGLSGSGSYYIHRGLSGSGPPTFHGSPQQQQGLRHLPNQNSPFGSGSTGFGSPSLHGDPSLATAAGGAGALPHHIGVNMIAPPPPPSETPMKRKRGRPRKYGQDGSVSLALSSSSVSTITPNNSNKRGRGRPPGSGKKQRMASVGELMPSSSGMSFTPHVIAVSIGEDIASKVIAFSQQGPRAICVLSASGAVSTATLIQPSASPGAIKYEGRFEILALSTSYIVATDGSFRNRTGNLSVSLASPDGRVIGGAIGGPLIAASPVQVIVGSFIWAAPKIKSKKREEEASEVVQETDDHHVLDNNNNTISPVPQQQPNQNLIWSTGSRQMDMRHAHADIDLMRG

SEQ ID NO: 36795 - protein, 264 aa, Arabidopsis thaliana
  peptide (1)..(264): Ceres Seq. ID no. 12560080
  misc_feature (5)..(264): Homolog of NCBI NO: 6633838 NR Description: F2K11.15 [Arabidopsis thaliana]
  misc_feature (1)..(233): Homolog of NCBI NO: 6633838 NR Description: F2K11.15 [Arabidopsis thaliana]
  misc_feature (1)..(264): Homolog of NCBI NO: 22330402 NR Description: DNA-binding protein, putative
  misc_feature (1)..(237): Homolog of NCBI NO: 6633838 NR Description: F2K11.15 [Arabidopsis thaliana]
  misc_feature (1)..(264): Homolog of NCBI NO: 30696854 NR Description: DNA-binding protein -related [Arabidopsis
  misc_feature (1)..(253): Homolog of NCBI NO: 2213534 NR Description: DNA-binding PD1-like protein [Pisum sativum]
  misc_feature (1)..(264): Homolog of NCBI NO: 7488825 NR Description: probable DNA-binding protein - garden pea
  misc_feature (1)..(264): Homolog of NCBI NO: 11281387 NR Description: probable DNA-binding protein - Arabidopsis
  misc_feature (1)..(264): Homolog of NCBI NO: 30695388 NR Description: DNA-binding protein -related [Arabidopsis
  misc_feature (1)..(264): Homolog of NCBI NO: 15225902 NR Description: putative AT-hook DNA-binding protein
MIAPPPPPSETPMKRKRGRPRKYGQDGSVSLALSSSSVSTITPNNSNKRGRGRPPGSGKKQRMASVGELMPSSSGMSFTPHVIAVSIGEDIASKVIAFSQQGPRAICVLSASGAVSTATLIQPSASPGAIKYEGRFEILALSTSYIVATDGSFRNRTGNLSVSLASPDGRVIGGAIGGPLIAASPVQVIVGSFIWAAPKIKSKKREEEASEVVQETDDHHVLDNNNNTISPVPQQQPNQNLIWSTGSRQMDMRHAHADIDLMRG

SEQ ID NO: 36796 - DNA, 1539 bp, Arabidopsis thaliana
  misc_feature (1)..(1539): Ceres Seq. ID no. 13501397
atgacaagttggttttttttttttttttttaattttttcatcttcttgggtttggttgggtcactcttcaggtcaggtgtgtaaaaaagaaagaaagaaaagagagattgttgtgttgtaacccctttgactaaaatctaatgaacttttttaacacaacaaaactccttcagatctgaaagggttcttcttctctcttagtctctttgtccttttattctccgtcgtcgtttcatgatctgactctctggtcttctcttcttcttcttcttcttctattttttcttacttcgtcactgttgtgtctgaacatgccacgccctttcttccataagttgattttctcatccactatccaagaaaaacgtctgagggtcccagataagtttgtgagtaaattcaaggatgagctttcggttgctgttgcactcacagtacctgatggtcatgtttggcgtgtaggactaaggaaagctgacaacaaaatttggtttcaagatggttggcaagagtttgttgaccgttactccattcgcattggttatcttttgatttttagatatgaaggaaactctgccttcagcgtctacattttcaatttatcccactctgagatcaattaccattccaccggtctcatggattccgctcacaaccacttcaaacgcgcccgtttgtttgaagaccttgaagatgaagatgccgaggtcatctttccttcttctgtgtacccatcaccacttcctgagtctacagtaccagccaacaaagggtatgctagttcagccatccaaaccttgttcactggaccagttaaagctgaagagccaacgccaaccccaaaaatacctaaaaagagagggaggaagaagaaaaatgctgatcctgaggaaataaactcatcagctccgcgagatgatgatccagagaaccgttcaaagttctacgagagtgcttctgcgagaaagagaaccgtgactgcagaagaaagagagagagccatcaatgcagccaaaacgttcgaaccaacaaaccctttcttcagagtggttctgcgaccatcctatctatacagaggttgcatcatgtatcttccttctgggtttgctgagaagtacctaagtgggatctccgggttcatcaaagtccagcttgcggagaaacaatggcctgttcgatgtctctacaaagccgggagagccaaattcagtcaaggatggtacgaattcactctagagaacaacttaggagaaggagacgtctgtgtgtttgagctgctcagaaccagagatttcgttttgaaagtgacagcctttcgagtcaacgagtacgtctgaacaaagcattatggtgtgatcattctggatttgcaagtacaatgtcgtgtaggagtatcttaatttaaaaacaactaaaaaactctcttctggtctgtgtcattattgcgtcagtgtctcgttttttctctcgggtttactttgtgttatcgatgtggataagttgtttttacctcattatatataacctcttgagtggaac

SEQ ID NO: 36797 - protein, 341 aa, Arabidopsis thaliana
  peptide (1)..(341): Ceres Seq. ID no. 13501398
  misc_feature (243)..(340): Pfam Name: B3 DNA binding domain Pfam Description: B3 DNA binding domain
  misc_feature (185)..(336): Homolog of NCBI NO: 28201561 NR Description: putative auxin response factor
  misc_feature (6)..(104): Homolog of NCBI NO: 15234250 NR Description: transcriptional factor B3 family [Arabidopsis
  misc_feature (3)..(101): Homolog of NCBI NO: 34910734 NR Description: P0022F10.13 [Oryza sativa (japonica
  misc_feature (212)..(339): Homolog of NCBI NO: 34910734 NR Description: P0022F10.13 [Oryza sativa (japonica
  misc_feature (110)..(341): Homolog of NCBI NO: 14596161 NR Description: Unknown protein [Arabidopsis thaliana]
  misc_feature (110)..(341): Homolog of NCBI NO: 18402653 NR Description: transcriptional factor B3 family [Arabidopsis
  misc_feature (110)..(341): Homolog of NCBI NO: 9280316 NR Description: gb|AAD43153.1~gene_id:K13E13.10~similar to
  misc_feature (1)..(341): Homolog of NCBI NO: 33943517 NR Description: reduced vernalization response 1 [Brassica rapa]
  misc_feature (1)..(341): Homolog of NCBI NO: 40806799 NR Description: reduced vernalization response 1 [Brassica rapa]
  misc_feature (1)..(341): Homolog of NCBI NO: 30685150 NR Description: transcriptional factor B3 family [Arabidopsis
MPRPFFHKLIFSSTIQEKRLRVPDKFVSKFKDELSVAVALTVPDGHVWRVGLRKADNKIWFQDGWQEFVDRYSIRIGYLLIFRYEGNSAFSVYIFNLSHSEINYHSTGLMDSAHNHFKRARLFEDLEDEDAEVIFPSSVYPSPLPESTVPANKGYASSAIQTLFTGPVKAEEPTPTPKIPKKRGRKKKNADPEEINSSAPRDDDPENRSKFYESASARKRTVTAEERERAINAAKTFEPTNPFFRVVLRPSYLYRGCIMYLPSGFAEKYLSGISGFIKVQLAEKQWPVRCLYKAGRAKFSQGWYEFTLENNLGEGDVCVFELLRTRDFVLKVTAFRVNEYV

SEQ ID NO: 36798 - protein, 232 aa, Arabidopsis thaliana
  peptide (1)..(232): Ceres Seq. ID no. 13501399
  misc_feature (134)..(231): Pfam Name: B3 DNA binding domain Pfam Description: B3 DNA binding domain
  misc_feature (1)..(213): Homolog of NCBI NO: 28201564 NR Description: putative auxin response factor
  misc_feature (58)..(223): Homolog of NCBI NO: 28201553 NR Description: putative auxin response factor
  misc_feature (76)..(227): Homolog of NCBI NO: 28201561 NR Description: putative auxin response factor
  misc_feature (103)..(230): Homolog of NCBI NO: 34910734 NR Description: P0022F10.13 [Oryza sativa (japonica
  misc_feature (1)..(232): Homolog of NCBI NO: 14596161 NR Description: Unknown protein [Arabidopsis thaliana]
  misc_feature (1)..(232): Homolog of NCBI NO: 18402653 NR Description: transcriptional factor B3 family [Arabidopsis
  misc_feature (1)..(232): Homolog of NCBI NO: 9280316 NR Description: gb|AAD43153.1~gene_id:K13E13.10~similar to
  misc_feature (1)..(232): Homolog of NCBI NO: 33943517 NR Description: reduced vernalization response 1 [Brassica rapa]
  misc_feature (1)..(232): Homolog of NCBI NO: 40806799 NR Description: reduced vernalization response 1 [Brassica rapa]
  misc_feature (1)..(232): Homolog of NCBI NO: 30685150 NR Description: transcriptional factor B3 family [Arabidopsis
MDSAHNHFKRARLFEDLEDEDAEVIFPSSVYPSPLPESTVPANKGYASSAIQTLFTGPVKAEEPTPTPKIPKKRGRKKKNADPEEINSSAPRDDDPENRSKFYESASARKRTVTAEERERAINAAKTFEPTNPFFRVVLRPSYLYRGCIMYLPSGFAEKYLSGISGFIKVQLAEKQWPVRCLYKAGRAKFSQGWYEFTLENNLGEGDVCVFELLRTRDFVLKVTAFRVNEYV

SEQ ID NO: 36799 - DNA, 796 bp, Arabidopsis thaliana
  misc_feature (1)..(796): Ceres Seq. ID no. 12420942
  misc_feature: MA Experiment ID: 108501 Result: Down-regulated in Transcription
  misc_feature: MA Experiment 108501 PARAMETER Experiment Name: At_ap2_floral_buds_cDNA_P Parameter: Plant Line Value: ap2 (Ler.)
  misc_feature: MA Experiment 108501 PARAMETER Experiment Name: At_ap2_floral_buds_cDNA_P Parameter: Tissue Value: Closed Flower
  misc_feature: MA Experiment ID: 108576 Result: Up-regulated in Transcription
  misc_feature: MA Experiment 108576 PARAMETER Experiment Name: At_42deg_Heat_cDNA_P Parameter: Temperature (deg C) Value: 42 vs. 22
  misc_feature: MA Experiment 108576 PARAMETER Experiment Name: At_42deg_Heat_cDNA_P Parameter: Timepoint (hr) Value: 1
  misc_feature: MA Experiment 108576 PARAMETER Experiment Name: At_42deg_Heat_cDNA_P Parameter: Tissue Value: Aerial
ttgtcaaaagctgattcttcgccttatggcatcgattttgcaccttcgaacggccaacccacgggaagattcactaatggtcgaaccatttccgatattgtgggtgaagccttaggagcaaaatcaccaccaccaccatatcttgaaccaaacactgaggctaacacaattctcaatggaatcaactatgcttctggtgctgctggaatcttggacgacactggacttctggttcatcggggcgagttccgctgagagaacaagtgagtaattttgagaagagtagagaatatatggtaagcgtgattggtgaaaatggtacaaaagagatgttgaagaatgcaatgttcacaatcacaattggatcaaatgatattttgaattatattcaaccatcaatacctttcttctctcaagacaagctccccactgatgtcctacaagattccatggtcctccatttaaccacacatcttaagcgattgcatcagctaggaggtaggaagttcgtggtggttggagtagggccactcggttgcataccctttgctcgagcgttgaatttaataccagccggaaaatgctccgaacaagtcaaccaagtagtccgaggttataacatgaagcttatacactctcttaagacattgaacaatgagttaagatccgaagattacaacactacatttgtctacgccaactcttacgacctattcttgaaactagttttgaactatcaactatttggcttgaagaacgcagacaagccgtgttgtggcggctactttccaccgtt

SEQ ID NO: 36800 - protein, 167 aa, Arabidopsis thaliana
  peptide (1)..(167): Ceres Seq. ID no. 12420943
  misc_feature (1)..(166): Pfam Name: GDSL-like Lipase/Acylhydrolase Pfam Description: GDSL-like Lipase/Acylhydrolase
  misc_feature (1)..(162): Homolog of NCBI NO: 15220512 NR Description: lipase/hydrolase, putative
  misc_feature (1)..(162): Homolog of NCBI NO: 11280578 NR Description: hypothetical protein F14F8_100 - Arabidopsis
  misc_feature (1)..(164): Homolog of NCBI NO: 15221260 NR Description: putative lipase/acylhydrolase
  misc_feature (1)..(162): Homolog of NCBI NO: 18409881 NR Description: hypothetical protein; protein id: At1g71691.1
  misc_feature (1)..(162): Homolog of NCBI NO: 15241626 NR Description: GDSL-motif lipase acylhydrolase-like protein
  misc_feature (1)..(162): Homolog of NCBI NO: 34899288 NR Description: similar to GDSL-motif lipase/hydrolase
  misc_feature (1)..(162): Homolog of NCBI NO: 15227849 NR Description: putative GDSL-motif lipase/hydrolase
  misc_feature (1)..(161): Homolog of NCBI NO: 15229742 NR Description: putative protein; protein id: At3g50400.1
  misc_feature (1)..(166): Homolog of NCBI NO: 38345537 NR Description: OSJNBa0020J04.12 [Oryza sativa (japonica
  misc_feature (1)..(166): Homolog of NCBI NO: 15238210 NR Description: GDSL-motif lipase/hydrolase-like protein; protein
MVSVIGENGTKEMLKNAMFTITIGSNDILNYIQPSIPFFSQDKLPTDVLQDSMVLHLTTHLKRLHQLGGRKFVVVGVGPLGCIPFARALNLIPAGKCSEQVNQVVRGYNMKLIHSLKTLNNELRSEDYNTTFVYANSYDLFLKLVLNYQLFGLKNADKPCCGGYFPP

SEQ ID NO: 36801 - protein, 155 aa, Arabidopsis thaliana
  peptide (1)..(155): Ceres Seq. ID no. 12420944
  misc_feature (1)..(154): Pfam Name: GDSL-like Lipase/Acylhydrolase Pfam Description: GDSL-like Lipase/Acylhydrolase
  misc_feature (1)..(150): Homolog of NCBI NO: 15220512 NR Description: lipase/hydrolase, putative
  misc_feature (1)..(150): Homolog of NCBI NO: 11280578 NR Description: hypothetical protein F14F8_100 - Arabidopsis
  misc_feature (1)..(152): Homolog of NCBI NO: 15221260 NR Description: putative lipase/acylhydrolase
  misc_feature (1)..(150): Homolog of NCBI NO: 18409881 NR Description: hypothetical protein; protein id: At1g71691.1
  misc_feature (1)..(150): Homolog of NCBI NO: 15241626 NR Description: GDSL-motif lipase acylhydrolase-like protein
  misc_feature (1)..(150): Homolog of NCBI NO: 34899288 NR Description: similar to GDSL-motif lipase/hydrolase
  misc_feature (1)..(150): Homolog of NCBI NO: 15227849 NR Description: putative GDSL-motif lipase/hydrolase
  misc_feature (1)..(149): Homolog of NCBI NO: 15229742 NR Description: putative protein; protein id: At3g50400.1
  misc_feature (1)..(154): Homolog of NCBI NO: 38345537 NR Description: OSJNBa0020J04.12 [Oryza sativa (japonica
  misc_feature (1)..(154): Homolog of NCBI NO: 15238210 NR Description: GDSL-motif lipase/hydrolase-like protein; protein
MLKNAMFTITIGSNDILNYIQPSIPFFSQDKLPTDVLQDSMVLHLTTHLKRLHQLGGRKFVVVGVGPLGCIPFARALNLIPAGKCSEQVNQVVRGYNMKLIHSLKTLNNELRSEDYNTTFVYANSYDLFLKLVLNYQLFGLKNADKPCCGGYFPP

SEQ ID NO: 36802 - protein, 150 aa, Arabidopsis thaliana
  peptide (1)..(150): Ceres Seq. ID no. 12420945
  misc_feature (1)..(149): Pfam Name: GDSL-like Lipase/Acylhydrolase Pfam Description: GDSL-like Lipase/Acylhydrolase
  misc_feature (1)..(145): Homolog of NCBI NO: 15220512 NR Description: lipase/hydrolase, putative
  misc_feature (1)..(145): Homolog of NCBI NO: 11280578 NR Description: hypothetical protein F14F8_100 - Arabidopsis
  misc_feature (1)..(147): Homolog of NCBI NO: 15221260 NR Description: putative lipase/acylhydrolase
  misc_feature (1)..(145): Homolog of NCBI NO: 18409881 NR Description: hypothetical protein; protein id: At1g71691.1
  misc_feature (1)..(145): Homolog of NCBI NO: 15241626 NR Description: GDSL-motif lipase acylhydrolase-like protein
  misc_feature (1)..(145): Homolog of NCBI NO: 34899288 NR Description: similar to GDSL-motif lipase/hydrolase
  misc_feature (1)..(145): Homolog of NCBI NO: 15227849 NR Description: putative GDSL-motif lipase/hydrolase
  misc_feature (1)..(144): Homolog of NCBI NO: 15229742 NR Description: putative protein; protein id: At3g50400.1
  misc_feature (1)..(149): Homolog of NCBI NO: 38345537 NR Description: OSJNBa0020J04.12 [Oryza sativa (japonica
  misc_feature (1)..(149): Homolog of NCBI NO: 15238210 NR Description: GDSL-motif lipase/hydrolase-like protein; protein
MFTITIGSNDILNYIQPSIPFFSQDKLPTDVLQDSMVLHLTTHLKRLHQLGGRKFVVVGVGPLGCIPFARALNLIPAGKCSEQVNQVVRGYNMKLIHSLKTLNNELRSEDYNTTFVYANSYDLFLKLVLNYQLFGLKNADKPCCGGYFPP

SEQ ID NO: 36803 - DNA, 611 bp, Arabidopsis thaliana
  misc_feature (1)..(611): Ceres Seq. ID no. 12393994
  misc_feature: MA Experiment ID: 108585 Result: Up-regulated in Transcription
  misc_feature: MA Experiment 108585 PARAMETER Experiment Name: At_5mM_NaNP_cDNA_P Parameter: Timepoint (hr) Value: 6
  misc_feature: MA Experiment 108585 PARAMETER Experiment Name: At_5mM_NaNP_cDNA_P Parameter: Tissue Value: Aerial
  misc_feature: MA Experiment 108585 PARAMETER Experiment Name: At_5mM_NaNP_cDNA_P Parameter: Treatment Value: null
  misc_feature: MA Experiment ID: 108668 Result: Up-regulated in Transcription
  misc_feature: MA Experiment 108668 PARAMETER Experiment Name: At_2mM_SA_cDNA_P Parameter: Plant Line Value: WS
  misc_feature: MA Experiment 108668 PARAMETER Experiment Name: At_2mM_SA_cDNA_P Parameter: Timepoint (hr) Value: 6
  misc_feature: MA Experiment 108668 PARAMETER Experiment Name: At_2mM_SA_cDNA_P Parameter: Treatment Value: 2mM SA vs. No Treatment
aataataatattcgagtagaagaagaaagatccagacaaaagcttaagcaagacctctctgtcttcgtctctctctctctctctttgtctccgccatgacaagctcttcatctcctgcacgcaaggcgttaagcaagatcgcgtgtaataggttacaaaaggagttatcagagtggcaagtaaatccaccgactgggtttaagcacagagttactgataatcttcaaaaatgggtaattgaggtaacaggagcacctggtacgctttacgctaatgaaacttataatcttcaggttgagtttcctcaacattatcctatggaagctcctcaggtgatttttgttccaccagctccgttacatcctcatatttacagcaatggacatatttgtttagatattctgtatgactcatggtctccagcaatgacagtgagttcagtctgtatcagcattctctcgatgctatcaagttcacccgaaaagcaacgccccacttttttttctgtaacggatcattatgtataaatgacatctgaaatgtttcagtgtctgaattaacaccttgtgcttttgtcctttctgaagtgaaaaaccatggagattttaggc

SEQ ID NO: 36804 - protein, 143 aa, Arabidopsis thaliana
  peptide (1)..(143): Ceres Seq. ID no. 12393995
  misc_feature (65)..(143): Homolog of NCBI NO: 25293670 NR Description: ubiquitin-conjugating enzyme 18
  misc_feature (1)..(102): Homolog of NCBI NO: 25293672 NR Description: protein F27F5.13 [imported] - Arabidopsis
  misc_feature (1)..(133): Homolog of NCBI NO: 4090259 NR Description: ubiquitin-conjugating enzyme E2 [Pseudotsuga
  misc_feature (1)..(143): Homolog of NCBI NO: 18419831 NR Description: E2, ubiquitin-conjugating enzyme 17 (UBC17)
  misc_feature (1)..(143): Homolog of NCBI NO: 2801444 NR Description: ubiquitin-conjugating enzyme 16 [Arabidopsis
  misc_feature (1)..(130): Homolog of NCBI NO: 34897008 NR Description: putative ubiquitin-conjugating enzyme E2 [Oryza
  misc_feature (1)..(143): Homolog of NCBI NO: 18410856 NR Description: E2, ubiquitin-conjugating enzyme 16 (UBC16)
  misc_feature (1)..(143): Homolog of NCBI NO: 481811 NR Description: ubiquitin-conjugating enzyme UBC2-1 - Arabidopsis
  misc_feature (1)..(143): Homolog of NCBI NO: 18401461 NR Description: E2, ubiquitin-conjugating enzyme 15 (UBC15)
  misc_feature (1)..(143): Homolog of NCBI NO: 18422281 NR Description: E2, ubiquitin-conjugating enzyme 18 (UBC18)
MTSSSSPARKALSKIACNRLQKELSEWQVNPPTGFKHRVTDNLQKWVIEVTGAPGTLYANETYNLQVEFPQHYPMEAPQVIFVPPAPLHPHIYSNGHICLDILYDSWSPAMTVSSVCISILSMLSSSPEKQRPTFFSVTDHYV

SEQ ID NO: 36805 - DNA, 529 bp, Arabidopsis thaliana
  misc_feature (1)..(529): Ceres Seq. ID no. 13491786
  misc_feature: MA Experiment ID: 108434 Result: Down-regulated in Transcription
  misc_feature: MA Experiment 108434 PARAMETER Experiment Name: At_Root_Tips_cDNA_P Parameter: Tissue Value: Root Tips
  misc_feature: MA Experiment ID: 108435 Result: Up-regulated in Transcription
  misc_feature: MA Experiment 108435 PARAMETER Experiment Name: At_stm_Mutants_cDNA_P Parameter: Plant Line Value: wt Landsburg vs stm
  misc_feature: MA Experiment 108435 PARAMETER Experiment Name: At_stm_Mutants_cDNA_P Parameter: Tissue Value: Shoot Apical Meristem Region
  misc_feature: MA Experiment ID: 108461 Result: Up-regulated in Transcription
  misc_feature: MA Experiment 108461 PARAMETER Experiment Name: At_Germinating_Seeds_cDNA_P Parameter: Age (day) Value: 1 vs. 0
  misc_feature: MA Experiment 108461 PARAMETER Experiment Name: At_Germinating_Seeds_cDNA_P Parameter: Tissue Value: Germinating Seeds
  misc_feature: MA Experiment ID: 108462 Result: Up-regulated in Transcription
  misc_feature: MA Experiment 108462 PARAMETER Experiment Name: At_Germinating_Seeds_cDNA_P Parameter: Age (day) Value: 2 vs. 0
  misc_feature: MA Experiment 108462 PARAMETER Experiment Name: At_Germinating_Seeds_cDNA_P Parameter: Tissue Value: Germinating Seeds
  misc_feature: MA Experiment ID: 108561 Result: Down-regulated in Transcription
  misc_feature: MA Experiment 108561 PARAMETER Experiment Name: At_100uM_ABA_cDNA_P Parameter: Timepoint (hr) Value: 6
  misc_feature: MA Experiment 108561 PARAMETER Experiment Name: At_100uM_ABA_cDNA_P Parameter: Tissue Value: Aerial
  misc_feature: MA Experiment 108561 PARAMETER Experiment Name: At_100uM_ABA_cDNA_P Parameter: Treatment Value: 100uM ABA vs. No Treatment
  misc_feature: MA Experiment ID: 108577 Result: Down-regulated in Transcription
  misc_feature: MA Experiment 108577 PARAMETER Experiment Name: At_42deg_Heat_cDNA_P Parameter: Temperature (deg C) Value: 42 vs. 22
  misc_feature: MA Experiment 108577 PARAMETER Experiment Name: At_42deg_Heat_cDNA_P Parameter: Timepoint (hr) Value: 6
  misc_feature: MA Experiment 108577 PARAMETER Experiment Name: At_42deg_Heat_cDNA_P Parameter: Tissue Value: Aerial
  misc_feature: MA Experiment ID: 108595 Result: Up-regulated in Transcription
  misc_feature: MA Experiment 108595 PARAMETER Experiment Name: At_Ler-pi_Ovule_cDNA_P Parameter: Plant Line Value: null
  misc_feature: MA Experiment ID: 20000069 Result: Down-regulated in Transcription
  misc_feature: MA Experiment 20000069 PARAMETER Experiment Name: At_100uM_ABA_Mutants_cDNA_P Parameter: Plant Line Value: CS23
  misc_feature: MA Experiment 20000069 PARAMETER Experiment Name: At_100uM_ABA_Mutants_cDNA_P Parameter: Timepoint (hr) Value: 6
  misc_feature: MA Experiment 20000069 PARAMETER Experiment Name: At_100uM_ABA_Mutants_cDNA_P Parameter: Tissue Value: Aerial
  misc_feature: MA Experiment 20000069 PARAMETER Experiment Name: At_100uM_ABA_Mutants_cDNA_P Parameter: Treatment Value: 100uM ABA vs. No Treatment
  misc_feature: MA Experiment ID: 20000093 Result: Down-regulated in Transcription
  misc_feature: MA Experiment 20000093 PARAMETER Experiment Name: At_42deg_Heat_cDNA_P Parameter: Temperature (deg C) Value: 42 vs. 22
  misc_feature: MA Experiment 20000093 PARAMETER Experiment Name: At_42deg_Heat_cDNA_P Parameter: Timepoint (hr) Value: 0.5
  misc_feature: MA Experiment 20000093 PARAMETER Experiment Name: At_42deg_Heat_cDNA_P Parameter: Tissue Value: Aerial
  misc_feature: MA Experiment ID: 20000111 Result: Down-regulated in Transcription
  misc_feature: MA Experiment 20000111 PARAMETER Experiment Name: At_42deg_Heat_cDNA_P Parameter: Temperature (deg C) Value: 42 vs. 22
  misc_feature: MA Experiment 20000111 PARAMETER Experiment Name: At_42deg_Heat_cDNA_P Parameter: Timepoint (hr) Value: 6
  misc_feature: MA Experiment 20000111 PARAMETER Experiment Name: At_42deg_Heat_cDNA_P Parameter: Tissue Value: Aerial
  misc_feature: MA Experiment ID: 20000112 Result: Down-regulated in Transcription
  misc_feature: MA Experiment 20000112 PARAMETER Experiment Name: At_42deg_Heat_cDNA_P Parameter: Temperature (deg C) Value: 42 vs. 22
  misc_feature: MA Experiment 20000112 PARAMETER Experiment Name: At_42deg_Heat_cDNA_P Parameter: Timepoint (hr) Value: 2
  misc_feature: MA Experiment 20000112 PARAMETER Experiment Name: At_42deg_Heat_cDNA_P Parameter: Tissue Value: Aerial
  misc_feature: MA Experiment ID: 20000113 Result: Down-regulated in Transcription
  misc_feature: MA Experiment 20000113 PARAMETER Experiment Name: At_42deg_Heat_cDNA_P Parameter: Temperature (deg C) Value: 42 vs. 22
  misc_feature: MA Experiment 20000113 PARAMETER Experiment Name: At_42deg_Heat_cDNA_P Parameter: Timepoint (hr) Value: 8
  misc_feature: MA Experiment 20000113 PARAMETER Experiment Name: At_42deg_Heat_cDNA_P Parameter: Tissue Value: Aerial
  misc_feature: MA Experiment ID: 20000117 Result: Down-regulated in Transcription
  misc_feature: MA Experiment 20000117 PARAMETER Experiment Name: At_100uM_ABA_Mutants_cDNA_P Parameter: Plant Line Value: Columbia
  misc_feature: MA Experiment 20000117 PARAMETER Experiment Name: At_100uM_ABA_Mutants_cDNA_P Parameter: Timepoint (hr) Value: 6
  misc_feature: MA Experiment 20000117 PARAMETER Experiment Name: At_100uM_ABA_Mutants_cDNA_P Parameter: Tissue Value: Aerial
  misc_feature: MA Experiment 20000117 PARAMETER Experiment Name: At_100uM_ABA_Mutants_cDNA_P Parameter: Treatment Value: 100uM ABA vs. No Treatment
  misc_feature: MA Experiment ID: 20000144 Result: Down-regulated in Transcription
  misc_feature: MA Experiment 20000144 PARAMETER Experiment Name: At_42deg_Heat_cDNA_P Parameter: Temperature (deg C) Value: 42 vs. 22
  misc_feature: MA Experiment 20000144 PARAMETER Experiment Name: At_42deg_Heat_cDNA_P Parameter: Timepoint (hr) Value: 1
  misc_feature: MA Experiment 20000144 PARAMETER Experiment Name: At_42deg_Heat_cDNA_P Parameter: Tissue Value: Aerial
  misc_feature: MA Experiment ID: 20000171 Result: Down-regulated in Transcription
  misc_feature: MA Experiment 20000171 PARAMETER Experiment Name: At_42deg_Heat_P Parameter: Age (day) Value: 14
  misc_feature: MA Experiment 20000171 PARAMETER Experiment Name: At_42deg_Heat_P Parameter: Organism Value: A. thaliana
  misc_feature: MA Experiment 20000171 PARAMETER Experiment Name: At_42deg_Heat_P Parameter: Plant Line Value: WS
  misc_feature: MA Experiment 20000171 PARAMETER Experiment Name: At_42deg_Heat_P Parameter: Temperature (deg C) Value: 42 vs. 22
  misc_feature: MA Experiment 20000171 PARAMETER Experiment Name: At_42deg_Heat_P Parameter: Timepoint (hr) Value: 1
  misc_feature: MA Experiment 20000171 PARAMETER Experiment Name: At_42deg_Heat_P Parameter: Tissue Value: Aerial
  misc_feature: MA Experiment ID: 20000173 Result: Down-regulated in Transcription
  misc_feature: MA Experiment 20000173 PARAMETER Experiment Name: At_42deg_Heat_P Parameter: Age (day) Value: 14
  misc_feature: MA Experiment 20000173 PARAMETER Experiment Name: At_42deg_Heat_P Parameter: Organism Value: A. thaliana
  misc_feature: MA Experiment 20000173 PARAMETER Experiment Name: At_42deg_Heat_P Parameter: Plant Line Value: WS
  misc_feature: MA Experiment 20000173 PARAMETER Experiment Name: At_42deg_Heat_P Parameter: Temperature (deg C) Value: 42 vs. 22
  misc_feature: MA Experiment 20000173 PARAMETER Experiment Name: At_42deg_Heat_P Parameter: Timepoint (hr) Value: 6
  misc_feature: MA Experiment 20000173 PARAMETER Experiment Name: At_42deg_Heat_P Parameter: Tissue Value: Aerial
  misc_feature: MA Experiment ID: 20000179 Result: Up-regulated in Transcription
  misc_feature: MA Experiment 20000179 PARAMETER Experiment Name: At_Germinating_Seeds_P Parameter: Age (hr) Value: 6 vs. 0
  misc_feature: MA Experiment 20000179 PARAMETER Experiment Name: At_Germinating_Seeds_P Parameter: Tissue Value: Germinating Seeds
  misc_feature: MA Experiment ID: 20000180 Result: Up-regulated in Transcription
  misc_feature: MA Experiment 20000180 PARAMETER Experiment Name: At_Germinating_Seeds_P Parameter: Age (hr) Value: 24 vs. 0
  misc_feature: MA Experiment 20000180 PARAMETER Experiment Name: At_Germinating_Seeds_P Parameter: Tissue Value: Germinating Seeds
  misc_feature: MA Experiment ID: 20000184 Result: Down-regulated in Transcription
  misc_feature: MA Experiment 20000184 PARAMETER Experiment Name: At_Shoots__P Parameter: Age (day) Value: 7
  misc_feature: MA Experiment 20000184 PARAMETER Experiment Name: At_Shoots__P Parameter: Tissue Value: Shoots vs. Whole Plant
  misc_feature: MA Experiment ID: 20000185 Result: Down-regulated in Transcription
  misc_feature: MA Experiment 20000185 PARAMETER Experiment Name: At_Roots__P Parameter: Age (day) Value: 7 vs. 21
  misc_feature: MA Experiment 20000185 PARAMETER Experiment Name: At_Roots__P Parameter: Organism Value: A. thaliana
  misc_feature: MA Experiment 20000185 PARAMETER Experiment Name: At_Roots__P Parameter: Tissue Value: Roots vs. Whole Plant
  misc_feature: MA Experiment ID: 20000224 Result: Up-regulated in Transcription
  misc_feature: MA Experiment ID: 20000227 Result: Down-regulated in Transcription
  misc_feature: MA Experiment 20000227 PARAMETER Experiment Name: At_Root-Tips-vs-Tops_P Parameter: Tissue Value: Root Tips vs. Root Tops
  misc_feature: MA Experiment ID: 20000234 Result: Up-regulated in Transcription
  misc_feature: MA Experiment 20000234 PARAMETER Experiment Name: At_Siliques_P Parameter: Age (day) Value: 21
  misc_feature: MA Experiment 20000234 PARAMETER Experiment Name: At_Siliques_P Parameter: Organism Value: A. thaliana
  misc_feature: MA Experiment 20000234 PARAMETER Experiment Name: At_Siliques_P Parameter: Plant Line Value: WS
  misc_feature: MA Experiment 20000234 PARAMETER Experiment Name: At_Siliques_P Parameter: Tissue Value: Less Than 5mm Siliques vs. Whole Plant
  misc_feature: MA Experiment ID: 20000235 Result: Up-regulated in Transcription
  misc_feature: MA Experiment 20000235 PARAMETER Experiment Name: At_Siliques_P Parameter: Age (day) Value: 21
  misc_feature: MA Experiment 20000235 PARAMETER Experiment Name: At_Siliques_P Parameter: Organism Value: A. thaliana
  misc_feature: MA Experiment 20000235 PARAMETER Experiment Name: At_Siliques_P Parameter: Plant Line Value: WS
  misc_feature: MA Experiment 20000235 PARAMETER Experiment Name: At_Siliques_P Parameter: Tissue Value: 5-10mm Siliques vs. Whole Plant
  misc_feature: MA Experiment ID: 20000264 Result: Up-regulated in Transcription
  misc_feature: MA Experiment 20000264 PARAMETER Experiment Name: At_Open_Flower_P Parameter: Age (day) Value: 21
  misc_feature: MA Experiment 20000264 PARAMETER Experiment Name: At_Open_Flower_P Parameter: Plant Line Value: WS
  misc_feature: MA Experiment 20000264 PARAMETER Experiment Name: At_Open_Flower_P Parameter: Tissue Value: Open Flower vs. Whole Plant
  misc_feature: MA Experiment ID: 20000265 Result: Up-regulated in Transcription
  misc_feature: MA Experiment 20000265 PARAMETER Experiment Name: At_Open_Flower_P Parameter: Age (day) Value: 21
  misc_feature: MA Experiment 20000265 PARAMETER Experiment Name: At_Open_Flower_P Parameter: Plant Line Value: WS
  misc_feature: MA Experiment 20000265 PARAMETER Experiment Name: At_Open_Flower_P Parameter: Tissue Value: Closed Flower vs. Whole Plant
  misc_feature: MA Experiment ID: 20000286 Result: Up-regulated in Transcription
  misc_feature: MA Experiment 20000286 PARAMETER Experiment Name: At_Open_Flower_P Parameter: Age (day) Value: 21
  misc_feature: MA Experiment 20000286 PARAMETER Experiment Name: At_Open_Flower_P Parameter: Plant Line Value: WS
  misc_feature: MA Experiment 20000286 PARAMETER Experiment Name: At_Open_Flower_P Parameter: Tissue Value: Half Open vs. Whole Plant
  misc_feature: MA Experiment ID: 20000437 Result: Down-regulated in Transcription
  misc_feature: MA Experiment 20000437 PARAMETER Experiment Name: At_Drought_P Parameter: Age (day) Value: 8
  misc_feature: MA Experiment 20000437 PARAMETER Experiment Name: At_Drought_P Parameter: Organism Value: A. thaliana
  misc_feature: MA Experiment 20000437 PARAMETER Experiment Name: At_Drought_P Parameter: Plant Line Value: WS
  misc_feature: MA Experiment 20000437 PARAMETER Experiment Name: At_Drought_P Parameter: Timepoint (hr) Value: 24
  misc_feature: MA Experiment 20000437 PARAMETER Experiment Name: At_Drought_P Parameter: Tissue Value: Whole Plant
  misc_feature: MA Experiment 20000437 PARAMETER Experiment Name: At_Drought_P Parameter: Treatment Value: Drought vs. No Drought
  misc_feature: MA Experiment ID: 20000439 Result: Down-regulated in Transcription
  misc_feature: MA Experiment 20000439 PARAMETER Experiment Name: At_Roots__P Parameter: Age (day) Value: 14 vs. 21
  misc_feature: MA Experiment 20000439 PARAMETER Experiment Name: At_Roots__P Parameter: Organism Value: A. thaliana
  misc_feature: MA Experiment 20000439 PARAMETER Experiment Name: At_Roots__P Parameter: Tissue Value: Roots vs. Whole Plant
  misc_feature: MA Experiment ID: 20000451 Result: Up-regulated in Transcription
  misc_feature: MA Experiment 20000451 PARAMETER Experiment Name: At_CS6879_Shoots-Roots_P Parameter: Age (day) Value: 14
  misc_feature: MA Experiment 20000451 PARAMETER Experiment Name: At_CS6879_Shoots-Roots_P Parameter: Organism Value: A. thaliana
  misc_feature: MA Experiment 20000451 PARAMETER Experiment Name: At_CS6879_Shoots-Roots_P Parameter: Plant Line Value: CS6879 vs. WS
  misc_feature: MA Experiment 20000451 PARAMETER Experiment Name: At_CS6879_Shoots-Roots_P Parameter: Tissue Value: Roots
  misc_feature: MA Experiment ID: 20000460 Result: Up-regulated in Transcription
  misc_feature: MA Experiment 20000460 PARAMETER Experiment Name: At_10percent_PEG_P Parameter: Age (day) Value: 12
  misc_feature: MA Experiment 20000460 PARAMETER Experiment Name: At_10percent_PEG_P Parameter: Organism Value: A. thaliana
  misc_feature: MA Experiment 20000460 PARAMETER Experiment Name: At_10percent_PEG_P Parameter: Plant Line Value: WS
  misc_feature: MA Experiment 20000460 PARAMETER Experiment Name: At_10percent_PEG_P Parameter: Timepoint (day) Value: 12
  misc_feature: MA Experiment 20000460 PARAMETER Experiment Name: At_10percent_PEG_P Parameter: Tissue Value: Whole Plant
  misc_feature: MA Experiment 20000460 PARAMETER Experiment Name: At_10percent_PEG_P Parameter: Treatment Value: 10percent PEG vs. No Treatment
  misc_feature: MA Experiment ID: 20000495 Result: Up-regulated in Transcription
  misc_feature: MA Experiment 20000495 PARAMETER Experiment Name: At_Guard_Cells_P Parameter: Harvest Date Value: 8/2/2002
  misc_feature: MA Experiment 20000495 PARAMETER Experiment Name: At_Guard_Cells_P Parameter: Organism Value: A. thaliana
  misc_feature: MA Experiment 20000495 PARAMETER Experiment Name: At_Guard_Cells_P Parameter: Tissue Value: Guard Cells vs. Leaves
  misc_feature: MA Experiment ID: 20000573 Result: Down-regulated in Transcription
  misc_feature: MA Experiment 20000573 PARAMETER Experiment Name: At_100uM_ABA_Mutants__P Parameter: Organism Value: A. thaliana
  misc_feature: MA Experiment 20000573 PARAMETER Experiment Name: At_100uM_ABA_Mutants__P Parameter: Plant Line Value: CS22 vs. Ler wt
  misc_feature: MA Experiment 20000573 PARAMETER Experiment Name: At_100uM_ABA_Mutants__P Parameter: Timepoint (hr) Value: N/A
  misc_feature: MA Experiment 20000573 PARAMETER Experiment Name: At_100uM_ABA_Mutants__P Parameter: Tissue Value: Whole Plant
  misc_feature: MA Experiment 20000573 PARAMETER Experiment Name: At_100uM_ABA_Mutants__P Parameter: Treatment Value: None
  misc_feature: MA Experiment ID: 20000574 Result: Down-regulated in Transcription
  misc_feature: MA Experiment 20000574 PARAMETER Experiment Name: At_100uM_ABA_Mutants__P Parameter: Organism Value: A. thaliana
  misc_feature: MA Experiment 20000574 PARAMETER Experiment Name: At_100uM_ABA_Mutants__P Parameter: Plant Line Value: CS23 vs. Ler wt
  misc_feature: MA Experiment 20000574 PARAMETER Experiment Name: At_100uM_ABA_Mutants__P Parameter: Timepoint (hr) Value: N/A
  misc_feature: MA Experiment 20000574 PARAMETER Experiment Name: At_100uM_ABA_Mutants__P Parameter: Tissue Value: Whole Plant
  misc_feature: MA Experiment 20000574 PARAMETER Experiment Name: At_100uM_ABA_Mutants__P Parameter: Treatment Value: None
  misc_feature: MA Experiment ID: 20000794 Result: Down-regulated in Transcription
  misc_feature: MA Experiment 20000794 PARAMETER Experiment Name: At_Petals_P Parameter: Age (day) Value: 23-25 days
  misc_feature: MA Experiment 20000794 PARAMETER Experiment Name: At_Petals_P Parameter: Plant Line Value: WS
  misc_feature: MA Experiment 20000794 PARAMETER Experiment Name: At_Petals_P Parameter: Tissue Value: Petals vs. Whole plant
  misc_feature: MA Experiment ID: 20001248 Result: Down-regulated in Transcription
  misc_feature: MA Experiment 20001248 PARAMETER Experiment Name: At_Far-red-induction_P Parameter: Age (day) Value: 7
  misc_feature: MA Experiment 20001248 PARAMETER Experiment Name: At_Far-red-induction_P Parameter: Light Value: Far-red vs. White
  misc_feature: MA Experiment 20001248 PARAMETER Experiment Name: At_Far-red-induction_P Parameter: Organism Value: A. thaliana
  misc_feature: MA Experiment 20001248 PARAMETER Experiment Name: At_Far-red-induction_P Parameter: Plant Line Value: Columbia
  misc_feature: MA Experiment 20001248 PARAMETER Experiment Name: At_Far-red-induction_P Parameter: Timepoint (hr) Value: 4
  misc_feature: MA Experiment 20001248 PARAMETER Experiment Name: At_Far-red-induction_P Parameter: Tissue Value: Whole Plant
  misc_feature: MA Experiment ID: 20001450 Result: Down-regulated in Transcription
  misc_feature: MA Experiment 20001450 PARAMETER Experiment Name: At_Far-red-induction_P Parameter: Age (day) Value: 7
  misc_feature: MA Experiment 20001450 PARAMETER Experiment Name: At_Far-red-induction_P Parameter: Light Value: Far-red vs. White
  misc_feature: MA Experiment 20001450 PARAMETER Experiment Name: At_Far-red-induction_P Parameter: Organism Value: A. thaliana
  misc_feature: MA Experiment 20001450 PARAMETER Experiment Name: At_Far-red-induction_P Parameter: Plant Line Value: Columbia
  misc_feature: MA Experiment 20001450 PARAMETER Experiment Name: At_Far-red-induction_P Parameter: Timepoint (hr) Value: 8
  misc_feature: MA Experiment 20001450 PARAMETER Experiment Name: At_Far-red-induction_P Parameter: Tissue Value: Whole Plant
  misc_feature: MA Experiment ID: 20001451 Result: Down-regulated in Transcription
  misc_feature: MA Experiment 20001451 PARAMETER Experiment Name: At_Far-red-induction_P Parameter: Age (day) Value: 7
  misc_feature: MA Experiment 20001451 PARAMETER Experiment Name: At_Far-red-induction_P Parameter: Light Value: Far-red vs. White
  misc_feature: MA Experiment 20001451 PARAMETER Experiment Name: At_Far-red-induction_P Parameter: Organism Value: A. thaliana
  misc_feature: MA Experiment 20001451 PARAMETER Experiment Name: At_Far-red-induction_P Parameter: Plant Line Value: Columbia
  misc_feature: MA Experiment 20001451 PARAMETER Experiment Name: At_Far-red-induction_P Parameter: Timepoint (hr) Value: 24
  misc_feature: MA Experiment 20001451 PARAMETER Experiment Name: At_Far-red-induction_P Parameter: Tissue Value: Whole Plant
  misc_feature: MA Experiment ID: 20001457 Result: Up-regulated in Transcription
  misc_feature: MA Experiment 20001457 PARAMETER Experiment Name: At_50mM_NH4NO3_L-to-H_P Parameter: Age (day) Value: Undefined
  misc_feature: MA Experiment 20001457 PARAMETER Experiment Name: At_50mM_NH4NO3_L-to-H_P Parameter: Organism Value: Undefined
  misc_feature: MA Experiment 20001457 PARAMETER Experiment Name: At_50mM_NH4NO3_L-to-H_P Parameter: Plant Line Value: Undefined
  misc_feature: MA Experiment 20001457 PARAMETER Experiment Name: At_50mM_NH4NO3_L-to-H_P Parameter: Timepoint (hr) Value: 0.5
  misc_feature: MA Experiment 20001457 PARAMETER Experiment Name: At_50mM_NH4NO3_L-to-H_P Parameter: Tissue Value: Siliques
  misc_feature: MA Experiment 20001457 PARAMETER Experiment Name: At_50mM_NH4NO3_L-to-H_P Parameter: Treatment Value: 50mM NH4NO3 vs. 100mM Manitol
  misc_feature: MA Experiment ID: 20001555 Result: Down-regulated in Transcription
  misc_feature: MA Experiment 20001555 PARAMETER Experiment Name: At_Drought_Soil_Dry_P Parameter: Age (day) Value: 24
  misc_feature: MA Experiment 20001555 PARAMETER Experiment Name: At_Drought_Soil_Dry_P Parameter: Organism Value: A. thaliana
  misc_feature: MA Experiment 20001555 PARAMETER Experiment Name: At_Drought_Soil_Dry_P Parameter: Plant Line Value: WS
  misc_feature: MA Experiment 20001555 PARAMETER Experiment Name: At_Drought_Soil_Dry_P Parameter: Post Timepoint (hr) Value: None
  misc_feature: MA Experiment 20001555 PARAMETER Experiment Name: At_Drought_Soil_Dry_P Parameter: Post-Treatment Value: None
  misc_feature: MA Experiment 20001555 PARAMETER Experiment Name: At_Drought_Soil_Dry_P Parameter: Timepoint (day) Value: 10
  misc_feature: MA Experiment 20001555 PARAMETER Experiment Name: At_Drought_Soil_Dry_P Parameter: Treatment Value: Drought vs. No Drought
  misc_feature: MA Experiment ID: 20001556 Result: Down-regulated in Transcription
  misc_feature: MA Experiment 20001556 PARAMETER Experiment Name: At_Drought_Soil_Dry_P Parameter: Age (day) Value: 26
  misc_feature: MA Experiment 20001556 PARAMETER Experiment Name: At_Drought_Soil_Dry_P Parameter: Organism Value: A. thaliana
  misc_feature: MA Experiment 20001556 PARAMETER Experiment Name: At_Drought_Soil_Dry_P Parameter: Plant Line Value: WS
  misc_feature: MA Experiment 20001556 PARAMETER Experiment Name: At_Drought_Soil_Dry_P Parameter: Post Timepoint (hr) Value: None
  misc_feature: MA Experiment 20001556 PARAMETER Experiment Name: At_Drought_Soil_Dry_P Parameter: Post-Treatment Value: None
  misc_feature: MA Experiment 20001556 PARAMETER Experiment Name: At_Drought_Soil_Dry_P Parameter: Timepoint (day) Value: 12
  misc_feature: MA Experiment 20001556 PARAMETER Experiment Name: At_Drought_Soil_Dry_P Parameter: Treatment Value: Drought vs. No Drought
  misc_feature: MA Experiment ID: 20001558 Result: Up-regulated in Transcription
  misc_feature: MA Experiment 20001558 PARAMETER Experiment Name: At_Drought_Soil_Dry_P Parameter: Age (day) Value: 27
  misc_feature: MA Experiment 20001558 PARAMETER Experiment Name: At_Drought_Soil_Dry_P Parameter: Organism Value: A. thaliana
  misc_feature: MA Experiment 20001558 PARAMETER Experiment Name: At_Drought_Soil_Dry_P Parameter: Plant Line Value: WS
  misc_feature: MA Experiment 20001558 PARAMETER Experiment Name: At_Drought_Soil_Dry_P Parameter: Post Timepoint (hr) Value: 6
  misc_feature: MA Experiment 20001558 PARAMETER Experiment Name: At_Drought_Soil_Dry_P Parameter: Post-Treatment Value: Re-Water vs. No Drought
  misc_feature: MA Experiment 20001558 PARAMETER Experiment Name: At_Drought_Soil_Dry_P Parameter: Timepoint (day) Value: 13
  misc_feature: MA Experiment 20001558 PARAMETER Experiment Name: At_Drought_Soil_Dry_P Parameter: Treatment Value: Drought vs. No Drought
  misc_feature: MA Experiment ID: 20001559 Result: Down-regulated in Transcription
  misc_feature: MA Experiment 20001559 PARAMETER Experiment Name: At_Drought_Soil_Dry_P Parameter: Age (day) Value: 28
  misc_feature: MA Experiment 20001559 PARAMETER Experiment Name: At_Drought_Soil_Dry_P Parameter: Organism Value: A. thaliana
  misc_feature: MA Experiment 20001559 PARAMETER Experiment Name: At_Drought_Soil_Dry_P Parameter: Plant Line Value: WS
  misc_feature: MA Experiment 20001559 PARAMETER Experiment Name: At_Drought_Soil_Dry_P Parameter: Post Timepoint (hr) Value: 29
  misc_feature: MA Experiment 20001559 PARAMETER Experiment Name: At_Drought_Soil_Dry_P Parameter: Post-Treatment Value: Re-Water vs. No Drought
  misc_feature: MA Experiment 20001559 PARAMETER Experiment Name: At_Drought_Soil_Dry_P Parameter: Timepoint (day) Value: 14
  misc_feature: MA Experiment 20001559 PARAMETER Experiment Name: At_Drought_Soil_Dry_P Parameter: Treatment Value: Drought vs. No Drought
  misc_feature: MA Experiment ID: 20001560 Result: Up-regulated in Transcription
  misc_feature: MA Experiment 20001560 PARAMETER Experiment Name: At_Drought_Soil_Dry_P Parameter: Age (day) Value: 28
  misc_feature: MA Experiment 20001560 PARAMETER Experiment Name: At_Drought_Soil_Dry_P Parameter: Organism Value: A. thaliana
  misc_feature: MA Experiment 20001560 PARAMETER Experiment Name: At_Drought_Soil_Dry_P Parameter: Plant Line Value: WS
  misc_feature: MA Experiment 20001560 PARAMETER Experiment Name: At_Drought_Soil_Dry_P Parameter: Post Timepoint (hr) Value: None
  misc_feature: MA Experiment 20001560 PARAMETER Experiment Name: At_Drought_Soil_Dry_P Parameter: Post-Treatment Value: None
  misc_feature: MA Experiment 20001560 PARAMETER Experiment Name: At_Drought_Soil_Dry_P Parameter: Timepoint (day) Value: 14
  misc_feature: MA Experiment 20001560 PARAMETER Experiment Name: At_Drought_Soil_Dry_P Parameter: Treatment Value: Drought vs. No Drought
ataacacaaatacaccaaaaaaaaaaaaacagaaagtaacatgagatctctcttattagccgtgtgcctggttcttgctttacactgcggtgaagcagccgtgtcttgcaacacggtgattgcggatctttacccttgcttatcctacgtgactcagggcggaccggtcccaaccctctgctgcaacggtctcacaacactcaagagtcaggctcaaacttctgtggaccgtcagggggtctgtcgttgcatcaaatctgctattggaggactcactctctctcctagaaccatccaaaatgctttggaattgccttctaaatgtggtgtcgatctcccttacaagttcagcccttccactgactgcgacagtatccagtgagacaagcagaaaatcttaaaggaagctactacaagaactataataacctaataattaataaatgagggcattggtttgctagttgctaaattgatcagtgatgtattgncattttgaatgtnctaatctcagcaggcacttatctcc

SEQ ID NO: 36806 - protein, 113 aa, Arabidopsis thaliana; identical to SEQ ID NO: 36177
  peptide (1)..(113): Ceres Seq. ID no. 13491787
  misc_feature (23)..(109): Pfam Name: Protease inhibitor/seed storage/LTP family Pfam Description: Protease inhibitor/seed storage/LTP family
  misc_feature (5)..(113): Homolog of NCBI NO: 11095210 NR Description: lipid transfer protein 3 precursor [Gossypium
  misc_feature (3)..(113): Homolog of NCBI NO: 18477856 NR Description: lipid transfer protein [Fragaria x ananassa]
  misc_feature (9)..(113): Homolog of NCBI NO: 7438274 NR Description: lipid transfer protein SDi-9, drought-induced -
  misc_feature (5)..(113): Homolog of NCBI NO: 16930759 NR Description: lipid transfer protein-like protein [Retama
  misc_feature (9)..(113): Homolog of NCBI NO: 6093512 NR Description: NONSPECIFIC LIPID-TRANSFER PROTEIN PRECURSOR
  misc_feature (4)..(113): Homolog of NCBI NO: 2497753 NR Description: NONSPECIFIC LIPID-TRANSFER PROTEIN 3 PRECURSOR
  misc_feature (3)..(113): Homolog of NCBI NO: 6782436 NR Description: lipid-transfer protein [Nicotiana glauca]
  misc_feature (8)..(113): Homolog of NCBI NO: 16903206 NR Description: lipid transfer protein precursor [Davidia
  misc_feature (1)..(113): Homolog of NCBI NO: 15241086 NR Description: lipid transfer protein, putative [Arabidopsis
  misc_feature (1)..(113): Homolog of NCBI NO: 15231964 NR Description: lipid transfer protein 6 (ltp6) [Arabidopsis

SEQ ID NO: 36807 - DNA, 610 bp, Arabidopsis thaliana
  misc_feature (1)..(610): Ceres Seq. ID no. 12420784
  misc_feature: MA Experiment ID: 108434 Result: Down-regulated in Transcription
  misc_feature: MA Experiment 108434 PARAMETER Experiment Name: At_Root_Tips_cDNA_P Parameter: Tissue Value: Root Tips
  misc_feature: MA Experiment ID: 20000184 Result: Up-regulated in Transcription
  misc_feature: MA Experiment 20000184 PARAMETER Experiment Name: At_Shoots__P Parameter: Age (day) Value: 7
  misc_feature: MA Experiment 20000184 PARAMETER Experiment Name: At_Shoots__P Parameter: Tissue Value: Shoots vs. Whole Plant
  misc_feature: MA Experiment ID: 20000227 Result: Down-regulated in Transcription
  misc_feature: MA Experiment 20000227 PARAMETER Experiment Name: At_Root-Tips-vs-Tops_P Parameter: Tissue Value: Root Tips vs. Root Tops
  misc_feature: MA Experiment ID: 20000234 Result: Up-regulated in Transcription
  misc_feature: MA Experiment 20000234 PARAMETER Experiment Name: At_Siliques_P Parameter: Age (day) Value: 21
  misc_feature: MA Experiment 20000234 PARAMETER Experiment Name: At_Siliques_P Parameter: Organism Value: A. thaliana
  misc_feature: MA Experiment 20000234 PARAMETER Experiment Name: At_Siliques_P Parameter: Plant Line Value: WS
  misc_feature: MA Experiment 20000234 PARAMETER Experiment Name: At_Siliques_P Parameter: Tissue Value: Less Than 5mm Siliques vs. Whole Plant
  misc_feature: MA Experiment ID: 20000235 Result: Up-regulated in Transcription
  misc_feature: MA Experiment 20000235 PARAMETER Experiment Name: At_Siliques_P Parameter: Age (day) Value: 21
  misc_feature: MA Experiment 20000235 PARAMETER Experiment Name: At_Siliques_P Parameter: Organism Value: A. thaliana
  misc_feature: MA Experiment 20000235 PARAMETER Experiment Name: At_Siliques_P Parameter: Plant Line Value: WS
  misc_feature: MA Experiment 20000235 PARAMETER Experiment Name: At_Siliques_P Parameter: Tissue Value: 5-10mm Siliques vs. Whole Plant
  misc_feature: MA Experiment ID: 20000495 Result: Up-regulated in Transcription
  misc_feature: MA Experiment 20000495 PARAMETER Experiment Name: At_Guard_Cells_P Parameter: Harvest Date Value: 8/2/2002
  misc_feature: MA Experiment 20000495 PARAMETER Experiment Name: At_Guard_Cells_P Parameter: Organism Value: A. thaliana
  misc_feature: MA Experiment 20000495 PARAMETER Experiment Name: At_Guard_Cells_P Parameter: Tissue Value: Guard Cells vs. Leaves
  misc_feature: MA Experiment ID: 20001760 Result: Up-regulated in Transcription
  misc_feature: MA Experiment 20001760 PARAMETER Experiment Name: At_50mM_NH4NO3_L-to-H_P Parameter: Timepoint (hr) Value: 2
  misc_feature: MA Experiment 20001760 PARAMETER Experiment Name: At_50mM_NH4NO3_L-to-H_P Parameter: Tissue Value: Siliques
  misc_feature: MA Experiment 20001760 PARAMETER Experiment Name: At_50mM_NH4NO3_L-to-H_P Parameter: Treatment Value: 50mM NH4NO3 vs 100mM Mannitol
ctcacttttgttctctgttgcatcatcttccaaactcccgaagaagaagaaaataactacaatgagtcaacaacctcctgctgttggtgttcctccttctcatgcttatccggcggaaggaccacccaaggacgcttatccacctccgggacaaccctatcctcagcaaggatatcctcctccgcagggatatcctcaacaaggttatcctcctcaaggttatcctccgcaggggtaccctgcaacaaggatatcctcaacaaggttacccacctcagcaacaacagcaacagaaacacagtcctggtatgcttgaaggatgtattgctgctctgtgctgttgctgtgtcttggacgcttgcttctgagtggaggtctccgcttgaagctgcaaaattggtttataccgatgatctcatctcattctctttcgtttctctacagacttgactctcttctaagcattttatcttagttactattagattatttggattttgccaaatgggaatgtaaatggttgggtgacccaattcatgttgcacattattggcttttaccctctgctttttcttcctagcttcatctaatgattgcaccctatttattt

SEQ ID NO: 36808 - protein, 149 aa, Arabidopsis thaliana
  peptide (1)..(149): Ceres Seq. ID no. 12420785
  misc_feature (82)..(149): Homolog of NCBI NO: 30694583 NR Description: expressed protein [Arabidopsis thaliana]
LTFVLCCIIFQTPEEEENNYNESTTSCCWCSSFSCLSGGRTTQGRLSTSGTTLSSARISSSAGISSTRLSSSRLSSAGVPCNKDILNKVTHLSNNSNRNTVLVCLKDVLLLCAVAVSWTLASEWRSPLEAAKLVYTDDLISFSFVSLQT

SEQ ID NO: 36809 - protein, 104 aa, Arabidopsis thaliana
  peptide (1)..(104): Ceres Seq. ID no. 12420786
  misc_feature (9)..(79): Pfam Name: Extensin-like region Pfam Description: Extensin-like region
  misc_feature (21)..(80): Homolog of NCBI NO: 40746240 NR Description: hypothetical protein AN0754.2 [Aspergillus
  misc_feature (23)..(80): Homolog of NCBI NO: 6469591 NR Description: unknown [Eufolliculina uhligi]
  misc_feature (25)..(81): Homolog of NCBI NO: 40746240 NR Description: hypothetical protein AN0754.2 [Aspergillus
  misc_feature (23)..(80): Homolog of NCBI NO: 40538901 NR Description: expressed protein [Oryza sativa (japonica
  misc_feature (21)..(80): Homolog of NCBI NO: 15227350 NR Description: unknown protein; protein id: At2g41420.1
  misc_feature (50)..(80): Homolog of NCBI NO: 34393718 NR Description: adhesive/proline-rich protein homolog-like
  misc_feature (14)..(80): Homolog of NCBI NO: 15229624 NR Description: putative protein; protein id: At3g49840.1
  misc_feature (48)..(81): Homolog of NCBI NO: 21618167 NR Description: adhesive/proline-rich protein homolog
  misc_feature (23)..(76): Homolog of NCBI NO: 34393718 NR Description: adhesive/proline-rich protein homolog-like
  misc_feature (21)..(80): Homolog of NCBI NO: 21554421 NR Description: unknown [Arabidopsis thaliana]
SLLFSVASSSKLPKKKKITTMSQQPPAVGVPPSHAYPAEGPPKDAYPPPGQPYPQQGYPPPQGYPQQGYPPQGYPPQGYPATRISSTRLPTSATTATETQSWYA

SEQ ID NO: 36810 - protein, 88 aa, Arabidopsis thaliana
  peptide (1)..(88): Ceres Seq. ID no. 12420787
  misc_feature (48)..(88): Homolog of NCBI NO: 40538901 NR Description: expressed protein [Oryza sativa (japonica
  misc_feature (44)..(88): Homolog of NCBI NO: 15227350 NR Description: unknown protein; protein id: At2g41420.1
  misc_feature (43)..(88): Homolog of NCBI NO: 6319490 NR Description: Hypothetical ORF; Ybr016wp [Saccharomyces
  misc_feature (69)..(87): Homolog of NCBI NO: 38175539 NR Description: proline-rich protein family-like
  misc_feature (50)..(88): Homolog of NCBI NO: 40746240 NR Description: hypothetical protein AN0754.2 [Aspergillus
  misc_feature (49)..(88): Homolog of NCBI NO: 15229624 NR Description: putative protein; protein id: At3g49840.1
  misc_feature (49)..(88): Homolog of NCBI NO: 21618167 NR Description: adhesive/proline-rich protein homolog
  misc_feature (48)..(88): Homolog of NCBI NO: 34393718 NR Description: adhesive/proline-rich protein homolog-like
  misc_feature (1)..(49): Homolog of NCBI NO: 30694583 NR Description: expressed protein [Arabidopsis thaliana]
  misc_feature (44)..(88): Homolog of NCBI NO: 21554421 NR Description: unknown [Arabidopsis thaliana]
MLIRRKDHPRTLIHLRDNPILSKDILLRRDILNKVILLKVILRRGTLQQGYPQQGYPPQQQQQQKHSPGMLEGCIAALCCCCVLDACF

SEQ ID NO: 36811 - protein, 84 aa, Arabidopsis thaliana
  peptide (1)..(84): Ceres Seq. ID no. 12420788
  misc_feature (1)..(59): Pfam Name: Extensin-like region Pfam Description: Extensin-like region
  misc_feature (1)..(60): Homolog of NCBI NO: 40746240 NR Description: hypothetical protein AN0754.2 [Aspergillus
  misc_feature (3)..(60): Homolog of NCBI NO: 6469591 NR Description: unknown [Eufolliculina uhligi]
  misc_feature (5)..(61): Homolog of NCBI NO: 40746240 NR Description: hypothetical protein AN0754.2 [Aspergillus
  misc_feature (3)..(60): Homolog of NCBI NO: 40538901 NR Description: expressed protein [Oryza sativa (japonica
  misc_feature (1)..(60): Homolog of NCBI NO: 15227350 NR Description: unknown protein; protein id: At2g41420.1
  misc_feature (30)..(60): Homolog of NCBI NO: 34393718 NR Description: adhesive/proline-rich protein homolog-like
  misc_feature (1)..(60): Homolog of NCBI NO: 15229624 NR Description: putative protein; protein id: At3g49840.1
  misc_feature (28)..(61): Homolog of NCBI NO: 21618167 NR Description: adhesive/proline-rich protein homolog
  misc_feature (3)..(56): Homolog of NCBI NO: 34393718 NR Description: adhesive/proline-rich protein homolog-like
  misc_feature (1)..(60): Homolog of NCBI NO: 21554421 NR Description: unknown [Arabidopsis thaliana]
MSQQPPAVGVPPSHAYPAEGPPKDAYPPPGQPYPQQGYPPPQGYPQQGYPPQGYPPQGYPATRISSTRLPTSATTATETQSWYA

SEQ ID NO: 36812 - DNA, 1494 bp, Arabidopsis thaliana
  misc_feature (1)..(1494): Ceres Seq. ID no. 13621916
  misc_feature: MA Experiment ID: 20000171 Result: Down-regulated in Transcription
  misc_feature: MA Experiment 20000171 PARAMETER Experiment Name: At_42deg_Heat_P Parameter: Age (day) Value: 14
  misc_feature: MA Experiment 20000171 PARAMETER Experiment Name: At_42deg_Heat_P Parameter: Organism Value: A. thaliana
  misc_feature: MA Experiment 20000171 PARAMETER Experiment Name: At_42deg_Heat_P Parameter: Plant Line Value: WS
  misc_feature: MA Experiment 20000171 PARAMETER Experiment Name: At_42deg_Heat_P Parameter: Temperature (deg C) Value: 42 vs. 22
  misc_feature: MA Experiment 20000171 PARAMETER Experiment Name: At_42deg_Heat_P Parameter: Timepoint (hr) Value: 1
  misc_feature: MA Experiment 20000171 PARAMETER Experiment Name: At_42deg_Heat_P Parameter: Tissue Value: Aerial
  misc_feature: MA Experiment ID: 20000173 Result: Down-regulated in Transcription
  misc_feature: MA Experiment 20000173 PARAMETER Experiment Name: At_42deg_Heat_P Parameter: Age (day) Value: 14
  misc_feature: MA Experiment 20000173 PARAMETER Experiment Name: At_42deg_Heat_P Parameter: Organism Value: A. thaliana
  misc_feature: MA Experiment 20000173 PARAMETER Experiment Name: At_42deg_Heat_P Parameter: Plant Line Value: WS
  misc_feature: MA Experiment 20000173 PARAMETER Experiment Name: At_42deg_Heat_P Parameter: Temperature (deg C) Value: 42 vs. 22
  misc_feature: MA Experiment 20000173 PARAMETER Experiment Name: At_42deg_Heat_P Parameter: Timepoint (hr) Value: 6
  misc_feature: MA Experiment 20000173 PARAMETER Experiment Name: At_42deg_Heat_P Parameter: Tissue Value: Aerial
  misc_feature: MA Experiment ID: 20000227 Result: Up-regulated in Transcription
  misc_feature: MA Experiment 20000227 PARAMETER Experiment Name: At_Root-Tips-vs-Tops_P Parameter: Tissue Value: Root Tips vs. Root Tops
  misc_feature: MA Experiment ID: 20000235 Result: Up-regulated in Transcription
  misc_feature: MA Experiment 20000235 PARAMETER Experiment Name: At_Siliques_P Parameter: Age (day) Value: 21
  misc_feature: MA Experiment 20000235 PARAMETER Experiment Name: At_Siliques_P Parameter: Organism Value: A. thaliana
  misc_feature: MA Experiment 20000235 PARAMETER Experiment Name: At_Siliques_P Parameter: Plant Line Value: WS
  misc_feature: MA Experiment 20000235 PARAMETER Experiment Name: At_Siliques_P Parameter: Tissue Value: 5-10mm Siliques vs. Whole Plant
  misc_feature: MA Experiment ID: 20000438 Result: Up-regulated in Transcription
  misc_feature: MA Experiment 20000438 PARAMETER Experiment Name: At_Shoots__P Parameter: Age (day) Value: 14
  misc_feature: MA Experiment 20000438 PARAMETER Experiment Name: At_Shoots__P Parameter: Tissue Value: Shoots vs. Whole Plant
  misc_feature: MA Experiment ID: 20001905 Result: Down-regulated in Transcription
  misc_feature: MA Experiment 20001905 PARAMETER Experiment Name: At_Drought_Reproduction_P Parameter: Age (day) Value: 40
  misc_feature: MA Experiment 20001905 PARAMETER Experiment Name: At_Drought_Reproduction_P Parameter: Organism Value: A. thaliana
  misc_feature: MA Experiment 20001905 PARAMETER Experiment Name: At_Drought_Reproduction_P Parameter: Plant Line Value: WS
  misc_feature: MA Experiment 20001905 PARAMETER Experiment Name: At_Drought_Reproduction_P Parameter: Timepoint (day) Value: 10
  misc_feature: MA Experiment 20001905 PARAMETER Experiment Name: At_Drought_Reproduction_P Parameter: Tissue Value: Rosettes
  misc_feature: MA Experiment 20001905 PARAMETER Experiment Name: At_Drought_Reproduction_P Parameter: Treatment Value: Drought vs. No Drought
  misc_feature: MA Experiment ID: 20001906 Result: Down-regulated in Transcription
  misc_feature: MA Experiment 20001906 PARAMETER Experiment Name: At_Drought_Reproduction_P Parameter: Age (day) Value: 35
  misc_feature: MA Experiment 20001906 PARAMETER Experiment Name: At_Drought_Reproduction_P Parameter: Organism Value: A. thaliana
  misc_feature: MA Experiment 20001906 PARAMETER Experiment Name: At_Drought_Reproduction_P Parameter: Plant Line Value: WS
  misc_feature: MA Experiment 20001906 PARAMETER Experiment Name: At_Drought_Reproduction_P Parameter: Timepoint (day) Value: 5
  misc_feature: MA Experiment 20001906 PARAMETER Experiment Name: At_Drought_Reproduction_P Parameter: Tissue Value: Siliques
  misc_feature: MA Experiment 20001906 PARAMETER Experiment Name: At_Drought_Reproduction_P Parameter: Treatment Value: Drought vs. No Drought
  misc_feature: MA Experiment ID: 20001911 Result: Down-regulated in Transcription
  misc_feature: MA Experiment 20001911 PARAMETER Experiment Name: At_Drought_Reproduction_P Parameter: Age (day) Value: 40
  misc_feature: MA Experiment 20001911 PARAMETER Experiment Name: At_Drought_Reproduction_P Parameter: Organism Value: A. thaliana
  misc_feature: MA Experiment 20001911 PARAMETER Experiment Name: At_Drought_Reproduction_P Parameter: Plant Line Value: WS
  misc_feature: MA Experiment 20001911 PARAMETER Experiment Name: At_Drought_Reproduction_P Parameter: Timepoint (day) Value: 10
  misc_feature: MA Experiment 20001911 PARAMETER Experiment Name: At_Drought_Reproduction_P Parameter: Tissue Value: Flowers
  misc_feature: MA Experiment 20001911 PARAMETER Experiment Name: At_Drought_Reproduction_P Parameter: Treatment Value: Drought vs. No Drought
cattatggtgctgataagtatattgcatcgatggcaaatatgcttaactatcctaacaacgtgctgaacaacggtggaaggctaaggacggttttcgatgttggttgtggtgttgcgagttttggaggttatcttttatcatcggatattctcacaatgtccttggctccaaatgatgtgcatcagaaccaaatccaatttgctcttgagagagggattcctgcctccctcggtgttttagggacaaagaggctcccatacccaagcagatcttttgaactttctcactgttcacgttgcagaatcgattggctacaaagagacgggattcttcttctcgagctagacagagtacttagacctggtggttattttgcatattcatctccagaggcatatgcacaagatgaagaggatcttagaatctggagagaaatgagtgctcttgtggagcgcatgtgttggaagatcgcggcaaaaaggaatcaaaccgttatttggcagaaacctttgacaaatgattgttatctagaaagagaacctggaactcagcctcctctttgccgttctgataatgaccctgatgctgtgtggggcgtaaacatggaagcttgcattacttcttacagtgaccatgaccacaaaaccaagggaagtggattagctccatggccagctcggttaacctctcctcctcccagacttgctgattttggatattcaacgggcatgtttgagaaggacacggaactttggaggcagagagtagatacttattgggatctcttgagtccaagaatcgaatcagatacagtgaggaacataatggacatgaaagcaagcatgggctcttttgctgctgctctgaaagaaaaagatgtctgggtaatgaatgttgttcctgaggacggacctaacacgcttaaactgatatatgacagaggtttaatgggcgcggttcatagctggtgtgaagcattctcgacatatccaaggacatatgatctcctccatgcttgggatattatatcggatatcaagaaaaaaggatgtagtgaagtggatttgttactggagatggatcgaatactgcgcccgagcgggtttataatcataagggataaacaaagagtggtggattttgtgaagaagtatctaaaggcattgcattgggaagaagtaggtaccaagacagactcagattcagatcaagattcagacaatgttgtattcattgtccagaagaagctgtggttgactagtgaaagccttagagatatggagtgatgagtaagccacacgatacacaaaaattacgaccaatgatcatacaaccaacaaatttcattattgtagtagcaacattatttattaacgttgtttttaatttttctaattattgtatctttcttacattcttataagtgatgttgtttgtatgattttggtagagaagagaagacacgtataagtaaagaacgatagattcttttg

SEQ ID NO: 36813 - protein, 428 aa, Arabidopsis thaliana
  peptide (1)..(428): Ceres Seq. ID no. 13621917
  misc_feature (1)..(415): Pfam Name: Putative methyltransferase Pfam Description: Putative methyltransferase
  misc_feature (1)..(418): Homolog of NCBI NO: 37535372 NR Description: hypothetical protein [Oryza sativa (japonica
  misc_feature (53)..(428): Homolog of NCBI NO: 24030225 NR Description: unknown protein [Arabidopsis thaliana]
  misc_feature (1)..(210): Homolog of NCBI NO: 25406781 NR Description: hypothetical protein [imported] - Arabidopsis
  misc_feature (213)..(428): Homolog of NCBI NO: 25406781 NR Description: hypothetical protein [imported] - Arabidopsis
  misc_feature (1)..(428): Homolog of NCBI NO: 14423548 NR Description: Unknown protein [Arabidopsis thaliana]
  misc_feature (1)..(428): Homolog of NCBI NO: 21536697 NR Description: ankyrin-like protein [Arabidopsis thaliana]
  misc_feature (1)..(428): Homolog of NCBI NO: 18390392 NR Description: dehydration-induced protein-related [Arabidopsis
  misc_feature (1)..(428): Homolog of NCBI NO: 22331280 NR Description: dehydration-induced protein-related [Arabidopsis
  misc_feature (1)..(428): Homolog of NCBI NO: 7488052 NR Description: probable ankyrin - Arabidopsis thaliana
  misc_feature (1)..(428): Homolog of NCBI NO: 18414198 NR Description: dehydration-induced protein-related [Arabidopsis
HYGADKYIASMANMLNYPNNVLNNGGRLRTVFDVGCGVASFGGYLLSSDILTMSLAPNDVHQNQIQFALERGIPASLGVLGTKRLPYPSRSFELSHCSRCRIDWLQRDGILLLELDRVLRPGGYFAYSSPEAYAQDEEDLRIWREMSALVERMCWKIAAKRNQTVIWQKPLTNDCYLEREPGTQPPLCRSDNDPDAVWGVNMEACITSYSDHDHKTKGSGLAPWPARLTSPPPRLADFGYSTGMFEKDTELWRQRVDTYWDLLSPRIESDTVRNIMDMKASMGSFAAALKEKDVWVMNVVPEDGPNTLKLIYDRGLMGAVHSWCEAFSTYPRTYDLLHAWDIISDIKKKGCSEVDLLLEMDRILRPSGFIIIRDKQRVVDFVKKYLKALHWEEVGTKTDSDSDQDSDNVVFIVQKKLWLTSESLRDME

SEQ ID NO: 36814 - protein, 418 aa, Arabidopsis thaliana
  peptide (1)..(418): Ceres Seq. ID no. 13621918
  misc_feature (1)..(405): Pfam Name: Putative methyltransferase Pfam Description: Putative methyltransferase
  misc_feature (1)..(408): Homolog of NCBI NO: 37535372 NR Description: hypothetical protein [Oryza sativa (japonica
  misc_feature (43)..(418): Homolog of NCBI NO: 24030225 NR Description: unknown protein [Arabidopsis thaliana]
  misc_feature (1)..(200): Homolog of NCBI NO: 25406781 NR Description: hypothetical protein [imported] - Arabidopsis
  misc_feature (203)..(418): Homolog of NCBI NO: 25406781 NR Description: hypothetical protein [imported] - Arabidopsis
  misc_feature (1)..(418): Homolog of NCBI NO: 14423548 NR Description: Unknown protein [Arabidopsis thaliana]
  misc_feature (1)..(418): Homolog of NCBI NO: 21536697 NR Description: ankyrin-like protein [Arabidopsis thaliana]
  misc_feature (1)..(418): Homolog of NCBI NO: 18390392 NR Description: dehydration-induced protein-related [Arabidopsis
  misc_feature (1)..(418): Homolog of NCBI NO: 22331280 NR Description: dehydration-induced protein-related [Arabidopsis
  misc_feature (1)..(418): Homolog of NCBI NO: 7488052 NR Description: probable ankyrin - Arabidopsis thaliana
  misc_feature (1)..(418): Homolog of NCBI NO: 18414198 NR Description: dehydration-induced protein-related [Arabidopsis
MANMLNYPNNVLNNGGRLRTVFDVGCGVASFGGYLLSSDILTMSLAPNDVHQNQIQFALERGIPASLGVLGTKRLPYPSRSFELSHCSRCRIDWLQRDGILLLELDRVLRPGGYFAYSSPEAYAQDEEDLRIWREMSALVERMCWKIAAKRNQTVIWQKPLTNDCYLEREPGTQPPLCRSDNDPDAVWGVNMEACITSYSDHDHKTKGSGLAPWPARLTSPPPRLADFGYSTGMFEKDTELWRQRVDTYWDLLSPRIESDTVRNIMDMKASMGSFAAALKEKDVWVMNVVPEDGPNTLKLIYDRGLMGAVHSWCEAFSTYPRTYDLLHAWDIISDIKKKGCSEVDLLLEMDRILRPSGFIIIRDKQRVVDFVKKYLKALHWEEVGTKTDSDSDQDSDNVVFIVQKKLWLTSESLRDME

SEQ ID NO: 36815 - protein, 415 aa, Arabidopsis thaliana
  peptide (1)..(415): Ceres Seq. ID no. 13621919
  misc_feature (1)..(402): Pfam Name: Putative methyltransferase Pfam Description: Putative methyltransferase
  misc_feature (1)..(405): Homolog of NCBI NO: 37535372 NR Description: hypothetical protein [Oryza sativa (japonica
  misc_feature (40)..(415): Homolog of NCBI NO: 24030225 NR Description: unknown protein [Arabidopsis thaliana]
  misc_feature (1)..(197): Homolog of NCBI NO: 25406781 NR Description: hypothetical protein [imported] - Arabidopsis
  misc_feature (200)..(415): Homolog of NCBI NO: 25406781 NR Description: hypothetical protein [imported] - Arabidopsis
  misc_feature (1)..(415): Homolog of NCBI NO: 14423548 NR Description: Unknown protein [Arabidopsis thaliana]
  misc_feature (1)..(415): Homolog of NCBI NO: 21536697 NR Description: ankyrin-like protein [Arabidopsis thaliana]
  misc_feature (1)..(415): Homolog of NCBI NO: 18390392 NR Description: dehydration-induced protein-related [Arabidopsis
  misc_feature (1)..(415): Homolog of NCBI NO: 22331280 NR Description: dehydration-induced protein-related [Arabidopsis
  misc_feature (1)..(415): Homolog of NCBI NO: 7488052 NR Description: probable ankyrin - Arabidopsis thaliana
  misc_feature (1)..(415): Homolog of NCBI NO: 18414198 NR Description: dehydration-induced protein-related [Arabidopsis
MLNYPNNVLNNGGRLRTVFDVGCGVASFGGYLLSSDILTMSLAPNDVHQNQIQFALERGIPASLGVLGTKRLPYPSRSFELSHCSRCRIDWLQRDGILLLELDRVLRPGGYFAYSSPEAYAQDEEDLRIWREMSALVERMCWKIAAKRNQTVIWQKPLTNDCYLEREPGTQPPLCRSDNDPDAVWGVNMEACITSYSDHDHKTKGSGLAPWPARLTSPPPRLADFGYSTGMFEKDTELWRQRVDTYWDLLSPRIESDTVRNIMDMKASMGSFAAALKEKDVWVMNVVPEDGPNTLKLIYDRGLMGAVHSWCEAFSTYPRTYDLLHAWDIISDIKKKGCSEVDLLLEMDRILRPSGFIIIRDKQRVVDFVKKYLKALHWEEVGTKTDSDSDQDSDNVVFIVQKKLWLTSESLRDME

SEQ ID NO: 36816 - DNA, 592 bp, Arabidopsis thaliana
  misc_feature (1)..(592): Ceres Seq. ID no. 12421280
  misc_feature: MA Experiment ID: 108434 Result: Up-regulated in Transcription
  misc_feature: MA Experiment 108434 PARAMETER Experiment Name: At_Root_Tips_cDNA_P Parameter: Tissue Value: Root Tips
  misc_feature: MA Experiment ID: 108461 Result: Down-regulated in Transcription
  misc_feature: MA Experiment 108461 PARAMETER Experiment Name: At_Germinating_Seeds_cDNA_P Parameter: Age (day) Value: 1 vs. 0
  misc_feature: MA Experiment 108461 PARAMETER Experiment Name: At_Germinating_Seeds_cDNA_P Parameter: Tissue Value: Germinating Seeds
  misc_feature: MA Experiment ID: 108462 Result: Down-regulated in Transcription
  misc_feature: MA Experiment 108462 PARAMETER Experiment Name: At_Germinating_Seeds_cDNA_P Parameter: Age (day) Value: 2 vs. 0
  misc_feature: MA Experiment 108462 PARAMETER Experiment Name: At_Germinating_Seeds_cDNA_P Parameter: Tissue Value: Germinating Seeds
  misc_feature: MA Experiment ID: 108464 Result: Down-regulated in Transcription
  misc_feature: MA Experiment 108464 PARAMETER Experiment Name: At_Germinating_Seeds_cDNA_P Parameter: Age (day) Value: 4 vs. 0
  misc_feature: MA Experiment 108464 PARAMETER Experiment Name: At_Germinating_Seeds_cDNA_P Parameter: Tissue Value: Germinating Seeds
  misc_feature: MA Experiment ID: 108573 Result: Down-regulated in Transcription
  misc_feature: MA Experiment 108573 PARAMETER Experiment Name: At_Drought_cDNA_P Parameter: Timepoint (hr) Value: 6
  misc_feature: MA Experiment 108573 PARAMETER Experiment Name: At_Drought_cDNA_P Parameter: Tissue Value: Aerial
  misc_feature: MA Experiment 108573 PARAMETER Experiment Name: At_Drought_cDNA_P Parameter: Treatment Value: Drought vs. No Drought
  misc_feature: MA Experiment ID: 108595 Result: Down-regulated in Transcription
  misc_feature: MA Experiment 108595 PARAMETER Experiment Name: At_Ler-pi_Ovule_cDNA_P Parameter: Plant Line Value: null
  misc_feature: MA Experiment ID: 20000069 Result: Up-regulated in Transcription
  misc_feature: MA Experiment 20000069 PARAMETER Experiment Name: At_100uM_ABA_Mutants_cDNA_P Parameter: Plant Line Value: CS23
  misc_feature: MA Experiment 20000069 PARAMETER Experiment Name: At_100uM_ABA_Mutants_cDNA_P Parameter: Timepoint (hr) Value: 6
  misc_feature: MA Experiment 20000069 PARAMETER Experiment Name: At_100uM_ABA_Mutants_cDNA_P Parameter: Tissue Value: Aerial
  misc_feature: MA Experiment 20000069 PARAMETER Experiment Name: At_100uM_ABA_Mutants_cDNA_P Parameter: Treatment Value: 100uM ABA vs. No Treatment
  misc_feature: MA Experiment ID: 20000071 Result: Up-regulated in Transcription
  misc_feature: MA Experiment 20000071 PARAMETER Experiment Name: At_100uM_ABA_Mutants_cDNA_P Parameter: Plant Line Value: CS8104
  misc_feature: MA Experiment 20000071 PARAMETER Experiment Name: At_100uM_ABA_Mutants_cDNA_P Parameter: Timepoint (hr) Value: 6
  misc_feature: MA Experiment 20000071 PARAMETER Experiment Name: At_100uM_ABA_Mutants_cDNA_P Parameter: Tissue Value: Aerial
  misc_feature: MA Experiment 20000071 PARAMETER Experiment Name: At_100uM_ABA_Mutants_cDNA_P Parameter: Treatment Value: 100uM ABA vs. No Treatment
  misc_feature: MA Experiment ID: 20000072 Result: Up-regulated in Transcription
  misc_feature: MA Experiment 20000072 PARAMETER Experiment Name: At_100uM_ABA_Mutants_cDNA_P Parameter: Plant Line Value: CS8105
  misc_feature: MA Experiment 20000072 PARAMETER Experiment Name: At_100uM_ABA_Mutants_cDNA_P Parameter: Timepoint (hr) Value: 6
  misc_feature: MA Experiment 20000072 PARAMETER Experiment Name: At_100uM_ABA_Mutants_cDNA_P Parameter: Tissue Value: Aerial
  misc_feature: MA Experiment 20000072 PARAMETER Experiment Name: At_100uM_ABA_Mutants_cDNA_P Parameter: Treatment Value: 100uM ABA vs. No Treatment
  misc_feature: MA Experiment ID: 20000086 Result: Up-regulated in Transcription
  misc_feature: MA Experiment 20000086 PARAMETER Experiment Name: At_100uM_ABA_Mutants_cDNA_P Parameter: Plant Line Value: CS22
  misc_feature: MA Experiment 20000086 PARAMETER Experiment Name: At_100uM_ABA_Mutants_cDNA_P Parameter: Timepoint (hr) Value: 6
  misc_feature: MA Experiment 20000086 PARAMETER Experiment Name: At_100uM_ABA_Mutants_cDNA_P Parameter: Tissue Value: Aerial
  misc_feature: MA Experiment 20000086 PARAMETER Experiment Name: At_100uM_ABA_Mutants_cDNA_P Parameter: Treatment Value: 100uM ABA vs. No Treatment
  misc_feature: MA Experiment ID: 20000087 Result: Up-regulated in Transcription
  misc_feature: MA Experiment 20000087 PARAMETER Experiment Name: At_100uM_ABA_Mutants_cDNA_P Parameter: Plant Line Value: WS
  misc_feature: MA Experiment 20000087 PARAMETER Experiment Name: At_100uM_ABA_Mutants_cDNA_P Parameter: Timepoint (hr) Value: 6
  misc_feature: MA Experiment 20000087 PARAMETER Experiment Name: At_100uM_ABA_Mutants_cDNA_P Parameter: Tissue Value: Aerial
  misc_feature: MA Experiment 20000087 PARAMETER Experiment Name: At_100uM_ABA_Mutants_cDNA_P Parameter: Treatment Value: 100uM ABA vs. No Treatment
  misc_feature: MA Experiment ID: 20000088 Result: Up-regulated in Transcription
  misc_feature: MA Experiment 20000088 PARAMETER Experiment Name: At_100uM_ABA_Mutants_cDNA_P Parameter: Plant Line Value: Landsberg
  misc_feature: MA Experiment 20000088 PARAMETER Experiment Name: At_100uM_ABA_Mutants_cDNA_P Parameter: Timepoint (hr) Value: 6
  misc_feature: MA Experiment 20000088 PARAMETER Experiment Name: At_100uM_ABA_Mutants_cDNA_P Parameter: Tissue Value: Aerial
  misc_feature: MA Experiment 20000088 PARAMETER Experiment Name: At_100uM_ABA_Mutants_cDNA_P Parameter: Treatment Value: 100uM ABA vs. No Treatment
  misc_feature: MA Experiment ID: 20000089 Result: Up-regulated in Transcription
  misc_feature: MA Experiment ID: 20000090 Result: Up-regulated in Transcription
  misc_feature: MA Experiment ID: 20000117 Result: Up-regulated in Transcription
  misc_feature: MA Experiment 20000117 PARAMETER Experiment Name: At_100uM_ABA_Mutants_cDNA_P Parameter: Plant Line Value: Columbia
  misc_feature: MA Experiment 20000117 PARAMETER Experiment Name: At_100uM_ABA_Mutants_cDNA_P Parameter: Timepoint (hr) Value: 6
  misc_feature: MA Experiment 20000117 PARAMETER Experiment Name: At_100uM_ABA_Mutants_cDNA_P Parameter: Tissue Value: Aerial
  misc_feature: MA Experiment 20000117 PARAMETER Experiment Name: At_100uM_ABA_Mutants_cDNA_P Parameter: Treatment Value: 100uM ABA vs. No Treatment
  misc_feature: MA Experiment ID: 20000224 Result: Down-regulated in Transcription
  misc_feature: MA Experiment ID: 20000307 Result: Down-regulated in Transcription
  misc_feature: MA Experiment 20000307 PARAMETER Experiment Name: At_Germinating_Seeds_Sub_P Parameter: Age (hr) Value: 24 vs. 0
  misc_feature: MA Experiment 20000307 PARAMETER Experiment Name: At_Germinating_Seeds_Sub_P Parameter: Organism Value: A. thaliana
  misc_feature: MA Experiment 20000307 PARAMETER Experiment Name: At_Germinating_Seeds_Sub_P Parameter: Plant Line Value: WS
  misc_feature: MA Experiment 20000307 PARAMETER Experiment Name: At_Germinating_Seeds_Sub_P Parameter: Tissue Value: Germinating Seeds
  misc_feature: MA Experiment ID: 20000440 Result: Up-regulated in Transcription
  misc_feature: MA Experiment 20000440 PARAMETER Experiment Name: At_Closed-Flower__Sub_P Parameter: Tissue Value: Closed Flower vs. Whole Plant
attcttcatttcctctgcctctttctcagatcacaaaaccctaatttcgaatctttattcttcagaatggctttctgtaacaaactcggtggtctattgagacaaaacatttcttctaacggaaatgttccggttacgtctatgctcggatctctccggttgatgtctaccaagcttttcatcggaggtctctcatggggaaccgatgacgcatccttaagggatgcttttgctcacttcggtgacgttgttgatgctaaagttatcgttgatagagagacaggaagatcaagggggtttggatttgtcaacttcaatgatgagggcgctgcaactgctgccatatcagagatggacggaaaggaactgaatggtcgtcacatccgagtgaatcctgctaatggatagaccagtggcagctacggtggtggtgatggtggtggttactaaacagaggatgtggttgtgaagaagagttaatggttctgtttagttggtttcttctattgaatcttatgttagtacaaaacctgaatgggatttgctgaaaactcattactcttttttttttggttaccaatcaatttggttg

SEQ ID NO: 36817 - protein, 135 aa, Arabidopsis thaliana
  peptide (1)..(135): Ceres Seq. ID no. 12421281
  misc_feature (59)..(130): Pfam Name: RNA recognition motif. (a.k.a. RRM, RBD, or RNP domain) Pfam Description: RNA recognition motif. (a.k.a. RRM, RBD, or RNP
  misc_feature (23)..(135): Homolog of NCBI NO: 1084415 NR Description: RNA-binding protein - wood tobacco
  misc_feature (23)..(135): Homolog of NCBI NO: 7489099 NR Description: RNA-binding protein RGP-3 - wood tobacco
  misc_feature (23)..(135): Homolog of NCBI NO: 7439994 NR Description: glycine-rich RNA-binding protein - garden pea
  misc_feature (23)..(135): Homolog of NCBI NO: 7439995 NR Description: RNA binding protein 3 - wood tobacco
  misc_feature (23)..(135): Homolog of NCBI NO: 21553972 NR Description: glycine-rich RNA binding protein, putative
  misc_feature (23)..(135): Homolog of NCBI NO: 15229525 NR Description: glycine-rich RNA-binding protein
  misc_feature (42)..(135): Homolog of NCBI NO: 322514 NR Description: glycine-rich RNA-binding protein (clone A81) -
  misc_feature (23)..(135): Homolog of NCBI NO: 30682622 NR Description: glycine-rich RNA-binding protein (AtGRP2)
  misc_feature (23)..(135): Homolog of NCBI NO: 15236359 NR Description: glycine-rich RNA-binding protein AtGRP2
  misc_feature (23)..(135): Homolog of NCBI NO: 2826811 NR Description: AtGRP2 [Arabidopsis thaliana]
ILHFLCLFLRSQNPNFESLFFRMAFCNKLGGLLRQNISSNGNVPVTSMLGSLRLMSTKLFIGGLSWGTDDASLRDAFAHFGDVVDAKVIVDRETGRSRGFGFVNFNDEGAATAAISEMDGKELNGRHIRVNPANG

SEQ ID NO: 36818 - protein, 113 aa, Arabidopsis thaliana
  peptide (1)..(113): Ceres Seq. ID no. 12421282
  misc_feature (37)..(108): Pfam Name: RNA recognition motif. (a.k.a. RRM, RBD, or RNP domain) Pfam Description: RNA recognition motif. (a.k.a. RRM, RBD, or RNP
  misc_feature (1)..(113): Homolog of NCBI NO: 1084415 NR Description: RNA-binding protein - wood tobacco
  misc_feature (1)..(113): Homolog of NCBI NO: 7489099 NR Description: RNA-binding protein RGP-3 - wood tobacco
  misc_feature (1)..(113): Homolog of NCBI NO: 7439994 NR Description: glycine-rich RNA-binding protein - garden pea
  misc_feature (1)..(113): Homolog of NCBI NO: 7439995 NR Description: RNA binding protein 3 - wood tobacco
  misc_feature (1)..(113): Homolog of NCBI NO: 21553972 NR Description: glycine-rich RNA binding protein, putative
  misc_feature (1)..(113): Homolog of NCBI NO: 15229525 NR Description: glycine-rich RNA-binding protein
  misc_feature (20)..(113): Homolog of NCBI NO: 322514 NR Description: glycine-rich RNA-binding protein (clone A81) -
  misc_feature (1)..(113): Homolog of NCBI NO: 30682622 NR Description: glycine-rich RNA-binding protein (AtGRP2)
  misc_feature (1)..(113): Homolog of NCBI NO: 15236359 NR Description: glycine-rich RNA-binding protein AtGRP2
  misc_feature (1)..(113): Homolog of NCBI NO: 2826811 NR Description: AtGRP2 [Arabidopsis thaliana]
MAFCNKLGGLLRQNISSNGNVPVTSMLGSLRLMSTKLFIGGLSWGTDDASLRDAFAHFGDVVDAKVIVDRETGRSRGFGFVNFNDEGAATAAISEMDGKELNGRHIRVNPANG

SEQ ID NO: 36819 - protein, 88 aa, Arabidopsis thaliana
  peptide (1)..(88): Ceres Seq. ID no. 12421283
  misc_feature (12)..(83): Pfam Name: RNA recognition motif. (a.k.a. RRM, RBD, or RNP domain) Pfam Description: RNA recognition motif. (a.k.a. RRM, RBD, or RNP
  misc_feature (1)..(88): Homolog of NCBI NO: 1084415 NR Description: RNA-binding protein - wood tobacco
  misc_feature (1)..(88): Homolog of NCBI NO: 7489099 NR Description: RNA-binding protein RGP-3 - wood tobacco
  misc_feature (1)..(88): Homolog of NCBI NO: 7439994 NR Description: glycine-rich RNA-binding protein - garden pea
  misc_feature (1)..(88): Homolog of NCBI NO: 7439995 NR Description: RNA binding protein 3 - wood tobacco
  misc_feature (1)..(88): Homolog of NCBI NO: 21553972 NR Description: glycine-rich RNA binding protein, putative
  misc_feature (1)..(88): Homolog of NCBI NO: 15229525 NR Description: glycine-rich RNA-binding protein
  misc_feature (1)..(88): Homolog of NCBI NO: 322514 NR Description: glycine-rich RNA-binding protein (clone A81) -
  misc_feature (1)..(88): Homolog of NCBI NO: 30682622 NR Description: glycine-rich RNA-binding protein (AtGRP2)
  misc_feature (1)..(88): Homolog of NCBI NO: 15236359 NR Description: glycine-rich RNA-binding protein AtGRP2
  misc_feature (1)..(88): Homolog of NCBI NO: 2826811 NR Description: AtGRP2 [Arabidopsis thaliana]
MLGSLRLMSTKLFIGGLSWGTDDASLRDAFAHFGDVVDAKVIVDRETGRSRGFGFVNFNDEGAATAAISEMDGKELNGRHIRVNPANG

SEQ ID NO: 36820 - DNA, 1030 bp, Arabidopsis thaliana
  misc_feature (1)..(1030): Ceres Seq. ID no. 13576627
  misc_feature: MA Experiment ID: 20000185 Result: Down-regulated in Transcription
  misc_feature: MA Experiment 20000185 PARAMETER Experiment Name: At_Roots__P Parameter: Age (day) Value: 7 vs. 21
  misc_feature: MA Experiment 20000185 PARAMETER Experiment Name: At_Roots__P Parameter: Organism Value: A. thaliana
  misc_feature: MA Experiment 20000185 PARAMETER Experiment Name: At_Roots__P Parameter: Tissue Value: Roots vs. Whole Plant
  misc_feature: MA Experiment ID: 20000439 Result: Down-regulated in Transcription
  misc_feature: MA Experiment 20000439 PARAMETER Experiment Name: At_Roots__P Parameter: Age (day) Value: 14 vs. 21
  misc_feature: MA Experiment 20000439 PARAMETER Experiment Name: At_Roots__P Parameter: Organism Value: A. thaliana
  misc_feature: MA Experiment 20000439 PARAMETER Experiment Name: At_Roots__P Parameter: Tissue Value: Roots vs. Whole Plant
  misc_feature: MA Experiment ID: 20001557 Result: Down-regulated in Transcription
  misc_feature: MA Experiment 20001557 PARAMETER Experiment Name: At_Drought_Soil_Dry_P Parameter: Age (day) Value: 27
  misc_feature: MA Experiment 20001557 PARAMETER Experiment Name: At_Drought_Soil_Dry_P Parameter: Organism Value: A. thaliana
  misc_feature: MA Experiment 20001557 PARAMETER Experiment Name: At_Drought_Soil_Dry_P Parameter: Plant Line Value: WS
  misc_feature: MA Experiment 20001557 PARAMETER Experiment Name: At_Drought_Soil_Dry_P Parameter: Post Timepoint (hr) Value: 3
  misc_feature: MA Experiment 20001557 PARAMETER Experiment Name: At_Drought_Soil_Dry_P Parameter: Post-Treatment Value: Re-Water vs. No Drought
  misc_feature: MA Experiment 20001557 PARAMETER Experiment Name: At_Drought_Soil_Dry_P Parameter: Timepoint (day) Value: 13
  misc_feature: MA Experiment 20001557 PARAMETER Experiment Name: At_Drought_Soil_Dry_P Parameter: Treatment Value: Drought vs. No Drought
accgttaaagatgacgacgacgactgcttctctggttaagacttttctgtttcggtgcgactcgttttcatctttcaaattcaaatgcaaattcgaatctcccgcgaaaacgcgattgctctctccggcgaccgagaaacatgttgtcagatcgtcaagagcctggcgtattcgttgcttatccgatgatcctggttcgagtcatgttttcgttgcaagtagaaggaaaatggtagtcttgttgtcgacggtgcagcttctgtctcatatgcttccgcaaaacgggaacgcagctgagatttatccggtgatgcaaaacgaaataaggaaagtggtgacaaagggcaaggctgctggtgtgcttcgtttagtgtttcatgatgctggaacctttgaactggacgatcattctggtggcatcaacggatctattgcttatgaacttgagagacctgagaacataggtttgaagaaatccttaaaggcactaaatccctctcttttatctgttggcgttctagcgaaagcaaaggttaaggttgacgagatacaaccagtgtcttgggcggatatgatctctgtcgctgggtctgaagcagtttcaatatgtggcggcccaacaattccagtagttttgggaagacttgattcagcgcaacctgatccagaaggcaagctacctccagaaaccctgagtgcctcgggattgaaagaatgcttcaaaagaaaaggattttcgacccaggagcttgttgccttatctggggcacatacgattgggagtaaaggctttggagatccgacagtttttgacaatgcatactacaaaatccttcttgaaaaaccatggacgtcaacttctaagatgacgagcatggtcgggcttccttcggatcatgctttagtgcaggatgatgagtgcttaaggtgggtgaaacggtatgcagaagaccaagacaagttcttcgaagacttcacaaatgcttatatcaaactagtaaattctggggccaaatggaatatgttatga

SEQ ID NO: 36821 - protein, 342 aa, Arabidopsis thaliana
  peptide (1)..(342): Ceres Seq. ID no. 13576628
  misc_feature (108)..(317): Pfam Name: Peroxidase Pfam Description: Peroxidase
  misc_feature (105)..(336): Homolog of NCBI NO: 555576 NR Description: ascorbate peroxidase [Arabidopsis thaliana]
  misc_feature (105)..(336): Homolog of NCBI NO: 30680940 NR Description: ascorbate peroxidase (APX) [Arabidopsis thaliana]
  misc_feature (105)..(336): Homolog of NCBI NO: 6682242 NR Description: putative ascorbate peroxidase [Arabidopsis
  misc_feature (270)..(340): Homolog of NCBI NO: 24496465 NR Description: stromal ascorbate peroxidase [Retama raetam]
  misc_feature (38)..(267): Homolog of NCBI NO: 24496465 NR Description: stromal ascorbate peroxidase [Retama raetam]
  misc_feature (82)..(339): Homolog of NCBI NO: 27817866 NR Description: OJ1081_B12.15 [Oryza sativa (japonica
  misc_feature (310)..(342): Homolog of NCBI NO: 7487935 NR Description: L-ascorbate peroxidase homolog F10M6.50 -
  misc_feature (104)..(137): Homolog of NCBI NO: 7487935 NR Description: L-ascorbate peroxidase homolog F10M6.50 -
  misc_feature (186)..(284): Homolog of NCBI NO: 7487935 NR Description: L-ascorbate peroxidase homolog F10M6.50 -
  misc_feature (4)..(342): Homolog of NCBI NO: 30689347 NR Description: ascorbate peroxidase family [Arabidopsis
PLKMTTTTASLVKTFLFRCDSFSSFKFKCKFESPAKTRLLSPATEKHVVRSSRAWRIRCLSDDPGSSHVFVASRRKMVVLLSTVQLLSHMLPQNGNAAEIYPVMQNEIRKVVTKGKAAGVLRLVFHDAGTFELDDHSGGINGSIAYELERPENIGLKKSLKALNPSLLSVGVLAKAKVKVDEIQPVSWADMISVAGSEAVSICGGPTIPVVLGRLDSAQPDPEGKLPPETLSASGLKECFKRKGFSTQELVALSGAHTIGSKGFGDPTVFDNAYYKILLEKPWTSTSKMTSMVGLPSDHALVQDDECLRWVKRYAEDQDKFFEDFTNAYIKLVNSGAKWNML

SEQ ID NO: 36822 - protein, 339 aa, Arabidopsis thaliana
  peptide (1)..(339): Ceres Seq. ID no. 13576629
  misc_feature (105)..(314): Pfam Name: Peroxidase Pfam Description: Peroxidase
  misc_feature (102)..(333): Homolog of NCBI NO: 555576 NR Description: ascorbate peroxidase [Arabidopsis thaliana]
  misc_feature (102)..(333): Homolog of NCBI NO: 30680940 NR Description: ascorbate peroxidase (APX) [Arabidopsis thaliana]
  misc_feature (102)..(333): Homolog of NCBI NO: 6682242 NR Description: putative ascorbate peroxidase [Arabidopsis
  misc_feature (267)..(337): Homolog of NCBI NO: 24496465 NR Description: stromal ascorbate peroxidase [Retama raetam]
  misc_feature (35)..(264): Homolog of NCBI NO: 24496465 NR Description: stromal ascorbate peroxidase [Retama raetam]
  misc_feature (79)..(336): Homolog of NCBI NO: 27817866 NR Description: OJ1081_B12.15 [Oryza sativa (japonica
  misc_feature (307)..(339): Homolog of NCBI NO: 7487935 NR Description: L-ascorbate peroxidase homolog F10M6.50 -
  misc_feature (101)..(134): Homolog of NCBI NO: 7487935 NR Description: L-ascorbate peroxidase homolog F10M6.50 -
  misc_feature (183)..(281): Homolog of NCBI NO: 7487935 NR Description: L-ascorbate peroxidase homolog F10M6.50 -
  misc_feature (1)..(339): Homolog of NCBI NO: 30689347 NR Description: ascorbate peroxidase family [Arabidopsis
MTTTTASLVKTFLFRCDSFSSFKFKCKFESPAKTRLLSPATEKHVVRSSRAWRIRCLSDDPGSSHVFVASRRKMVVLLSTVQLLSHMLPQNGNAAEIYPVMQNEIRKVVTKGKAAGVLRLVFHDAGTFELDDHSGGINGSIAYELERPENIGLKKSLKALNPSLLSVGVLAKAKVKVDEIQPVSWADMISVAGSEAVSICGGPTIPVVLGRLDSAQPDPEGKLPPETLSASGLKECFKRKGFSTQELVALSGAHTIGSKGFGDPTVFDNAYYKILLEKPWTSTSKMTSMVGLPSDHALVQDDECLRWVKRYAEDQDKFFEDFTNAYIKLVNSGAKWNML

SEQ ID NO: 36823 - protein, 266 aa, Arabidopsis thaliana
  peptide (1)..(266): Ceres Seq. ID no. 13576630
  misc_feature (32)..(241): Pfam Name: Peroxidase Pfam Description: Peroxidase
  misc_feature (29)..(260): Homolog of NCBI NO: 555576 NR Description: ascorbate peroxidase [Arabidopsis thaliana]
  misc_feature (29)..(260): Homolog of NCBI NO: 30680940 NR Description: ascorbate peroxidase (APX) [Arabidopsis thaliana]
  misc_feature (29)..(260): Homolog of NCBI NO: 6682242 NR Description: putative ascorbate peroxidase [Arabidopsis
  misc_feature (194)..(264): Homolog of NCBI NO: 24496465 NR Description: stromal ascorbate peroxidase [Retama raetam]
  misc_feature (1)..(191): Homolog of NCBI NO: 24496465 NR Description: stromal ascorbate peroxidase [Retama raetam]
  misc_feature (6)..(263): Homolog of NCBI NO: 27817866 NR Description: OJ1081_B12.15 [Oryza sativa (japonica
  misc_feature (234)..(266): Homolog of NCBI NO: 7487935 NR Description: L-ascorbate peroxidase homolog F10M6.50 -
  misc_feature (28)..(61): Homolog of NCBI NO: 7487935 NR Description: L-ascorbate peroxidase homolog F10M6.50 -
  misc_feature (110)..(208): Homolog of NCBI NO: 7487935 NR Description: L-ascorbate peroxidase homolog F10M6.50 -
  misc_feature (1)..(266): Homolog of NCBI NO: 30689347 NR Description: ascorbate peroxidase family [Arabidopsis
MVVLLSTVQLLSHMLPQNGNAAEIYPVMQNEIRKVVTKGKAAGVLRLVFHDAGTFELDDHSGGINGSIAYELERPENIGLKKSLKALNPSLLSVGVLAKAKVKVDEIQPVSWADMISVAGSEAVSICGGPTIPVVLGRLDSAQPDPEGKLPPETLSASGLKECFKRKGFSTQELVALSGAHTIGSKGFGDPTVFDNAYYKILLEKPWTSTSKMTSMVGLPSDHALVQDDECLRWVKRYAEDQDKFFEDFTNAYIKLVNSGAKWNML

SEQ ID NO: 36824 - DNA, 1228 bp, Arabidopsis thaliana
  misc_feature (1)..(1228): Ceres Seq. ID no. 12337565
  misc_feature: MA Experiment ID: 108434 Result: Down-regulated in Transcription
  misc_feature: MA Experiment 108434 PARAMETER Experiment Name: At_Root_Tips_cDNA_P Parameter: Tissue Value: Root Tips
  misc_feature: MA Experiment ID: 108464 Result: Up-regulated in Transcription
  misc_feature: MA Experiment 108464 PARAMETER Experiment Name: At_Germinating_Seeds_cDNA_P Parameter: Age (day) Value: 4 vs. 0
  misc_feature: MA Experiment 108464 PARAMETER Experiment Name: At_Germinating_Seeds_cDNA_P Parameter: Tissue Value: Germinating Seeds
  misc_feature: MA Experiment ID: 108577 Result: Down-regulated in Transcription
  misc_feature: MA Experiment 108577 PARAMETER Experiment Name: At_42deg_Heat_cDNA_P Parameter: Temperature (deg C) Value: 42 vs. 22
  misc_feature: MA Experiment 108577 PARAMETER Experiment Name: At_42deg_Heat_cDNA_P Parameter: Timepoint (hr) Value: 6
  misc_feature: MA Experiment 108577 PARAMETER Experiment Name: At_42deg_Heat_cDNA_P Parameter: Tissue Value: Aerial
  misc_feature: MA Experiment ID: 20000111 Result: Down-regulated in Transcription
  misc_feature: MA Experiment 20000111 PARAMETER Experiment Name: At_42deg_Heat_cDNA_P Parameter: Temperature (deg C) Value: 42 vs. 22
  misc_feature: MA Experiment 20000111 PARAMETER Experiment Name: At_42deg_Heat_cDNA_P Parameter: Timepoint (hr) Value: 6
  misc_feature: MA Experiment 20000111 PARAMETER Experiment Name: At_42deg_Heat_cDNA_P Parameter: Tissue Value: Aerial
  misc_feature: MA Experiment ID: 20000185 Result: Down-regulated in Transcription
  misc_feature: MA Experiment 20000185 PARAMETER Experiment Name: At_Roots__P Parameter: Age (day) Value: 7 vs. 21
  misc_feature: MA Experiment 20000185 PARAMETER Experiment Name: At_Roots__P Parameter: Organism Value: A. thaliana
  misc_feature: MA Experiment 20000185 PARAMETER Experiment Name: At_Roots__P Parameter: Tissue Value: Roots vs. Whole Plant
  misc_feature: MA Experiment ID: 20001558 Result: Down-regulated in Transcription
  misc_feature: MA Experiment 20001558 PARAMETER Experiment Name: At_Drought_Soil_Dry_P Parameter: Age (day) Value: 27
  misc_feature: MA Experiment 20001558 PARAMETER Experiment Name: At_Drought_Soil_Dry_P Parameter: Organism Value: A. thaliana
  misc_feature: MA Experiment 20001558 PARAMETER Experiment Name: At_Drought_Soil_Dry_P Parameter: Plant Line Value: WS
  misc_feature: MA Experiment 20001558 PARAMETER Experiment Name: At_Drought_Soil_Dry_P Parameter: Post Timepoint (hr) Value: 6
  misc_feature: MA Experiment 20001558 PARAMETER Experiment Name: At_Drought_Soil_Dry_P Parameter: Post-Treatment Value: Re-Water vs. No Drought
  misc_feature: MA Experiment 20001558 PARAMETER Experiment Name: At_Drought_Soil_Dry_P Parameter: Timepoint (day) Value: 13
  misc_feature: MA Experiment 20001558 PARAMETER Experiment Name: At_Drought_Soil_Dry_P Parameter: Treatment Value: Drought vs. No Drought
  misc_feature: MA Experiment ID: 20001560 Result: Down-regulated in Transcription
  misc_feature: MA Experiment 20001560 PARAMETER Experiment Name: At_Drought_Soil_Dry_P Parameter: Age (day) Value: 28
  misc_feature: MA Experiment 20001560 PARAMETER Experiment Name: At_Drought_Soil_Dry_P Parameter: Organism Value: A. thaliana
  misc_feature: MA Experiment 20001560 PARAMETER Experiment Name: At_Drought_Soil_Dry_P Parameter: Plant Line Value: WS
  misc_feature: MA Experiment 20001560 PARAMETER Experiment Name: At_Drought_Soil_Dry_P Parameter: Post Timepoint (hr) Value: None
  misc_feature: MA Experiment 20001560 PARAMETER Experiment Name: At_Drought_Soil_Dry_P Parameter: Post-Treatment Value: None
  misc_feature: MA Experiment 20001560 PARAMETER Experiment Name: At_Drought_Soil_Dry_P Parameter: Timepoint (day) Value: 14
  misc_feature: MA Experiment 20001560 PARAMETER Experiment Name: At_Drought_Soil_Dry_P Parameter: Treatment Value: Drought vs. No Drought
ttcagaaagtgttcataactggtgtccccaaactcaaaagatctgagattgaagctgcttgtgaagattttagtaatgtcattgggtcttgccccattggtacattgttcaaagggacgctatcaagtggggtggagatagctgtggcttctgttgctactgcgtctgccaaagaatggacaaataacatagaaatgcagttcagaaagaagatcgaaatgttatccaagataaaccacaagaattttgtcaaccttcttggttactgtgaagaagaagaacctttcactaggatcttggtctttgaatatgcatcaaacggaacagtctttgaacatttacactataaagaatcagaacacttggactgggtaatgcggctaagaatagccatgggcatagcttattgccttgaccatatgcacggactcaagccacctatagtccacagcaatcttctctcatcatcagttcaactcacagaggactatgcagtcaaaattgcggatttcaattttggatacctaaaaggcccatccgagacagaaagcagcaccaatgcactcatagatacaaacatctcagaaacaacacaagaagacaatgttcacagcttcgggttgctgttgtttgaactgatgacaggaaaactcccggagtcggttaaaaaaggcgactcgatagataccggattggctgtcttcttgagaggaaagacattaagggagatggtggatccgacaattgaaagctttgacgagaagattgagaatataggtgaagtgatcaaaagctgcataagagcagacgcgaaacagagaccgataatgaaggaagtcacagggagattacgagagatcactggattatcaccagacgacactatcccaaaactttcaccgctctggtgggcagagctggaagttctgtccactgcgtgaagagacaactactgaacttcacaaaaaaatctgtaagtattaatatgaagatttgagtgaggtttttgagtctcttagaagctcttggcttctctttaggctactttcatctatcaatctatatataagtatggaacttagtttatataacggctttaaaattcggtggatctatttggtcgtttatgtcgtaaacagaaaacggtaatacccctttttggtgtgcataatgttggtgggtggttactgtctttgtaaattagtgttactatgttcttgatatgttt

SEQ ID NO: 36825 - protein, 312 aa, Arabidopsis thaliana
  peptide (1)..(312): Ceres Seq. ID no. 12337566
  misc_feature (1)..(310): Homolog of NCBI NO: 34898222 NR Description: P0034A04.22 [Oryza sativa (japonica
  misc_feature (1)..(311): Homolog of NCBI NO: 15242513 NR Description: leucine-rich repeat transmembrane protein kinase,
  misc_feature (1)..(311): Homolog of NCBI NO: 30684487 NR Description: leucine-rich repeat transmembrane protein kinase,
  misc_feature (1)..(311): Homolog of NCBI NO: 7268658 NR Description: putative protein (fragment) [Arabidopsis thaliana]
  misc_feature (1)..(311): Homolog of NCBI NO: 7486276 NR Description: hypothetical protein F28A21.50 - Arabidopsis
  misc_feature (73)..(312): Homolog of NCBI NO: 25408681 NR Description: probable protein kinase [imported] - Arabidopsis
  misc_feature (1)..(311): Homolog of NCBI NO: 28916446 NR Description: ser-thr protein kinase [Gossypium hirsutum]
  misc_feature (1)..(312): Homolog of NCBI NO: 18405327 NR Description: putative protein kinase
  misc_feature (1)..(312): Homolog of NCBI NO: 4588001 NR Description: hypothetical Ser-Thr protein kinase [Arabidopsis
  misc_feature (1)..(312): Homolog of NCBI NO: 15228810 NR Description: putative protein kinase
QKVFITGVPKLKRSEIEAACEDFSNVIGSCPIGTLFKGTLSSGVEIAVASVATASAKEWTNNIEMQFRKKIEMLSKINHKNFVNLLGYCEEEEPFTRILVFEYASNGTVFEHLHYKESEHLDWVMRLRIAMGIAYCLDHMHGLKPPIVHSNLLSSSVQLTEDYAVKIADFNFGYLKGPSETESSTNALIDTNISETTQEDNVHSFGLLLFELMTGKLPESVKKGDSIDTGLAVFLRGKTLREMVDPTIESFDEKIENIGEVIKSCIRADAKQRPIMKEVTGRLREITGLSPDDTIPKLSPLWWAELEVLSTA

SEQ ID NO: 36826 - protein, 248 aa, Arabidopsis thaliana
  peptide (1)..(248): Ceres Seq. ID no. 12337567
  misc_feature (1)..(246): Homolog of NCBI NO: 34898222 NR Description: P0034A04.22 [Oryza sativa (japonica
  misc_feature (1)..(247): Homolog of NCBI NO: 15242513 NR Description: leucine-rich repeat transmembrane protein kinase,
  misc_feature (1)..(247): Homolog of NCBI NO: 30684487 NR Description: leucine-rich repeat transmembrane protein kinase,
  misc_feature (1)..(247): Homolog of NCBI NO: 7268658 NR Description: putative protein (fragment) [Arabidopsis thaliana]
  misc_feature (1)..(247): Homolog of NCBI NO: 7486276 NR Description: hypothetical protein F28A21.50 - Arabidopsis
  misc_feature (9)..(248): Homolog of NCBI NO: 25408681 NR Description: probable protein kinase [imported] - Arabidopsis
  misc_feature (1)..(247): Homolog of NCBI NO: 28916446 NR Description: ser-thr protein kinase [Gossypium hirsutum]
  misc_feature (1)..(248): Homolog of NCBI NO: 18405327 NR Description: putative protein kinase
  misc_feature (1)..(248): Homolog of NCBI NO: 4588001 NR Description: hypothetical Ser-Thr protein kinase [Arabidopsis
  misc_feature (1)..(248): Homolog of NCBI NO: 15228810 NR Description: putative protein kinase
MQFRKKIEMLSKINHKNFVNLLGYCEEEEPFTRILVFEYASNGTVFEHLHYKESEHLDWVMRLRIAMGIAYCLDHMHGLKPPIVHSNLLSSSVQLTEDYAVKIADFNFGYLKGPSETESSTNALIDTNISETTQEDNVHSFGLLLFELMTGKLPESVKKGDSIDTGLAVFLRGKTLREMVDPTIESFDEKIENIGEVIKSCIRADAKQRPIMKEVTGRLREITGLSPDDTIPKLSPLWWAELEVLSTA

SEQ ID NO: 36827 - protein, 240 aa, Arabidopsis thaliana
  peptide (1)..(240): Ceres Seq. ID no. 12337568
  misc_feature (1)..(238): Homolog of NCBI NO: 34898222 NR Description: P0034A04.22 [Oryza sativa (japonica
  misc_feature (1)..(239): Homolog of NCBI NO: 15242513 NR Description: leucine-rich repeat transmembrane protein kinase,
  misc_feature (1)..(239): Homolog of NCBI NO: 30684487 NR Description: leucine-rich repeat transmembrane protein kinase,
  misc_feature (1)..(239): Homolog of NCBI NO: 7268658 NR Description: putative protein (fragment) [Arabidopsis thaliana]
  misc_feature (1)..(239): Homolog of NCBI NO: 7486276 NR Description: hypothetical protein F28A21.50 - Arabidopsis
  misc_feature (1)..(240): Homolog of NCBI NO: 25408681 NR Description: probable protein kinase [imported] - Arabidopsis
  misc_feature (1)..(239): Homolog of NCBI NO: 28916446 NR Description: ser-thr protein kinase [Gossypium hirsutum]
  misc_feature (1)..(240): Homolog of NCBI NO: 18405327 NR Description: putative protein kinase
  misc_feature (1)..(240): Homolog of NCBI NO: 4588001 NR Description: hypothetical Ser-Thr protein kinase [Arabidopsis
  misc_feature (1)..(240): Homolog of NCBI NO: 15228810 NR Description: putative protein kinase
MLSKINHKNFVNLLGYCEEEEPFTRILVFEYASNGTVFEHLHYKESEHLDWVMRLRIAMGIAYCLDHMHGLKPPIVHSNLLSSSVQLTEDYAVKIADFNFGYLKGPSETESSTNALIDTNISETTQEDNVHSFGLLLFELMTGKLPESVKKGDSIDTGLAVFLRGKTLREMVDPTIESFDEKIENIGEVIKSCIRADAKQRPIMKEVTGRLREITGLSPDDTIPKLSPLWWAELEVLSTA

SEQ ID NO: 36828 - DNA, 950 bp, Arabidopsis thaliana
  misc_feature (1)..(950): Ceres Seq. ID no. 13491028
  misc_feature: MA Experiment ID: 108462 Result: Up-regulated in Transcription
  misc_feature: MA Experiment 108462 PARAMETER Experiment Name: At_Germinating_Seeds_cDNA_P Parameter: Age (day) Value: 2 vs. 0
  misc_feature: MA Experiment 108462 PARAMETER Experiment Name: At_Germinating_Seeds_cDNA_P Parameter: Tissue Value: Germinating Seeds
  misc_feature: MA Experiment ID: 108463 Result: Up-regulated in Transcription
  misc_feature: MA Experiment 108463 PARAMETER Experiment Name: At_Germinating_Seeds_cDNA_P Parameter: Age (day) Value: 3 vs. 0
  misc_feature: MA Experiment 108463 PARAMETER Experiment Name: At_Germinating_Seeds_cDNA_P Parameter: Tissue Value: Germinating Seeds
  misc_feature: MA Experiment ID: 108464 Result: Up-regulated in Transcription
  misc_feature: MA Experiment 108464 PARAMETER Experiment Name: At_Germinating_Seeds_cDNA_P Parameter: Age (day) Value: 4 vs. 0
  misc_feature: MA Experiment 108464 PARAMETER Experiment Name: At_Germinating_Seeds_cDNA_P Parameter: Tissue Value: Germinating Seeds
  misc_feature: MA Experiment ID: 108579 Result: Down-regulated in Transcription
  misc_feature: MA Experiment 108579 PARAMETER Experiment Name: At_4deg_Cold_cDNA_P Parameter: Temperature (deg C) Value: 4 vs. 22
  misc_feature: MA Experiment 108579 PARAMETER Experiment Name: At_4deg_Cold_cDNA_P Parameter: Timepoint (hr) Value: 6
  misc_feature: MA Experiment 108579 PARAMETER Experiment Name: At_4deg_Cold_cDNA_P Parameter: Tissue Value: Aerial
  misc_feature: MA Experiment ID: 108585 Result: Down-regulated in Transcription
  misc_feature: MA Experiment 108585 PARAMETER Experiment Name: At_5mM_NaNP_cDNA_P Parameter: Timepoint (hr) Value: 6
  misc_feature: MA Experiment 108585 PARAMETER Experiment Name: At_5mM_NaNP_cDNA_P Parameter: Tissue Value: Aerial
  misc_feature: MA Experiment 108585 PARAMETER Experiment Name: At_5mM_NaNP_cDNA_P Parameter: Treatment Value: null
  misc_feature: MA Experiment ID: 20000180 Result: Up-regulated in Transcription
  misc_feature: MA Experiment 20000180 PARAMETER Experiment Name: At_Germinating_Seeds_P Parameter: Age (hr) Value: 24 vs. 0
  misc_feature: MA Experiment 20000180 PARAMETER Experiment Name: At_Germinating_Seeds_P Parameter: Tissue Value: Germinating Seeds
  misc_feature: MA Experiment ID: 20000185 Result: Down-regulated in Transcription
  misc_feature: MA Experiment 20000185 PARAMETER Experiment Name: At_Roots__P Parameter: Age (day) Value: 7 vs. 21
  misc_feature: MA Experiment 20000185 PARAMETER Experiment Name: At_Roots__P Parameter: Organism Value: A. thaliana
  misc_feature: MA Experiment 20000185 PARAMETER Experiment Name: At_Roots__P Parameter: Tissue Value: Roots vs. Whole Plant
  misc_feature: MA Experiment ID: 20000224 Result: Down-regulated in Transcription
  misc_feature: MA Experiment ID: 20000439 Result: Down-regulated in Transcription
  misc_feature: MA Experiment 20000439 PARAMETER Experiment Name: At_Roots__P Parameter: Age (day) Value: 14 vs. 21
  misc_feature: MA Experiment 20000439 PARAMETER Experiment Name: At_Roots__P Parameter: Organism Value: A. thaliana
  misc_feature: MA Experiment 20000439 PARAMETER Experiment Name: At_Roots__P Parameter: Tissue Value: Roots vs. Whole Plant
  misc_feature: MA Experiment ID: 20000794 Result: Down-regulated in Transcription
  misc_feature: MA Experiment 20000794 PARAMETER Experiment Name: At_Petals_P Parameter: Age (day) Value: 23-25 days
  misc_feature: MA Experiment 20000794 PARAMETER Experiment Name: At_Petals_P Parameter: Plant Line Value: WS
  misc_feature: MA Experiment 20000794 PARAMETER Experiment Name: At_Petals_P Parameter: Tissue Value: Petals vs. Whole plant
  misc_feature: MA Experiment ID: 20001451 Result: Up-regulated in Transcription
  misc_feature: MA Experiment 20001451 PARAMETER Experiment Name: At_Far-red-induction_P Parameter: Age (day) Value: 7
  misc_feature: MA Experiment 20001451 PARAMETER Experiment Name: At_Far-red-induction_P Parameter: Light Value: Far-red vs. White
  misc_feature: MA Experiment 20001451 PARAMETER Experiment Name: At_Far-red-induction_P Parameter: Organism Value: A. thaliana
  misc_feature: MA Experiment 20001451 PARAMETER Experiment Name: At_Far-red-induction_P Parameter: Plant Line Value: Columbia
  misc_feature: MA Experiment 20001451 PARAMETER Experiment Name: At_Far-red-induction_P Parameter: Timepoint (hr) Value: 24
  misc_feature: MA Experiment 20001451 PARAMETER Experiment Name: At_Far-red-induction_P Parameter: Tissue Value: Whole Plant
  misc_feature: MA Experiment ID: 20001905 Result: Down-regulated in Transcription
  misc_feature: MA Experiment 20001905 PARAMETER Experiment Name: At_Drought_Reproduction_P Parameter: Age (day) Value: 40
  misc_feature: MA Experiment 20001905 PARAMETER Experiment Name: At_Drought_Reproduction_P Parameter: Organism Value: A. thaliana
  misc_feature: MA Experiment 20001905 PARAMETER Experiment Name: At_Drought_Reproduction_P Parameter: Plant Line Value: WS
  misc_feature: MA Experiment 20001905 PARAMETER Experiment Name: At_Drought_Reproduction_P Parameter: Timepoint (day) Value: 10
  misc_feature: MA Experiment 20001905 PARAMETER Experiment Name: At_Drought_Reproduction_P Parameter: Tissue Value: Rosettes
  misc_feature: MA Experiment 20001905 PARAMETER Experiment Name: At_Drought_Reproduction_P Parameter: Treatment Value: Drought vs. No Drought
actcttactctgttctcgctacagaatctcctgggaaaaaaaaaagaaacttgatccacccgaattccccaaatcttcacaatttctggaaactctctcgatcgtgaagcagaaaagtgaggttccaaatgggttctgtttcgggtcaaacccgaattacaacgatgaacctctcgctctcaacagcagagaagaaccctaatttccgctcgtcgcttctcaattctaagaacgcaatttcagatactttaggggtctcttccaaatgcagtacattcctcaggggtcaatttcaaagaatacatttttcttggctacaacacactcgacctttgagaaaacgaacagtatttggtcacgtgagctgcgtcatgccgttaacggaagagaatgtggagagagtgttagacgaagtacgaccatctctaatggccgacggaggaaacgtggcgttgcacgaaatcgacggacttgtggtggttttaaagctacaaggagcttgtggttcgtgtcctagctcatcaatgacgttgaagatgggaatcgagagtcgtcttcgagacaagattccagagatcatgtccgttgagcagtttcttgaatccgagacaggaggtttagagctgaacgatgagaacattgagaaggttctctctgagttaaggccgtacctatccggtactggaggtggggggcttgagttagttgagattgatggttacgtggtcaaggttcgactcactggaccagctgctggagtcatgactgttcgtgtcgcgttgactcaaaaactgagggaaacaattccttctataggtgcagtccagcttctagagtgacattaacctttttattttgtaacttatatacaaggcctatttttgattcaatatattttatttccaattatataattagtacaactaatacaataaccatttctgttgaag

SEQ ID NO: 36829 - protein, 236 aa, Arabidopsis thaliana
  peptide (1)..(236): Ceres Seq. ID no. 13491029
  misc_feature (89)..(156): Pfam Name: NifU-like domain Pfam Description: NifU-like domain
  misc_feature (81)..(157): Homolog of NCBI NO: 37522446 NR Description: gsl2877 [Gloeobacter violaceus]
  misc_feature (82)..(157): Homolog of NCBI NO: 33239869 NR Description: Thioredoxin family protein
  misc_feature (82)..(157): Homolog of NCBI NO: 16332125 NR Description: NifU protein [Synechocystis sp. PCC 6803]
  misc_feature (70)..(157): Homolog of NCBI NO: 22298836 NR Description: ORF_ID:tsl1293~similar to NifU protein
  misc_feature (23)..(230): Homolog of NCBI NO: 8777425 NR Description: gene_id:K9P8.8~pir||T09896~strong similarity to
  misc_feature (65)..(235): Homolog of NCBI NO: 30698492 NR Description: NifU1 [Oryza sativa (japonica cultivar-group)]
  misc_feature (23)..(235): Homolog of NCBI NO: 18423084 NR Description: expressed protein [Arabidopsis thaliana]
  misc_feature (13)..(236): Homolog of NCBI NO: 7485833 NR Description: hypothetical protein F20B18.20 - Arabidopsis
  misc_feature (1)..(236): Homolog of NCBI NO: 21554503 NR Description: nitrogen fixation like protein [Arabidopsis
  misc_feature (1)..(236): Homolog of NCBI NO: 18416645 NR Description: nitrogen fixation protein, putative  (NifU)
MGSVSGQTRITTMNLSLSTAEKNPNFRSSLLNSKNAISDTLGVSSKCSTFLRGQFQRIHFSWLQHTRPLRKRTVFGHVSCVMPLTEENVERVLDEVRPSLMADGGNVALHEIDGLVVVLKLQGACGSCPSSSMTLKMGIESRLRDKIPEIMSVEQFLESETGGLELNDENIEKVLSELRPYLSGTGGGGLELVEIDGYVVKVRLTGPAAGVMTVRVALTQKLRETIPSIGAVQLLE

SEQ ID NO: 36830 - protein, 224 aa, Arabidopsis thaliana
  peptide (1)..(224): Ceres Seq. ID no. 13491030
  misc_feature (77)..(144): Pfam Name: NifU-like domain Pfam Description: NifU-like domain
  misc_feature (69)..(145): Homolog of NCBI NO: 37522446 NR Description: gsl2877 [Gloeobacter violaceus]
  misc_feature (70)..(145): Homolog of NCBI NO: 33239869 NR Description: Thioredoxin family protein
  misc_feature (70)..(145): Homolog of NCBI NO: 16332125 NR Description: NifU protein [Synechocystis sp. PCC 6803]
  misc_feature (58)..(145): Homolog of NCBI NO: 22298836 NR Description: ORF_ID:tsl1293~similar to NifU protein
  misc_feature (11)..(218): Homolog of NCBI NO: 8777425 NR Description: gene_id:K9P8.8~pir||T09896~strong similarity to
  misc_feature (53)..(223): Homolog of NCBI NO: 30698492 NR Description: NifU1 [Oryza sativa (japonica cultivar-group)]
  misc_feature (11)..(223): Homolog of NCBI NO: 18423084 NR Description: expressed protein [Arabidopsis thaliana]
  misc_feature (1)..(224): Homolog of NCBI NO: 7485833 NR Description: hypothetical protein F20B18.20 - Arabidopsis
  misc_feature (1)..(224): Homolog of NCBI NO: 21554503 NR Description: nitrogen fixation like protein [Arabidopsis
  misc_feature (1)..(224): Homolog of NCBI NO: 18416645 NR Description: nitrogen fixation protein, putative  (NifU)
MNLSLSTAEKNPNFRSSLLNSKNAISDTLGVSSKCSTFLRGQFQRIHFSWLQHTRPLRKRTVFGHVSCVMPLTEENVERVLDEVRPSLMADGGNVALHEIDGLVVVLKLQGACGSCPSSSMTLKMGIESRLRDKIPEIMSVEQFLESETGGLELNDENIEKVLSELRPYLSGTGGGGLELVEIDGYVVKVRLTGPAAGVMTVRVALTQKLRETIPSIGAVQLLE

SEQ ID NO: 36831 - protein, 155 aa, Arabidopsis thaliana
  peptide (1)..(155): Ceres Seq. ID no. 13491031
  misc_feature (8)..(75): Pfam Name: NifU-like domain Pfam Description: NifU-like domain
  misc_feature (1)..(76): Homolog of NCBI NO: 37522446 NR Description: gsl2877 [Gloeobacter violaceus]
  misc_feature (1)..(76): Homolog of NCBI NO: 33239869 NR Description: Thioredoxin family protein
  misc_feature (1)..(76): Homolog of NCBI NO: 16332125 NR Description: NifU protein [Synechocystis sp. PCC 6803]
  misc_feature (1)..(76): Homolog of NCBI NO: 22298836 NR Description: ORF_ID:tsl1293~similar to NifU protein
  misc_feature (1)..(149): Homolog of NCBI NO: 8777425 NR Description: gene_id:K9P8.8~pir||T09896~strong similarity to
  misc_feature (1)..(154): Homolog of NCBI NO: 30698492 NR Description: NifU1 [Oryza sativa (japonica cultivar-group)]
  misc_feature (1)..(154): Homolog of NCBI NO: 18423084 NR Description: expressed protein [Arabidopsis thaliana]
  misc_feature (1)..(155): Homolog of NCBI NO: 7485833 NR Description: hypothetical protein F20B18.20 - Arabidopsis
  misc_feature (1)..(155): Homolog of NCBI NO: 21554503 NR Description: nitrogen fixation like protein [Arabidopsis
  misc_feature (1)..(155): Homolog of NCBI NO: 18416645 NR Description: nitrogen fixation protein, putative  (NifU)
MPLTEENVERVLDEVRPSLMADGGNVALHEIDGLVVVLKLQGACGSCPSSSMTLKMGIESRLRDKIPEIMSVEQFLESETGGLELNDENIEKVLSELRPYLSGTGGGGLELVEIDGYVVKVRLTGPAAGVMTVRVALTQKLRETIPSIGAVQLLE

SEQ ID NO: 36832 - DNA, 1080 bp, Arabidopsis thaliana
  misc_feature (1)..(1080): Ceres Seq. ID no. 12337138
  misc_feature: MA Experiment ID: 108462 Result: Up-regulated in Transcription
  misc_feature: MA Experiment 108462 PARAMETER Experiment Name: At_Germinating_Seeds_cDNA_P Parameter: Age (day) Value: 2 vs. 0
  misc_feature: MA Experiment 108462 PARAMETER Experiment Name: At_Germinating_Seeds_cDNA_P Parameter: Tissue Value: Germinating Seeds
  misc_feature: MA Experiment ID: 108464 Result: Up-regulated in Transcription
  misc_feature: MA Experiment 108464 PARAMETER Experiment Name: At_Germinating_Seeds_cDNA_P Parameter: Age (day) Value: 4 vs. 0
  misc_feature: MA Experiment 108464 PARAMETER Experiment Name: At_Germinating_Seeds_cDNA_P Parameter: Tissue Value: Germinating Seeds
  misc_feature: MA Experiment ID: 108594 Result: Down-regulated in Transcription
  misc_feature: MA Experiment 108594 PARAMETER Experiment Name: At_Ler-rhl_Root_cDNA_P Parameter: Plant Line Value: null
gatcacaaaaaattagaatcatggaggtcgagagagaccagcacaagcctccgttgtctctacaaaacaacaaaatcccatcatcacaaaacttcccagtcgtcgacctaagcaacaccaatggggagctcgtggcgcgtaaagtggcaaaggcgagcgaagagtggggaatttttcaggtagttaaccacgggatcccaaccgaactaatccggaggttgcacaaggtggatacacagttctttgagctcccagagtccaagaaagaagccgtggccaaaccagcgaactccaaagagatacaaggatatgagatggatgatgtacaaggtagaaggagtcatatcttccataatctatatccatcatcgtcagtcaattatgcattctggcctaagaatcctcctgaatacagagaggtgactgaggagtttgcaaagcatgcaaagcagctagcggaagagatcctcggtttgctatccgaagggttaggtttacaacgtgagatgttgaagttagcattcggggacgatagtgctggttatcttatgaagatcaactattaccggccgtgtccagagccagattgggtcatgggaataaaagcccacactgatttcaatgaactcacacttctcattcccaatgaaattttcggacttcaagtgttcaaggaagaccgctggcttgatgtagattatatatatcccgcggttattatcatcatcggagatcagatcatgaagatgagcaacggaaggtacaacaatgtgttgcatagaaccttgatggataaaaagaaaacgaggatgtcgtcggtggttcatatcaagcctccttatgatatggttgtgaagccatttcccgaactcaccagcggcgataatcctcccaagttcgagcctttaacttaccaggattacatagacattgaagtccccaagctttctcgactgatcaagaattgacttctttgtcgttgtatgtatgttgtttgttgttgctctgtttcatttggccgtttggcattgttgtaaccggtttctattaattgaagttcaaacaaaaaaaatttgactc

SEQ ID NO: 36833 - protein, 321 aa, Arabidopsis thaliana
  peptide (1)..(321): Ceres Seq. ID no. 12337139
  misc_feature (179)..(278): Pfam Name: 2OG-Fe(II) oxygenase superfamily Pfam Description: 2OG-Fe(II) oxygenase superfamily
  misc_feature (32)..(315): Homolog of NCBI NO: 14916564 NR Description: Flavonol synthase (FLS)
  misc_feature (9)..(315): Homolog of NCBI NO: 29123532 NR Description: flavonol synthase [Allium cepa]
  misc_feature (8)..(315): Homolog of NCBI NO: 14916566 NR Description: Flavonol synthase (FLS) (CitFLS)
  misc_feature (32)..(308): Homolog of NCBI NO: 6015164 NR Description: Flavonol synthase (FLS)
  misc_feature (7)..(307): Homolog of NCBI NO: 10177039 NR Description: flavonol synthase [Arabidopsis thaliana]
  misc_feature (7)..(312): Homolog of NCBI NO: 15242828 NR Description: 1-aminocyclopropane-1-carboxylic acid
  misc_feature (18)..(319): Homolog of NCBI NO: 21554244 NR Description: flavonol synthase [Arabidopsis thaliana]
  misc_feature (18)..(319): Homolog of NCBI NO: 15242827 NR Description: flavonol synthase
  misc_feature (1)..(315): Homolog of NCBI NO: 15242339 NR Description: flavonol synthase (FLS) (sp Q96330)
  misc_feature (7)..(288): Homolog of NCBI NO: 22328029 NR Description: similar to 1-aminocyclopropane-1-carboxylic acid
SQKIRIMEVERDQHKPPLSLQNNKIPSSQNFPVVDLSNTNGELVARKVAKASEEWGIFQVVNHGIPTELIRRLHKVDTQFFELPESKKEAVAKPANSKEIQGYEMDDVQGRRSHIFHNLYPSSSVNYAFWPKNPPEYREVTEEFAKHAKQLAEEILGLLSEGLGLQREMLKLAFGDDSAGYLMKINYYRPCPEPDWVMGIKAHTDFNELTLLIPNEIFGLQVFKEDRWLDVDYIYPAVIIIIGDQIMKMSNGRYNNVLHRTLMDKKKTRMSSVVHIKPPYDMVVKPFPELTSGDNPPKFEPLTYQDYIDIEVPKLSRLIKN

SEQ ID NO: 36834 - protein, 315 aa, Arabidopsis thaliana
  peptide (1)..(315): Ceres Seq. ID no. 12337140
  misc_feature (173)..(272): Pfam Name: 2OG-Fe(II) oxygenase superfamily Pfam Description: 2OG-Fe(II) oxygenase superfamily
  misc_feature (26)..(309): Homolog of NCBI NO: 14916564 NR Description: Flavonol synthase (FLS)
  misc_feature (3)..(309): Homolog of NCBI NO: 29123532 NR Description: flavonol synthase [Allium cepa]
  misc_feature (2)..(309): Homolog of NCBI NO: 14916566 NR Description: Flavonol synthase (FLS) (CitFLS)
  misc_feature (26)..(302): Homolog of NCBI NO: 6015164 NR Description: Flavonol synthase (FLS)
  misc_feature (1)..(301): Homolog of NCBI NO: 10177039 NR Description: flavonol synthase [Arabidopsis thaliana]
  misc_feature (1)..(306): Homolog of NCBI NO: 15242828 NR Description: 1-aminocyclopropane-1-carboxylic acid
  misc_feature (12)..(313): Homolog of NCBI NO: 21554244 NR Description: flavonol synthase [Arabidopsis thaliana]
  misc_feature (12)..(313): Homolog of NCBI NO: 15242827 NR Description: flavonol synthase
  misc_feature (1)..(309): Homolog of NCBI NO: 15242339 NR Description: flavonol synthase (FLS) (sp Q96330)
  misc_feature (1)..(282): Homolog of NCBI NO: 22328029 NR Description: similar to 1-aminocyclopropane-1-carboxylic acid
MEVERDQHKPPLSLQNNKIPSSQNFPVVDLSNTNGELVARKVAKASEEWGIFQVVNHGIPTELIRRLHKVDTQFFELPESKKEAVAKPANSKEIQGYEMDDVQGRRSHIFHNLYPSSSVNYAFWPKNPPEYREVTEEFAKHAKQLAEEILGLLSEGLGLQREMLKLAFGDDSAGYLMKINYYRPCPEPDWVMGIKAHTDFNELTLLIPNEIFGLQVFKEDRWLDVDYIYPAVIIIIGDQIMKMSNGRYNNVLHRTLMDKKKTRMSSVVHIKPPYDMVVKPFPELTSGDNPPKFEPLTYQDYIDIEVPKLSRLIKN

SEQ ID NO: 36835 - protein, 217 aa, Arabidopsis thaliana
  peptide (1)..(217): Ceres Seq. ID no. 12337141
  misc_feature (75)..(174): Pfam Name: 2OG-Fe(II) oxygenase superfamily Pfam Description: 2OG-Fe(II) oxygenase superfamily
  misc_feature (1)..(211): Homolog of NCBI NO: 14916564 NR Description: Flavonol synthase (FLS)
  misc_feature (1)..(211): Homolog of NCBI NO: 29123532 NR Description: flavonol synthase [Allium cepa]
  misc_feature (1)..(211): Homolog of NCBI NO: 14916566 NR Description: Flavonol synthase (FLS) (CitFLS)
  misc_feature (1)..(204): Homolog of NCBI NO: 6015164 NR Description: Flavonol synthase (FLS)
  misc_feature (1)..(203): Homolog of NCBI NO: 10177039 NR Description: flavonol synthase [Arabidopsis thaliana]
  misc_feature (1)..(208): Homolog of NCBI NO: 15242828 NR Description: 1-aminocyclopropane-1-carboxylic acid
  misc_feature (1)..(215): Homolog of NCBI NO: 21554244 NR Description: flavonol synthase [Arabidopsis thaliana]
  misc_feature (1)..(215): Homolog of NCBI NO: 15242827 NR Description: flavonol synthase
  misc_feature (1)..(211): Homolog of NCBI NO: 15242339 NR Description: flavonol synthase (FLS) (sp Q96330)
  misc_feature (1)..(184): Homolog of NCBI NO: 22328029 NR Description: similar to 1-aminocyclopropane-1-carboxylic acid
MDDVQGRRSHIFHNLYPSSSVNYAFWPKNPPEYREVTEEFAKHAKQLAEEILGLLSEGLGLQREMLKLAFGDDSAGYLMKINYYRPCPEPDWVMGIKAHTDFNELTLLIPNEIFGLQVFKEDRWLDVDYIYPAVIIIIGDQIMKMSNGRYNNVLHRTLMDKKKTRMSSVVHIKPPYDMVVKPFPELTSGDNPPKFEPLTYQDYIDIEVPKLSRLIKN

SEQ ID NO: 36836 - DNA, 1717 bp, Arabidopsis thaliana
  misc_feature (1)..(1717): Ceres Seq. ID no. 13621936
  misc_feature: MA Experiment ID: 108434 Result: Down-regulated in Transcription
  misc_feature: MA Experiment 108434 PARAMETER Experiment Name: At_Root_Tips_cDNA_P Parameter: Tissue Value: Root Tips
  misc_feature: MA Experiment ID: 108573 Result: Up-regulated in Transcription
  misc_feature: MA Experiment 108573 PARAMETER Experiment Name: At_Drought_cDNA_P Parameter: Timepoint (hr) Value: 6
  misc_feature: MA Experiment 108573 PARAMETER Experiment Name: At_Drought_cDNA_P Parameter: Tissue Value: Aerial
  misc_feature: MA Experiment 108573 PARAMETER Experiment Name: At_Drought_cDNA_P Parameter: Treatment Value: Drought vs. No Drought
  misc_feature: MA Experiment ID: 108577 Result: Down-regulated in Transcription
  misc_feature: MA Experiment 108577 PARAMETER Experiment Name: At_42deg_Heat_cDNA_P Parameter: Temperature (deg C) Value: 42 vs. 22
  misc_feature: MA Experiment 108577 PARAMETER Experiment Name: At_42deg_Heat_cDNA_P Parameter: Timepoint (hr) Value: 6
  misc_feature: MA Experiment 108577 PARAMETER Experiment Name: At_42deg_Heat_cDNA_P Parameter: Tissue Value: Aerial
  misc_feature: MA Experiment ID: 108595 Result: Down-regulated in Transcription
  misc_feature: MA Experiment 108595 PARAMETER Experiment Name: At_Ler-pi_Ovule_cDNA_P Parameter: Plant Line Value: null
  misc_feature: MA Experiment ID: 20000087 Result: Down-regulated in Transcription
  misc_feature: MA Experiment 20000087 PARAMETER Experiment Name: At_100uM_ABA_Mutants_cDNA_P Parameter: Plant Line Value: WS
  misc_feature: MA Experiment 20000087 PARAMETER Experiment Name: At_100uM_ABA_Mutants_cDNA_P Parameter: Timepoint (hr) Value: 6
  misc_feature: MA Experiment 20000087 PARAMETER Experiment Name: At_100uM_ABA_Mutants_cDNA_P Parameter: Tissue Value: Aerial
  misc_feature: MA Experiment 20000087 PARAMETER Experiment Name: At_100uM_ABA_Mutants_cDNA_P Parameter: Treatment Value: 100uM ABA vs. No Treatment
  misc_feature: MA Experiment ID: 20000111 Result: Down-regulated in Transcription
  misc_feature: MA Experiment 20000111 PARAMETER Experiment Name: At_42deg_Heat_cDNA_P Parameter: Temperature (deg C) Value: 42 vs. 22
  misc_feature: MA Experiment 20000111 PARAMETER Experiment Name: At_42deg_Heat_cDNA_P Parameter: Timepoint (hr) Value: 6
  misc_feature: MA Experiment 20000111 PARAMETER Experiment Name: At_42deg_Heat_cDNA_P Parameter: Tissue Value: Aerial
aaagaaagagaaagagaagagctggattcacatggtcttgttctttctctctccttcttttctcatcttgcggcttccctttctctctctatcgccacaatgatcattaccaaccaaactgattgaaactcatttgttctctctctctcaaatccactctctctctttcttttctcttctcctctctgtgtctctatcgccatggctgatgataaggagatgcctgctgctgtagttgatggacatgatcaagtcactggtcatattatttccaccacaatcggtggcaaaaatggtgaaccaaaacagacaattagttacatggcggagcgagttgttggtacaggctcgttcgggatcgttttccaagcaaaatgtttggagactggagaaaccgtggcgataaagaaggttttgcaagatagaagatacaagaaccgagaacttcagttgatgcgtgtgatggatcatccgaatgtggtttgtttgaagcattgcttcttttcgactacaagtaaagacgagcttttcttgaacttggttatggagtatgtccctgagagcttgtatcgagttctgaaacattatagtagtgcaaaccaaagaatgcctcttgtctatgttaaactttacatgtatcagatcttccggggacttgcttacattcacaatgttgctggagtttgtcacagagatctaaagcctcaaaatcttctggttgatcctcttactcatcaagtcaaaatctgtgactttggcagtgcgaaacagctcgttaaaggtgaagccaacatttcttacatctgctcacgattctaccgtgcacccgagctcatatttggtgccactgagtacacaacttctattgatatctggtctgctggttgtgttcttgctgagcttcttcttggtcagccattatttcccggagaaaatgctgtggatcagctcgttgaaattataaaagttcttggtacaccaactcgagaagaaatccgttgtatgaatccacattacacagatttcaggtttccacagataaaggcacatccctggcacaagatcttccacaaaaggatgcccccagaagcgattgattttgcatcaaggctgcttcaatactctccaagtctaagatgcacagcgctcgaagcttgtgcacatccgttctttgatgaactcagagaaccaaacgctcgtttaccaaatggacggcctttcccgcctctcttcaacttcaaacaagaagtagctggatcatcacctgaactggtcaacaagttgattccagaccatatcaagagacaattgggtctaagcttcttgaatcaatctggaacttaaaagggatcctgcaaaagacaactacttttttatatataatgtaccattacacgagccacaaggtcgtagttgaaggcaaacgtggaggacacaattcaaagtttttcctcctcaaactcgttcagacaaagccagctgctagcaaaaccaactacccaaatctgcgaaaacaaaaactctccagtgttgtatctgcttatttctcttctcttttcaagtttggtgaaaaacacagtctcctctttgcttcatttcttctttctttcccccttatgtaaatgagtttagtcagaagtttttttatatagtaaagtttgggcagaaggtgaagaatgtaatcaaagtgatactctttcaacgaggagcttctttc

SEQ ID NO: 36837 - protein, 380 aa, Arabidopsis thaliana
  peptide (1)..(380): Ceres Seq. ID no. 13621937
  misc_feature (40)..(324): Pfam Name: Protein kinase domain Pfam Description: Protein kinase domain
  misc_feature (1)..(365): Homolog of NCBI NO: 15236918 NR Description: Shaggy related protein kinase tetha [Arabidopsis
  misc_feature (3)..(375): Homolog of NCBI NO: 22326813 NR Description: serine/threonine protein kinase, Msk family
  misc_feature (1)..(371): Homolog of NCBI NO: 7434281 NR Description: probable shaggy-like protein kinase etha (EC
  misc_feature (4)..(376): Homolog of NCBI NO: 15221476 NR Description: shaggy-related kinase [Arabidopsis thaliana]
  misc_feature (3)..(379): Homolog of NCBI NO: 12643750 NR Description: Shaggy-related protein kinase delta (ASK-delta)
  misc_feature (3)..(379): Homolog of NCBI NO: 21593135 NR Description: putative shaggy-like protein kinase dzeta
  misc_feature (3)..(379): Homolog of NCBI NO: 15224593 NR Description: shaggy-related protein kinase dzeta [Arabidopsis
  misc_feature (1)..(380): Homolog of NCBI NO: 12643751 NR Description: Shaggy-related protein kinase eta (ASK-eta)
  misc_feature (1)..(380): Homolog of NCBI NO: 18700188 NR Description: AT4g18710/F28A21_120 [Arabidopsis thaliana]
  misc_feature (1)..(380): Homolog of NCBI NO: 15233984 NR Description: shaggy-related protein kinase etha (EC 2.7.1.-)
MADDKEMPAAVVDGHDQVTGHIISTTIGGKNGEPKQTISYMAERVVGTGSFGIVFQAKCLETGETVAIKKVLQDRRYKNRELQLMRVMDHPNVVCLKHCFFSTTSKDELFLNLVMEYVPESLYRVLKHYSSANQRMPLVYVKLYMYQIFRGLAYIHNVAGVCHRDLKPQNLLVDPLTHQVKICDFGSAKQLVKGEANISYICSRFYRAPELIFGATEYTTSIDIWSAGCVLAELLLGQPLFPGENAVDQLVEIIKVLGTPTREEIRCMNPHYTDFRFPQIKAHPWHKIFHKRMPPEAIDFASRLLQYSPSLRCTALEACAHPFFDELREPNARLPNGRPFPPLFNFKQEVAGSSPELVNKLIPDHIKRQLGLSFLNQSGT

SEQ ID NO: 36838 - protein, 374 aa, Arabidopsis thaliana
  peptide (1)..(374): Ceres Seq. ID no. 13621938
  misc_feature (34)..(318): Pfam Name: Protein kinase domain Pfam Description: Protein kinase domain
  misc_feature (1)..(359): Homolog of NCBI NO: 15236918 NR Description: Shaggy related protein kinase tetha [Arabidopsis
  misc_feature (1)..(369): Homolog of NCBI NO: 22326813 NR Description: serine/threonine protein kinase, Msk family
  misc_feature (1)..(365): Homolog of NCBI NO: 7434281 NR Description: probable shaggy-like protein kinase etha (EC
  misc_feature (1)..(370): Homolog of NCBI NO: 15221476 NR Description: shaggy-related kinase [Arabidopsis thaliana]
  misc_feature (1)..(373): Homolog of NCBI NO: 12643750 NR Description: Shaggy-related protein kinase delta (ASK-delta)
  misc_feature (1)..(373): Homolog of NCBI NO: 21593135 NR Description: putative shaggy-like protein kinase dzeta
  misc_feature (1)..(373): Homolog of NCBI NO: 15224593 NR Description: shaggy-related protein kinase dzeta [Arabidopsis
  misc_feature (1)..(374): Homolog of NCBI NO: 12643751 NR Description: Shaggy-related protein kinase eta (ASK-eta)
  misc_feature (1)..(374): Homolog of NCBI NO: 18700188 NR Description: AT4g18710/F28A21_120 [Arabidopsis thaliana]
  misc_feature (1)..(374): Homolog of NCBI NO: 15233984 NR Description: shaggy-related protein kinase etha (EC 2.7.1.-)
MPAAVVDGHDQVTGHIISTTIGGKNGEPKQTISYMAERVVGTGSFGIVFQAKCLETGETVAIKKVLQDRRYKNRELQLMRVMDHPNVVCLKHCFFSTTSKDELFLNLVMEYVPESLYRVLKHYSSANQRMPLVYVKLYMYQIFRGLAYIHNVAGVCHRDLKPQNLLVDPLTHQVKICDFGSAKQLVKGEANISYICSRFYRAPELIFGATEYTTSIDIWSAGCVLAELLLGQPLFPGENAVDQLVEIIKVLGTPTREEIRCMNPHYTDFRFPQIKAHPWHKIFHKRMPPEAIDFASRLLQYSPSLRCTALEACAHPFFDELREPNARLPNGRPFPPLFNFKQEVAGSSPELVNKLIPDHIKRQLGLSFLNQSGT

SEQ ID NO: 36839 - protein, 340 aa, Arabidopsis thaliana
  peptide (1)..(340): Ceres Seq. ID no. 13621939
  misc_feature (1)..(284): Pfam Name: Protein kinase domain Pfam Description: Protein kinase domain
  misc_feature (1)..(325): Homolog of NCBI NO: 15236918 NR Description: Shaggy related protein kinase tetha [Arabidopsis
  misc_feature (1)..(335): Homolog of NCBI NO: 22326813 NR Description: serine/threonine protein kinase, Msk family
  misc_feature (1)..(331): Homolog of NCBI NO: 7434281 NR Description: probable shaggy-like protein kinase etha (EC
  misc_feature (1)..(336): Homolog of NCBI NO: 15221476 NR Description: shaggy-related kinase [Arabidopsis thaliana]
  misc_feature (1)..(339): Homolog of NCBI NO: 12643750 NR Description: Shaggy-related protein kinase delta (ASK-delta)
  misc_feature (1)..(339): Homolog of NCBI NO: 21593135 NR Description: putative shaggy-like protein kinase dzeta
  misc_feature (1)..(339): Homolog of NCBI NO: 15224593 NR Description: shaggy-related protein kinase dzeta [Arabidopsis
  misc_feature (1)..(340): Homolog of NCBI NO: 12643751 NR Description: Shaggy-related protein kinase eta (ASK-eta)
  misc_feature (1)..(340): Homolog of NCBI NO: 18700188 NR Description: AT4g18710/F28A21_120 [Arabidopsis thaliana]
  misc_feature (1)..(340): Homolog of NCBI NO: 15233984 NR Description: shaggy-related protein kinase etha (EC 2.7.1.-)
MAERVVGTGSFGIVFQAKCLETGETVAIKKVLQDRRYKNRELQLMRVMDHPNVVCLKHCFFSTTSKDELFLNLVMEYVPESLYRVLKHYSSANQRMPLVYVKLYMYQIFRGLAYIHNVAGVCHRDLKPQNLLVDPLTHQVKICDFGSAKQLVKGEANISYICSRFYRAPELIFGATEYTTSIDIWSAGCVLAELLLGQPLFPGENAVDQLVEIIKVLGTPTREEIRCMNPHYTDFRFPQIKAHPWHKIFHKRMPPEAIDFASRLLQYSPSLRCTALEACAHPFFDELREPNARLPNGRPFPPLFNFKQEVAGSSPELVNKLIPDHIKRQLGLSFLNQSGT

SEQ ID NO: 36840 - DNA, 1217 bp, Arabidopsis thaliana
  misc_feature (1)..(1217): Ceres Seq. ID no. 12421348
  misc_feature: MA Experiment ID: 20000182 Result: Up-regulated in Transcription
  misc_feature: MA Experiment 20000182 PARAMETER Experiment Name: At_2mM_SA_P Parameter: Age (day) Value: 14
  misc_feature: MA Experiment 20000182 PARAMETER Experiment Name: At_2mM_SA_P Parameter: Organism Value: A. thaliana
  misc_feature: MA Experiment 20000182 PARAMETER Experiment Name: At_2mM_SA_P Parameter: Plant Line Value: WS
  misc_feature: MA Experiment 20000182 PARAMETER Experiment Name: At_2mM_SA_P Parameter: Timepoint (hr) Value: 6
  misc_feature: MA Experiment 20000182 PARAMETER Experiment Name: At_2mM_SA_P Parameter: Tissue Value: Aerial
  misc_feature: MA Experiment 20000182 PARAMETER Experiment Name: At_2mM_SA_P Parameter: Treatment Value: 2mM SA vs. No Treatment
  misc_feature: MA Experiment ID: 20000185 Result: Down-regulated in Transcription
  misc_feature: MA Experiment 20000185 PARAMETER Experiment Name: At_Roots__P Parameter: Age (day) Value: 7 vs. 21
  misc_feature: MA Experiment 20000185 PARAMETER Experiment Name: At_Roots__P Parameter: Organism Value: A. thaliana
  misc_feature: MA Experiment 20000185 PARAMETER Experiment Name: At_Roots__P Parameter: Tissue Value: Roots vs. Whole Plant
  misc_feature: MA Experiment ID: 20000437 Result: Down-regulated in Transcription
  misc_feature: MA Experiment 20000437 PARAMETER Experiment Name: At_Drought_P Parameter: Age (day) Value: 8
  misc_feature: MA Experiment 20000437 PARAMETER Experiment Name: At_Drought_P Parameter: Organism Value: A. thaliana
  misc_feature: MA Experiment 20000437 PARAMETER Experiment Name: At_Drought_P Parameter: Plant Line Value: WS
  misc_feature: MA Experiment 20000437 PARAMETER Experiment Name: At_Drought_P Parameter: Timepoint (hr) Value: 24
  misc_feature: MA Experiment 20000437 PARAMETER Experiment Name: At_Drought_P Parameter: Tissue Value: Whole Plant
  misc_feature: MA Experiment 20000437 PARAMETER Experiment Name: At_Drought_P Parameter: Treatment Value: Drought vs. No Drought
  misc_feature: MA Experiment ID: 20000438 Result: Down-regulated in Transcription
  misc_feature: MA Experiment 20000438 PARAMETER Experiment Name: At_Shoots__P Parameter: Age (day) Value: 14
  misc_feature: MA Experiment 20000438 PARAMETER Experiment Name: At_Shoots__P Parameter: Tissue Value: Shoots vs. Whole Plant
  misc_feature: MA Experiment ID: 20000439 Result: Down-regulated in Transcription
  misc_feature: MA Experiment 20000439 PARAMETER Experiment Name: At_Roots__P Parameter: Age (day) Value: 14 vs. 21
  misc_feature: MA Experiment 20000439 PARAMETER Experiment Name: At_Roots__P Parameter: Organism Value: A. thaliana
  misc_feature: MA Experiment 20000439 PARAMETER Experiment Name: At_Roots__P Parameter: Tissue Value: Roots vs. Whole Plant
  misc_feature: MA Experiment ID: 20000460 Result: Up-regulated in Transcription
  misc_feature: MA Experiment 20000460 PARAMETER Experiment Name: At_10percent_PEG_P Parameter: Age (day) Value: 12
  misc_feature: MA Experiment 20000460 PARAMETER Experiment Name: At_10percent_PEG_P Parameter: Organism Value: A. thaliana
  misc_feature: MA Experiment 20000460 PARAMETER Experiment Name: At_10percent_PEG_P Parameter: Plant Line Value: WS
  misc_feature: MA Experiment 20000460 PARAMETER Experiment Name: At_10percent_PEG_P Parameter: Timepoint (day) Value: 12
  misc_feature: MA Experiment 20000460 PARAMETER Experiment Name: At_10percent_PEG_P Parameter: Tissue Value: Whole Plant
  misc_feature: MA Experiment 20000460 PARAMETER Experiment Name: At_10percent_PEG_P Parameter: Treatment Value: 10percent PEG vs. No Treatment
  misc_feature: MA Experiment ID: 20000495 Result: Down-regulated in Transcription
  misc_feature: MA Experiment 20000495 PARAMETER Experiment Name: At_Guard_Cells_P Parameter: Harvest Date Value: 8/2/2002
  misc_feature: MA Experiment 20000495 PARAMETER Experiment Name: At_Guard_Cells_P Parameter: Organism Value: A. thaliana
  misc_feature: MA Experiment 20000495 PARAMETER Experiment Name: At_Guard_Cells_P Parameter: Tissue Value: Guard Cells vs. Leaves
  misc_feature: MA Experiment ID: 20000527 Result: Up-regulated in Transcription
  misc_feature: MA Experiment 20000527 PARAMETER Experiment Name: At_10percent_PEG_P Parameter: Age (day) Value: 20
  misc_feature: MA Experiment 20000527 PARAMETER Experiment Name: At_10percent_PEG_P Parameter: Organism Value: A. thaliana
  misc_feature: MA Experiment 20000527 PARAMETER Experiment Name: At_10percent_PEG_P Parameter: Plant Line Value: WS
  misc_feature: MA Experiment 20000527 PARAMETER Experiment Name: At_10percent_PEG_P Parameter: Timepoint (day) Value: 20
  misc_feature: MA Experiment 20000527 PARAMETER Experiment Name: At_10percent_PEG_P Parameter: Tissue Value: Whole Plant
  misc_feature: MA Experiment 20000527 PARAMETER Experiment Name: At_10percent_PEG_P Parameter: Treatment Value: 10percent PEG vs. No Treatment
  misc_feature: MA Experiment ID: 20000794 Result: Down-regulated in Transcription
  misc_feature: MA Experiment 20000794 PARAMETER Experiment Name: At_Petals_P Parameter: Age (day) Value: 23-25 days
  misc_feature: MA Experiment 20000794 PARAMETER Experiment Name: At_Petals_P Parameter: Plant Line Value: WS
  misc_feature: MA Experiment 20000794 PARAMETER Experiment Name: At_Petals_P Parameter: Tissue Value: Petals vs. Whole plant
  misc_feature: MA Experiment ID: 20001905 Result: Down-regulated in Transcription
  misc_feature: MA Experiment 20001905 PARAMETER Experiment Name: At_Drought_Reproduction_P Parameter: Age (day) Value: 40
  misc_feature: MA Experiment 20001905 PARAMETER Experiment Name: At_Drought_Reproduction_P Parameter: Organism Value: A. thaliana
  misc_feature: MA Experiment 20001905 PARAMETER Experiment Name: At_Drought_Reproduction_P Parameter: Plant Line Value: WS
  misc_feature: MA Experiment 20001905 PARAMETER Experiment Name: At_Drought_Reproduction_P Parameter: Timepoint (day) Value: 10
  misc_feature: MA Experiment 20001905 PARAMETER Experiment Name: At_Drought_Reproduction_P Parameter: Tissue Value: Rosettes
  misc_feature: MA Experiment 20001905 PARAMETER Experiment Name: At_Drought_Reproduction_P Parameter: Treatment Value: Drought vs. No Drought
acatctcccaccaatctcactcaaaagaaaatctaagaaaagattcttaattttctgaagtgaatgcaaagatgatgatggaagagaaacttgtgatcaacgaattggaactagggaaagagcttgctaaccgattgatgaacaatctcaaacacacttcttctgtcgattccaacaaaaccttgatctctgatatcctccgtatttaccagaatgccattttcatgttgagcttcaaccaagacaagaacatccttaagcgaagccttgagatcgatggaaaagattctaaaaacgtcttcaaaaagaggaaagtatcggagaagaacacagagaaagttaaggtttttgttgcaacagaacaagaaaatggctctattgatgatggtcactgctggagaaaatatgggcaaaaagagattcatggatccaaaaatcctagagcatattacagatgcacgcatcgattcacacaagactgtttagcagtgaagcaagttcagaaatcagacacagatccttcccttttcgaagtgaagtatctcggaaaccacacttgtaacaacatcacatccccgaagacgacgacgaacttctctgtttcattgacgaacacgaacatctttgaaggaaacagagtacatgttacagagcaatcggaagacatgaaaccgaccaagtccgaagaagtgatgataagccttgaagatctggagaacaagaagaacattttcagaacgttttctttctctaaccatgagattgagaacggtgtgtggaaaagtaaccttttcttgggaaatttcgtggaagatctttctcctgcaacatcagggtctgcaattaccagcgaggttttatctgcacctgctgctgttgagaattccgaaactgcagattcgtatttctcgtctttggacaatattatcgatttcggacaggattggttgtggtcgtagctttgaataattgatttggtgaatgtaatgtctctctcttaatggcagtaattatagatggtcagtttaatttaagggttattagttattacttattagtatagtaaaaattatttttgccgatggataaaaattggcttataggactaaagttacatgattttggcctttttcattgtttttcagcagggtttatgaattatgatttccctatgaagttggattgtactttatgacaattaataaagaaaggatttt

SEQ ID NO: 36841 - protein, 295 aa, Arabidopsis thaliana
  peptide (1)..(295): Ceres Seq. ID no. 12421349
  misc_feature (103)..(165): Pfam Name: WRKY DNA -binding domain Pfam Description: WRKY DNA -binding domain
  misc_feature (78)..(184): Homolog of NCBI NO: 15237039 NR Description: WRKY family transcription factor
  misc_feature (5)..(172): Homolog of NCBI NO: 11358951 NR Description: DNA-binding protein 4 [imported] - common tobacco
  misc_feature (9)..(278): Homolog of NCBI NO: 18420751 NR Description: WRKY family transcription factor
  misc_feature (5)..(173): Homolog of NCBI NO: 21592990 NR Description: DNA-binding protein-like [Arabidopsis thaliana]
  misc_feature (5)..(173): Homolog of NCBI NO: 15228907 NR Description: WRKY family transcription factor
  misc_feature (45)..(190): Homolog of NCBI NO: 15226739 NR Description: WRKY family transcription factor; protein id:
  misc_feature (78)..(163): Homolog of NCBI NO: 34911952 NR Description: P0694A04.6 [Oryza sativa (japonica
  misc_feature (78)..(234): Homolog of NCBI NO: 15236622 NR Description: WRKY family transcription factor
  misc_feature (78)..(163): Homolog of NCBI NO: 40253471 NR Description: putative transcription factor WRKY5
  misc_feature (1)..(295): Homolog of NCBI NO: 15225975 NR Description: WRKY family transcription factor
MMMEEKLVINELELGKELANRLMNNLKHTSSVDSNKTLISDILRIYQNAIFMLSFNQDKNILKRSLEIDGKDSKNVFKKRKVSEKNTEKVKVFVATEQENGSIDDGHCWRKYGQKEIHGSKNPRAYYRCTHRFTQDCLAVKQVQKSDTDPSLFEVKYLGNHTCNNITSPKTTTNFSVSLTNTNIFEGNRVHVTEQSEDMKPTKSEEVMISLEDLENKKNIFRTFSFSNHEIENGVWKSNLFLGNFVEDLSPATSGSAITSEVLSAPAAVENSETADSYFSSLDNIIDFGQDWLWS

SEQ ID NO: 36842 - protein, 294 aa, Arabidopsis thaliana
  peptide (1)..(294): Ceres Seq. ID no. 12421350
  misc_feature (102)..(164): Pfam Name: WRKY DNA -binding domain Pfam Description: WRKY DNA -binding domain
  misc_feature (77)..(183): Homolog of NCBI NO: 15237039 NR Description: WRKY family transcription factor
  misc_feature (4)..(171): Homolog of NCBI NO: 11358951 NR Description: DNA-binding protein 4 [imported] - common tobacco
  misc_feature (8)..(277): Homolog of NCBI NO: 18420751 NR Description: WRKY family transcription factor
  misc_feature (4)..(172): Homolog of NCBI NO: 21592990 NR Description: DNA-binding protein-like [Arabidopsis thaliana]
  misc_feature (4)..(172): Homolog of NCBI NO: 15228907 NR Description: WRKY family transcription factor
  misc_feature (44)..(189): Homolog of NCBI NO: 15226739 NR Description: WRKY family transcription factor; protein id:
  misc_feature (77)..(162): Homolog of NCBI NO: 34911952 NR Description: P0694A04.6 [Oryza sativa (japonica
  misc_feature (77)..(233): Homolog of NCBI NO: 15236622 NR Description: WRKY family transcription factor
  misc_feature (77)..(162): Homolog of NCBI NO: 40253471 NR Description: putative transcription factor WRKY5
  misc_feature (1)..(294): Homolog of NCBI NO: 15225975 NR Description: WRKY family transcription factor
MMEEKLVINELELGKELANRLMNNLKHTSSVDSNKTLISDILRIYQNAIFMLSFNQDKNILKRSLEIDGKDSKNVFKKRKVSEKNTEKVKVFVATEQENGSIDDGHCWRKYGQKEIHGSKNPRAYYRCTHRFTQDCLAVKQVQKSDTDPSLFEVKYLGNHTCNNITSPKTTTNFSVSLTNTNIFEGNRVHVTEQSEDMKPTKSEEVMISLEDLENKKNIFRTFSFSNHEIENGVWKSNLFLGNFVEDLSPATSGSAITSEVLSAPAAVENSETADSYFSSLDNIIDFGQDWLWS

SEQ ID NO: 36843 - protein, 293 aa, Arabidopsis thaliana
  peptide (1)..(293): Ceres Seq. ID no. 12421351
  misc_feature (101)..(163): Pfam Name: WRKY DNA -binding domain Pfam Description: WRKY DNA -binding domain
  misc_feature (76)..(182): Homolog of NCBI NO: 15237039 NR Description: WRKY family transcription factor
  misc_feature (3)..(170): Homolog of NCBI NO: 11358951 NR Description: DNA-binding protein 4 [imported] - common tobacco
  misc_feature (7)..(276): Homolog of NCBI NO: 18420751 NR Description: WRKY family transcription factor
  misc_feature (3)..(171): Homolog of NCBI NO: 21592990 NR Description: DNA-binding protein-like [Arabidopsis thaliana]
  misc_feature (3)..(171): Homolog of NCBI NO: 15228907 NR Description: WRKY family transcription factor
  misc_feature (43)..(188): Homolog of NCBI NO: 15226739 NR Description: WRKY family transcription factor; protein id:
  misc_feature (76)..(161): Homolog of NCBI NO: 34911952 NR Description: P0694A04.6 [Oryza sativa (japonica
  misc_feature (76)..(232): Homolog of NCBI NO: 15236622 NR Description: WRKY family transcription factor
  misc_feature (76)..(161): Homolog of NCBI NO: 40253471 NR Description: putative transcription factor WRKY5
  misc_feature (1)..(293): Homolog of NCBI NO: 15225975 NR Description: WRKY family transcription factor
MEEKLVINELELGKELANRLMNNLKHTSSVDSNKTLISDILRIYQNAIFMLSFNQDKNILKRSLEIDGKDSKNVFKKRKVSEKNTEKVKVFVATEQENGSIDDGHCWRKYGQKEIHGSKNPRAYYRCTHRFTQDCLAVKQVQKSDTDPSLFEVKYLGNHTCNNITSPKTTTNFSVSLTNTNIFEGNRVHVTEQSEDMKPTKSEEVMISLEDLENKKNIFRTFSFSNHEIENGVWKSNLFLGNFVEDLSPATSGSAITSEVLSAPAAVENSETADSYFSSLDNIIDFGQDWLWS

SEQ ID NO: 36844 - DNA, 1079 bp, Arabidopsis thaliana
  misc_feature (1)..(1079): Ceres Seq. ID no. 12394591
  misc_feature: MA Experiment ID: 108434 Result: Down-regulated in Transcription
  misc_feature: MA Experiment 108434 PARAMETER Experiment Name: At_Root_Tips_cDNA_P Parameter: Tissue Value: Root Tips
  misc_feature: MA Experiment ID: 108576 Result: Up-regulated in Transcription
  misc_feature: MA Experiment 108576 PARAMETER Experiment Name: At_42deg_Heat_cDNA_P Parameter: Temperature (deg C) Value: 42 vs. 22
  misc_feature: MA Experiment 108576 PARAMETER Experiment Name: At_42deg_Heat_cDNA_P Parameter: Timepoint (hr) Value: 1
  misc_feature: MA Experiment 108576 PARAMETER Experiment Name: At_42deg_Heat_cDNA_P Parameter: Tissue Value: Aerial
  misc_feature: MA Experiment ID: 108595 Result: Up-regulated in Transcription
  misc_feature: MA Experiment 108595 PARAMETER Experiment Name: At_Ler-pi_Ovule_cDNA_P Parameter: Plant Line Value: null
  misc_feature: MA Experiment ID: 20000069 Result: Up-regulated in Transcription
  misc_feature: MA Experiment 20000069 PARAMETER Experiment Name: At_100uM_ABA_Mutants_cDNA_P Parameter: Plant Line Value: CS23
  misc_feature: MA Experiment 20000069 PARAMETER Experiment Name: At_100uM_ABA_Mutants_cDNA_P Parameter: Timepoint (hr) Value: 6
  misc_feature: MA Experiment 20000069 PARAMETER Experiment Name: At_100uM_ABA_Mutants_cDNA_P Parameter: Tissue Value: Aerial
  misc_feature: MA Experiment 20000069 PARAMETER Experiment Name: At_100uM_ABA_Mutants_cDNA_P Parameter: Treatment Value: 100uM ABA vs. No Treatment
  misc_feature: MA Experiment ID: 20000089 Result: Up-regulated in Transcription
  misc_feature: MA Experiment ID: 20000093 Result: Up-regulated in Transcription
  misc_feature: MA Experiment 20000093 PARAMETER Experiment Name: At_42deg_Heat_cDNA_P Parameter: Temperature (deg C) Value: 42 vs. 22
  misc_feature: MA Experiment 20000093 PARAMETER Experiment Name: At_42deg_Heat_cDNA_P Parameter: Timepoint (hr) Value: 0.5
  misc_feature: MA Experiment 20000093 PARAMETER Experiment Name: At_42deg_Heat_cDNA_P Parameter: Tissue Value: Aerial
  misc_feature: MA Experiment ID: 20000112 Result: Up-regulated in Transcription
  misc_feature: MA Experiment 20000112 PARAMETER Experiment Name: At_42deg_Heat_cDNA_P Parameter: Temperature (deg C) Value: 42 vs. 22
  misc_feature: MA Experiment 20000112 PARAMETER Experiment Name: At_42deg_Heat_cDNA_P Parameter: Timepoint (hr) Value: 2
  misc_feature: MA Experiment 20000112 PARAMETER Experiment Name: At_42deg_Heat_cDNA_P Parameter: Tissue Value: Aerial
  misc_feature: MA Experiment ID: 20000144 Result: Up-regulated in Transcription
  misc_feature: MA Experiment 20000144 PARAMETER Experiment Name: At_42deg_Heat_cDNA_P Parameter: Temperature (deg C) Value: 42 vs. 22
  misc_feature: MA Experiment 20000144 PARAMETER Experiment Name: At_42deg_Heat_cDNA_P Parameter: Timepoint (hr) Value: 1
  misc_feature: MA Experiment 20000144 PARAMETER Experiment Name: At_42deg_Heat_cDNA_P Parameter: Tissue Value: Aerial
  misc_feature: MA Experiment ID: 20000265 Result: Up-regulated in Transcription
  misc_feature: MA Experiment 20000265 PARAMETER Experiment Name: At_Open_Flower_P Parameter: Age (day) Value: 21
  misc_feature: MA Experiment 20000265 PARAMETER Experiment Name: At_Open_Flower_P Parameter: Plant Line Value: WS
  misc_feature: MA Experiment 20000265 PARAMETER Experiment Name: At_Open_Flower_P Parameter: Tissue Value: Closed Flower vs. Whole Plant
  misc_feature: MA Experiment ID: 20000286 Result: Up-regulated in Transcription
  misc_feature: MA Experiment 20000286 PARAMETER Experiment Name: At_Open_Flower_P Parameter: Age (day) Value: 21
  misc_feature: MA Experiment 20000286 PARAMETER Experiment Name: At_Open_Flower_P Parameter: Plant Line Value: WS
  misc_feature: MA Experiment 20000286 PARAMETER Experiment Name: At_Open_Flower_P Parameter: Tissue Value: Half Open vs. Whole Plant
  misc_feature: MA Experiment ID: 20000438 Result: Down-regulated in Transcription
  misc_feature: MA Experiment 20000438 PARAMETER Experiment Name: At_Shoots__P Parameter: Age (day) Value: 14
  misc_feature: MA Experiment 20000438 PARAMETER Experiment Name: At_Shoots__P Parameter: Tissue Value: Shoots vs. Whole Plant
  misc_feature: MA Experiment ID: 20000456 Result: Up-regulated in Transcription
  misc_feature: MA Experiment 20000456 PARAMETER Experiment Name: At_100uM_BA_P Parameter: Age (day) Value: 14
  misc_feature: MA Experiment 20000456 PARAMETER Experiment Name: At_100uM_BA_P Parameter: Organism Value: A. thaliana
  misc_feature: MA Experiment 20000456 PARAMETER Experiment Name: At_100uM_BA_P Parameter: Plant Line Value: WS
  misc_feature: MA Experiment 20000456 PARAMETER Experiment Name: At_100uM_BA_P Parameter: Timepoint (hr) Value: 6
  misc_feature: MA Experiment 20000456 PARAMETER Experiment Name: At_100uM_BA_P Parameter: Tissue Value: Aerial
  misc_feature: MA Experiment 20000456 PARAMETER Experiment Name: At_100uM_BA_P Parameter: Treatment Value: 100uM BA vs. No Treatment
  misc_feature: MA Experiment ID: 20000794 Result: Up-regulated in Transcription
  misc_feature: MA Experiment 20000794 PARAMETER Experiment Name: At_Petals_P Parameter: Age (day) Value: 23-25 days
  misc_feature: MA Experiment 20000794 PARAMETER Experiment Name: At_Petals_P Parameter: Plant Line Value: WS
  misc_feature: MA Experiment 20000794 PARAMETER Experiment Name: At_Petals_P Parameter: Tissue Value: Petals vs. Whole plant
  misc_feature: MA Experiment ID: 20001557 Result: Up-regulated in Transcription
  misc_feature: MA Experiment 20001557 PARAMETER Experiment Name: At_Drought_Soil_Dry_P Parameter: Age (day) Value: 27
  misc_feature: MA Experiment 20001557 PARAMETER Experiment Name: At_Drought_Soil_Dry_P Parameter: Organism Value: A. thaliana
  misc_feature: MA Experiment 20001557 PARAMETER Experiment Name: At_Drought_Soil_Dry_P Parameter: Plant Line Value: WS
  misc_feature: MA Experiment 20001557 PARAMETER Experiment Name: At_Drought_Soil_Dry_P Parameter: Post Timepoint (hr) Value: 3
  misc_feature: MA Experiment 20001557 PARAMETER Experiment Name: At_Drought_Soil_Dry_P Parameter: Post-Treatment Value: Re-Water vs. No Drought
  misc_feature: MA Experiment 20001557 PARAMETER Experiment Name: At_Drought_Soil_Dry_P Parameter: Timepoint (day) Value: 13
  misc_feature: MA Experiment 20001557 PARAMETER Experiment Name: At_Drought_Soil_Dry_P Parameter: Treatment Value: Drought vs. No Drought
  misc_feature: MA Experiment ID: 20001911 Result: Down-regulated in Transcription
  misc_feature: MA Experiment 20001911 PARAMETER Experiment Name: At_Drought_Reproduction_P Parameter: Age (day) Value: 40
  misc_feature: MA Experiment 20001911 PARAMETER Experiment Name: At_Drought_Reproduction_P Parameter: Organism Value: A. thaliana
  misc_feature: MA Experiment 20001911 PARAMETER Experiment Name: At_Drought_Reproduction_P Parameter: Plant Line Value: WS
  misc_feature: MA Experiment 20001911 PARAMETER Experiment Name: At_Drought_Reproduction_P Parameter: Timepoint (day) Value: 10
  misc_feature: MA Experiment 20001911 PARAMETER Experiment Name: At_Drought_Reproduction_P Parameter: Tissue Value: Flowers
  misc_feature: MA Experiment 20001911 PARAMETER Experiment Name: At_Drought_Reproduction_P Parameter: Treatment Value: Drought vs. No Drought
atctcataaaaacaaaaacaacaacacacatttcaaagaactctgaaatggcaaaccaaaaagggttacatgtagtgatgatgatcatcactgtttggcttctttatgcagcacctaatatccatggatggggaaaagaaggtcatgaaatcatctgtaaaatcgctcagactaggttggatgaaacagcagcaaaggccgtgaaagagctgttacctgaatctgcagaaggagacctctcaagcttgtgtctttgggctgatcgtgtcaagttcagataccactggtcttctcctcttcattacatcaacactcctgatgcatgctcataccaatacaatagggactgcaaggacgaatctggagagaaaggaagatgtgttgcgggagccatttacaactacaccacacagcttctttcctacaaaactgcagcttcatctcagtcacaatacaacttaaccgaggccctgctcttcgtgtccccatttcatgggtgatatccatcagcctctacatgtgagttatgcttcagacaaaggaggtaacaccatcgaagtacattggtacacgagaaaagctaacctccaccatatatgggattccaacattatcgaaacagctgaagcagatctctataactctgcactagaaggaatggtggatgcactcaaaaagaatatcacgacagaatgggcagatcaagttaagagatgggatacctgcacaaagaagacagcatgtccagacatatacgcatccgaaggaattcaagcagcctgtgactgggcatacaagggggtaacggaaggagacactctagaagatgaatacttctattcacgtctaccgatagtgtatcagcggttagcacagggaggggtgagactagcagctaccctaaacaggattttcggttgaagctgaagttacagcataatgattggtctaagcctgtcttcatattagattaaaaactgcattattgaaacaaggaaatagcaatcacaagccccgaacacggcaatgctctttcattatcaaacaaaataaattatgtttactcacaaagtttcttc

SEQ ID NO: 36845 - protein, 165 aa, Arabidopsis thaliana
  peptide (1)..(165): Ceres Seq. ID no. 12394592
  misc_feature (43)..(165): Pfam Name: S1/P1 Nuclease Pfam Description: S1/P1 Nuclease
  misc_feature (25)..(165): Homolog of NCBI NO: 15220307 NR Description: bifunctional nuclease bfn1
  misc_feature (22)..(165): Homolog of NCBI NO: 38345900 NR Description: OSJNBa0060D06.10 [Oryza sativa (japonica
  misc_feature (33)..(165): Homolog of NCBI NO: 3551956 NR Description: senescence-associated protein 6 [Hemerocallis
  misc_feature (43)..(165): Homolog of NCBI NO: 22328857 NR Description: expressed protein; protein id: At4g21585.1
  misc_feature (29)..(165): Homolog of NCBI NO: 34895514 NR Description: putative bifunctional nuclease
  misc_feature (29)..(165): Homolog of NCBI NO: 9558456 NR Description: unnamed protein product [Oryza sativa (japonica
  misc_feature (30)..(165): Homolog of NCBI NO: 4099835 NR Description: bifunctional nuclease [Zinnia elegans]
  misc_feature (26)..(165): Homolog of NCBI NO: 4099833 NR Description: bifunctional nuclease [Zinnia elegans]
  misc_feature (16)..(165): Homolog of NCBI NO: 15221343 NR Description: putative bifunctional nuclease
  misc_feature (16)..(165): Homolog of NCBI NO: 21554516 NR Description: putative bifunctional nuclease [Arabidopsis
LIKTKTTTHISKNSEMANQKGLHVVMMIITVWLLYAAPNIHGWGKEGHEIICKIAQTRLDETAAKAVKELLPESAEGDLSSLCLWADRVKFRYHWSSPLHYINTPDACSYQYNRDCKDESGEKGRCVAGAIYNYTTQLLSYKTAASSQSQYNLTEALLFVSPFHG

SEQ ID NO: 36846 - protein, 150 aa, Arabidopsis thaliana
  peptide (1)..(150): Ceres Seq. ID no. 12394593
  misc_feature (28)..(150): Pfam Name: S1/P1 Nuclease Pfam Description: S1/P1 Nuclease
  misc_feature (10)..(150): Homolog of NCBI NO: 15220307 NR Description: bifunctional nuclease bfn1
  misc_feature (7)..(150): Homolog of NCBI NO: 38345900 NR Description: OSJNBa0060D06.10 [Oryza sativa (japonica
  misc_feature (18)..(150): Homolog of NCBI NO: 3551956 NR Description: senescence-associated protein 6 [Hemerocallis
  misc_feature (28)..(150): Homolog of NCBI NO: 22328857 NR Description: expressed protein; protein id: At4g21585.1
  misc_feature (14)..(150): Homolog of NCBI NO: 34895514 NR Description: putative bifunctional nuclease
  misc_feature (14)..(150): Homolog of NCBI NO: 9558456 NR Description: unnamed protein product [Oryza sativa (japonica
  misc_feature (15)..(150): Homolog of NCBI NO: 4099835 NR Description: bifunctional nuclease [Zinnia elegans]
  misc_feature (11)..(150): Homolog of NCBI NO: 4099833 NR Description: bifunctional nuclease [Zinnia elegans]
  misc_feature (1)..(150): Homolog of NCBI NO: 15221343 NR Description: putative bifunctional nuclease
  misc_feature (1)..(150): Homolog of NCBI NO: 21554516 NR Description: putative bifunctional nuclease [Arabidopsis
MANQKGLHVVMMIITVWLLYAAPNIHGWGKEGHEIICKIAQTRLDETAAKAVKELLPESAEGDLSSLCLWADRVKFRYHWSSPLHYINTPDACSYQYNRDCKDESGEKGRCVAGAIYNYTTQLLSYKTAASSQSQYNLTEALLFVSPFHG

SEQ ID NO: 36847 - protein, 142 aa, Arabidopsis thaliana
  peptide (1)..(142): Ceres Seq. ID no. 12394594
  misc_feature (1)..(142): Pfam Name: S1/P1 Nuclease Pfam Description: S1/P1 Nuclease
  misc_feature (1)..(141): Homolog of NCBI NO: 15220307 NR Description: bifunctional nuclease bfn1
  misc_feature (1)..(141): Homolog of NCBI NO: 38345900 NR Description: OSJNBa0060D06.10 [Oryza sativa (japonica
  misc_feature (1)..(141): Homolog of NCBI NO: 3551956 NR Description: senescence-associated protein 6 [Hemerocallis
  misc_feature (1)..(141): Homolog of NCBI NO: 22328857 NR Description: expressed protein; protein id: At4g21585.1
  misc_feature (1)..(142): Homolog of NCBI NO: 34895514 NR Description: putative bifunctional nuclease
  misc_feature (1)..(142): Homolog of NCBI NO: 9558456 NR Description: unnamed protein product [Oryza sativa (japonica
  misc_feature (1)..(141): Homolog of NCBI NO: 4099835 NR Description: bifunctional nuclease [Zinnia elegans]
  misc_feature (1)..(142): Homolog of NCBI NO: 4099833 NR Description: bifunctional nuclease [Zinnia elegans]
  misc_feature (1)..(142): Homolog of NCBI NO: 15221343 NR Description: putative bifunctional nuclease
  misc_feature (1)..(142): Homolog of NCBI NO: 21554516 NR Description: putative bifunctional nuclease [Arabidopsis
MGDIHQPLHVSYASDKGGNTIEVHWYTRKANLHHIWDSNIIETAEADLYNSALEGMVDALKKNITTEWADQVKRWDTCTKKTACPDIYASEGIQAACDWAYKGVTEGDTLEDEYFYSRLPIVYQRLAQGGVRLAATLNRIFG

SEQ ID NO: 36848 - DNA, 1841 bp, Arabidopsis thaliana
  misc_feature (1)..(1841): Ceres Seq. ID no. 12336394
  misc_feature: MA Experiment ID: 108574 Result: Down-regulated in Transcription
  misc_feature: MA Experiment 108574 PARAMETER Experiment Name: At_Wounding__cDNA_P Parameter: Timepoint (hr) Value: 1
  misc_feature: MA Experiment 108574 PARAMETER Experiment Name: At_Wounding__cDNA_P Parameter: Tissue Value: Aerial
  misc_feature: MA Experiment 108574 PARAMETER Experiment Name: At_Wounding__cDNA_P Parameter: Treatment Value: Wounding vs. No Wounding
  misc_feature: MA Experiment ID: 108576 Result: Down-regulated in Transcription
  misc_feature: MA Experiment 108576 PARAMETER Experiment Name: At_42deg_Heat_cDNA_P Parameter: Temperature (deg C) Value: 42 vs. 22
  misc_feature: MA Experiment 108576 PARAMETER Experiment Name: At_42deg_Heat_cDNA_P Parameter: Timepoint (hr) Value: 1
  misc_feature: MA Experiment 108576 PARAMETER Experiment Name: At_42deg_Heat_cDNA_P Parameter: Tissue Value: Aerial
  misc_feature: MA Experiment ID: 108668 Result: Down-regulated in Transcription
  misc_feature: MA Experiment 108668 PARAMETER Experiment Name: At_2mM_SA_cDNA_P Parameter: Plant Line Value: WS
  misc_feature: MA Experiment 108668 PARAMETER Experiment Name: At_2mM_SA_cDNA_P Parameter: Timepoint (hr) Value: 6
  misc_feature: MA Experiment 108668 PARAMETER Experiment Name: At_2mM_SA_cDNA_P Parameter: Treatment Value: 2mM SA vs. No Treatment
  misc_feature: MA Experiment ID: 20000111 Result: Down-regulated in Transcription
  misc_feature: MA Experiment 20000111 PARAMETER Experiment Name: At_42deg_Heat_cDNA_P Parameter: Temperature (deg C) Value: 42 vs. 22
  misc_feature: MA Experiment 20000111 PARAMETER Experiment Name: At_42deg_Heat_cDNA_P Parameter: Timepoint (hr) Value: 6
  misc_feature: MA Experiment 20000111 PARAMETER Experiment Name: At_42deg_Heat_cDNA_P Parameter: Tissue Value: Aerial
  misc_feature: MA Experiment ID: 20000144 Result: Down-regulated in Transcription
  misc_feature: MA Experiment 20000144 PARAMETER Experiment Name: At_42deg_Heat_cDNA_P Parameter: Temperature (deg C) Value: 42 vs. 22
  misc_feature: MA Experiment 20000144 PARAMETER Experiment Name: At_42deg_Heat_cDNA_P Parameter: Timepoint (hr) Value: 1
  misc_feature: MA Experiment 20000144 PARAMETER Experiment Name: At_42deg_Heat_cDNA_P Parameter: Tissue Value: Aerial
  misc_feature: MA Experiment ID: 20000185 Result: Down-regulated in Transcription
  misc_feature: MA Experiment 20000185 PARAMETER Experiment Name: At_Roots__P Parameter: Age (day) Value: 7 vs. 21
  misc_feature: MA Experiment 20000185 PARAMETER Experiment Name: At_Roots__P Parameter: Organism Value: A. thaliana
  misc_feature: MA Experiment 20000185 PARAMETER Experiment Name: At_Roots__P Parameter: Tissue Value: Roots vs. Whole Plant
  misc_feature: MA Experiment ID: 20000264 Result: Down-regulated in Transcription
  misc_feature: MA Experiment 20000264 PARAMETER Experiment Name: At_Open_Flower_P Parameter: Age (day) Value: 21
  misc_feature: MA Experiment 20000264 PARAMETER Experiment Name: At_Open_Flower_P Parameter: Plant Line Value: WS
  misc_feature: MA Experiment 20000264 PARAMETER Experiment Name: At_Open_Flower_P Parameter: Tissue Value: Open Flower vs. Whole Plant
  misc_feature: MA Experiment ID: 20000439 Result: Down-regulated in Transcription
  misc_feature: MA Experiment 20000439 PARAMETER Experiment Name: At_Roots__P Parameter: Age (day) Value: 14 vs. 21
  misc_feature: MA Experiment 20000439 PARAMETER Experiment Name: At_Roots__P Parameter: Organism Value: A. thaliana
  misc_feature: MA Experiment 20000439 PARAMETER Experiment Name: At_Roots__P Parameter: Tissue Value: Roots vs. Whole Plant
  misc_feature: MA Experiment ID: 20000495 Result: Down-regulated in Transcription
  misc_feature: MA Experiment 20000495 PARAMETER Experiment Name: At_Guard_Cells_P Parameter: Harvest Date Value: 8/2/2002
  misc_feature: MA Experiment 20000495 PARAMETER Experiment Name: At_Guard_Cells_P Parameter: Organism Value: A. thaliana
  misc_feature: MA Experiment 20000495 PARAMETER Experiment Name: At_Guard_Cells_P Parameter: Tissue Value: Guard Cells vs. Leaves
  misc_feature: MA Experiment ID: 20001247 Result: Up-regulated in Transcription
  misc_feature: MA Experiment 20001247 PARAMETER Experiment Name: At_Far-red-induction_P Parameter: Age (day) Value: 7
  misc_feature: MA Experiment 20001247 PARAMETER Experiment Name: At_Far-red-induction_P Parameter: Light Value: Far-red vs. White
  misc_feature: MA Experiment 20001247 PARAMETER Experiment Name: At_Far-red-induction_P Parameter: Organism Value: A. thaliana
  misc_feature: MA Experiment 20001247 PARAMETER Experiment Name: At_Far-red-induction_P Parameter: Plant Line Value: Columbia
  misc_feature: MA Experiment 20001247 PARAMETER Experiment Name: At_Far-red-induction_P Parameter: Timepoint (hr) Value: 1
  misc_feature: MA Experiment 20001247 PARAMETER Experiment Name: At_Far-red-induction_P Parameter: Tissue Value: Whole Plant
cattaggattttgaatttccaaatacattttcagaaaaaaaagaattaaaagatcccattgttgttatcctcacagtaaatgcttttgcttgagagagagtctgttagaggttttttgtttgtttctgtttccttctgtcacccagaaaactaaaaagcaaacaaattcaagaagagagagagagagatagcctcaaaaccaagtcctaaccattgttgatagaagagaaagcttttcttttcttgttgcttatggtgaaagaatgaaagagagagaggaggagaagtaagaagcagagaaagtgtttagagctttgcatgttcctttctctccaagtttatatcttcatcggtttcacaagttcacttaaaaagttgaaaagagtctttcttcttcaactattgtaaatgcgaaatggatcgaagagatgcaatgggattatccgggtcaggttcttactatatccatagaggattacccgggtcgggtcctccaacgtttcatggatcaccacagcaacagcaaggtcttcgtcacttacctaatcaaaactctccattcgggtcaggctccactggtttcggatctccttctttacacggtgatccttctctggcaacagcagccggaggagccggagctcttcctcatcatatcggcgttaatatgattgctcctcctccacctcccagtgaaactccgatgaaacgaaagagaggacggcctagaaaatacggtcaagacggctctgtttctttggctctgtcgtcttcctctgtttcgaccattactcccaacaactctaacaaacgcggccgtggtcgacctccgggctccggcaagaaacagagaatggcttccgttggtgaactgatgccttcatcttctggaatgagcttcacgccacatgttatcgcggtttcaataggagaagatattgcatcaaaggttatagctttctctcaacaaggtccgagagccatttgcgttttatctgcaagtggtgcagtctctactgcaacacttattcaaccatcagcatctcccggagccattaaatacgagggccggtttgaaatcctagcgttatcaacatcttatatagtggcaactgatggaagcttccgtaaccgaactggaaacttatcggtttcgcttgctagccccgatgggcgtgtgattggcggtgccattggtgggcctttaatagctgcaagtcctgttcaggttattgtagggagctttatatgggcagctccaaagatcaagagcaagaaacgagaagaagaagcttctgaagttgttcaagaaactgatgatcaccacgttctggacaataataacaacacgatttcgcctgtccctcagcagcagccaaaccaaaacctgatttggtcaacaggttcaaggcaaatggatatgcgtcatgctcatgctgatattgatttaatgcgcggttgatgatagcgagaaagaactctgtgtatataaagcatggaatctaggaagaagaagaaggaatataagctaacctctgaacaaaagtatgtggaaatgttagggaaaaagattaactctattagtgtacctctcatatctctaagcttgtttggttttactgtttctgtgactctgaagatttgcagagttcctttctttctctgttttagattgttcagtctttatgtaatttgcttgcaattctgattctacagcttagattcagtacattgtgtagaagtttacatgggaacctgaaaattgggcatttcatgggccttcatatgatccaatttattttcatcaaatttgtattagtacataattaattttgtttttt

SEQ ID NO: 36849 - protein, 348 aa, Arabidopsis thaliana
  peptide (1)..(348): Ceres Seq. ID no. 12336395
  misc_feature (89)..(348): Homolog of NCBI NO: 6633838 NR Description: F2K11.15 [Arabidopsis thaliana]
  misc_feature (1)..(317): Homolog of NCBI NO: 6633838 NR Description: F2K11.15 [Arabidopsis thaliana]
  misc_feature (1)..(348): Homolog of NCBI NO: 22330402 NR Description: DNA-binding protein, putative
  misc_feature (1)..(321): Homolog of NCBI NO: 6633838 NR Description: F2K11.15 [Arabidopsis thaliana]
  misc_feature (1)..(348): Homolog of NCBI NO: 30696854 NR Description: DNA-binding protein -related [Arabidopsis
  misc_feature (1)..(337): Homolog of NCBI NO: 2213534 NR Description: DNA-binding PD1-like protein [Pisum sativum]
  misc_feature (1)..(348): Homolog of NCBI NO: 7488825 NR Description: probable DNA-binding protein - garden pea
  misc_feature (7)..(348): Homolog of NCBI NO: 11281387 NR Description: probable DNA-binding protein - Arabidopsis
  misc_feature (1)..(348): Homolog of NCBI NO: 30695388 NR Description: DNA-binding protein -related [Arabidopsis
  misc_feature (1)..(348): Homolog of NCBI NO: 15225902 NR Description: putative AT-hook DNA-binding protein
MDRRDAMGLSGSGSYYIHRGLPGSGPPTFHGSPQQQQGLRHLPNQNSPFGSGSTGFGSPSLHGDPSLATAAGGAGALPHHIGVNMIAPPPPPSETPMKRKRGRPRKYGQDGSVSLALSSSSVSTITPNNSNKRGRGRPPGSGKKQRMASVGELMPSSSGMSFTPHVIAVSIGEDIASKVIAFSQQGPRAICVLSASGAVSTATLIQPSASPGAIKYEGRFEILALSTSYIVATDGSFRNRTGNLSVSLASPDGRVIGGAIGGPLIAASPVQVIVGSFIWAAPKIKSKKREEEASEVVQETDDHHVLDNNNNTISPVPQQQPNQNLIWSTGSRQMDMRHAHADIDLMRG

SEQ ID NO: 36850 - protein, 342 aa, Arabidopsis thaliana
  peptide (1)..(342): Ceres Seq. ID no. 12336396
  misc_feature (83)..(342): Homolog of NCBI NO: 6633838 NR Description: F2K11.15 [Arabidopsis thaliana]
  misc_feature (1)..(311): Homolog of NCBI NO: 6633838 NR Description: F2K11.15 [Arabidopsis thaliana]
  misc_feature (1)..(342): Homolog of NCBI NO: 22330402 NR Description: DNA-binding protein, putative
  misc_feature (1)..(315): Homolog of NCBI NO: 6633838 NR Description: F2K11.15 [Arabidopsis thaliana]
  misc_feature (1)..(342): Homolog of NCBI NO: 30696854 NR Description: DNA-binding protein -related [Arabidopsis
  misc_feature (1)..(331): Homolog of NCBI NO: 2213534 NR Description: DNA-binding PD1-like protein [Pisum sativum]
  misc_feature (1)..(342): Homolog of NCBI NO: 7488825 NR Description: probable DNA-binding protein - garden pea
  misc_feature (1)..(342): Homolog of NCBI NO: 11281387 NR Description: probable DNA-binding protein - Arabidopsis
  misc_feature (1)..(342): Homolog of NCBI NO: 30695388 NR Description: DNA-binding protein -related [Arabidopsis
  misc_feature (1)..(342): Homolog of NCBI NO: 15225902 NR Description: putative AT-hook DNA-binding protein
MGLSGSGSYYIHRGLPGSGPPTFHGSPQQQQGLRHLPNQNSPFGSGSTGFGSPSLHGDPSLATAAGGAGALPHHIGVNMIAPPPPPSETPMKRKRGRPRKYGQDGSVSLALSSSSVSTITPNNSNKRGRGRPPGSGKKQRMASVGELMPSSSGMSFTPHVIAVSIGEDIASKVIAFSQQGPRAICVLSASGAVSTATLIQPSASPGAIKYEGRFEILALSTSYIVATDGSFRNRTGNLSVSLASPDGRVIGGAIGGPLIAASPVQVIVGSFIWAAPKIKSKKREEEASEVVQETDDHHVLDNNNNTISPVPQQQPNQNLIWSTGSRQMDMRHAHADIDLMRG

SEQ ID NO: 36851 - protein, 264 aa, Arabidopsis thaliana; identical to SEQ ID NO: 36795
  peptide (1)..(264): Ceres Seq. ID no. 12336397
  misc_feature (5)..(264): Homolog of NCBI NO: 6633838 NR Description: F2K11.15 [Arabidopsis thaliana]
  misc_feature (1)..(233): Homolog of NCBI NO: 6633838 NR Description: F2K11.15 [Arabidopsis thaliana]
  misc_feature (1)..(264): Homolog of NCBI NO: 22330402 NR Description: DNA-binding protein, putative
  misc_feature (1)..(237): Homolog of NCBI NO: 6633838 NR Description: F2K11.15 [Arabidopsis thaliana]
  misc_feature (1)..(264): Homolog of NCBI NO: 30696854 NR Description: DNA-binding protein -related [Arabidopsis
  misc_feature (1)..(253): Homolog of NCBI NO: 2213534 NR Description: DNA-binding PD1-like protein [Pisum sativum]
  misc_feature (1)..(264): Homolog of NCBI NO: 7488825 NR Description: probable DNA-binding protein - garden pea
  misc_feature (1)..(264): Homolog of NCBI NO: 11281387 NR Description: probable DNA-binding protein - Arabidopsis
  misc_feature (1)..(264): Homolog of NCBI NO: 30695388 NR Description: DNA-binding protein -related [Arabidopsis
  misc_feature (1)..(264): Homolog of NCBI NO: 15225902 NR Description: putative AT-hook DNA-binding protein

SEQ ID NO: 36852 - DNA, 1778 bp, Arabidopsis thaliana
  misc_feature (1)..(1778): Ceres Seq. ID no. 12488347
  misc_feature: MA Experiment ID: 20000180 Result: Up-regulated in Transcription
  misc_feature: MA Experiment 20000180 PARAMETER Experiment Name: At_Germinating_Seeds_P Parameter: Age (hr) Value: 24 vs. 0
  misc_feature: MA Experiment 20000180 PARAMETER Experiment Name: At_Germinating_Seeds_P Parameter: Tissue Value: Germinating Seeds
  misc_feature: MA Experiment ID: 20000184 Result: Up-regulated in Transcription
  misc_feature: MA Experiment 20000184 PARAMETER Experiment Name: At_Shoots__P Parameter: Age (day) Value: 7
  misc_feature: MA Experiment 20000184 PARAMETER Experiment Name: At_Shoots__P Parameter: Tissue Value: Shoots vs. Whole Plant
  misc_feature: MA Experiment ID: 20000185 Result: Up-regulated in Transcription
  misc_feature: MA Experiment 20000185 PARAMETER Experiment Name: At_Roots__P Parameter: Age (day) Value: 7 vs. 21
  misc_feature: MA Experiment 20000185 PARAMETER Experiment Name: At_Roots__P Parameter: Organism Value: A. thaliana
  misc_feature: MA Experiment 20000185 PARAMETER Experiment Name: At_Roots__P Parameter: Tissue Value: Roots vs. Whole Plant
  misc_feature: MA Experiment ID: 20000227 Result: Up-regulated in Transcription
  misc_feature: MA Experiment 20000227 PARAMETER Experiment Name: At_Root-Tips-vs-Tops_P Parameter: Tissue Value: Root Tips vs. Root Tops
  misc_feature: MA Experiment ID: 20000264 Result: Up-regulated in Transcription
  misc_feature: MA Experiment 20000264 PARAMETER Experiment Name: At_Open_Flower_P Parameter: Age (day) Value: 21
  misc_feature: MA Experiment 20000264 PARAMETER Experiment Name: At_Open_Flower_P Parameter: Plant Line Value: WS
  misc_feature: MA Experiment 20000264 PARAMETER Experiment Name: At_Open_Flower_P Parameter: Tissue Value: Open Flower vs. Whole Plant
  misc_feature: MA Experiment ID: 20000265 Result: Up-regulated in Transcription
  misc_feature: MA Experiment 20000265 PARAMETER Experiment Name: At_Open_Flower_P Parameter: Age (day) Value: 21
  misc_feature: MA Experiment 20000265 PARAMETER Experiment Name: At_Open_Flower_P Parameter: Plant Line Value: WS
  misc_feature: MA Experiment 20000265 PARAMETER Experiment Name: At_Open_Flower_P Parameter: Tissue Value: Closed Flower vs. Whole Plant
  misc_feature: MA Experiment ID: 20000286 Result: Up-regulated in Transcription
  misc_feature: MA Experiment 20000286 PARAMETER Experiment Name: At_Open_Flower_P Parameter: Age (day) Value: 21
  misc_feature: MA Experiment 20000286 PARAMETER Experiment Name: At_Open_Flower_P Parameter: Plant Line Value: WS
  misc_feature: MA Experiment 20000286 PARAMETER Experiment Name: At_Open_Flower_P Parameter: Tissue Value: Half Open vs. Whole Plant
  misc_feature: MA Experiment ID: 20000438 Result: Up-regulated in Transcription
  misc_feature: MA Experiment 20000438 PARAMETER Experiment Name: At_Shoots__P Parameter: Age (day) Value: 14
  misc_feature: MA Experiment 20000438 PARAMETER Experiment Name: At_Shoots__P Parameter: Tissue Value: Shoots vs. Whole Plant
  misc_feature: MA Experiment ID: 20000439 Result: Up-regulated in Transcription
  misc_feature: MA Experiment 20000439 PARAMETER Experiment Name: At_Roots__P Parameter: Age (day) Value: 14 vs. 21
  misc_feature: MA Experiment 20000439 PARAMETER Experiment Name: At_Roots__P Parameter: Organism Value: A. thaliana
  misc_feature: MA Experiment 20000439 PARAMETER Experiment Name: At_Roots__P Parameter: Tissue Value: Roots vs. Whole Plant
  misc_feature: MA Experiment ID: 20000451 Result: Down-regulated in Transcription
  misc_feature: MA Experiment 20000451 PARAMETER Experiment Name: At_CS6879_Shoots-Roots_P Parameter: Age (day) Value: 14
  misc_feature: MA Experiment 20000451 PARAMETER Experiment Name: At_CS6879_Shoots-Roots_P Parameter: Organism Value: A. thaliana
  misc_feature: MA Experiment 20000451 PARAMETER Experiment Name: At_CS6879_Shoots-Roots_P Parameter: Plant Line Value: CS6879 vs. WS
  misc_feature: MA Experiment 20000451 PARAMETER Experiment Name: At_CS6879_Shoots-Roots_P Parameter: Tissue Value: Roots
  misc_feature: MA Experiment ID: 20000496 Result: Up-regulated in Transcription
  misc_feature: MA Experiment 20000496 PARAMETER Experiment Name: At_Guard_Cells_P Parameter: Harvest Date Value: 7/19/2002
  misc_feature: MA Experiment 20000496 PARAMETER Experiment Name: At_Guard_Cells_P Parameter: Organism Value: Canola
  misc_feature: MA Experiment 20000496 PARAMETER Experiment Name: At_Guard_Cells_P Parameter: Tissue Value: Guard Cells vs. Leaves
  misc_feature: MA Experiment ID: 20000794 Result: Up-regulated in Transcription
  misc_feature: MA Experiment 20000794 PARAMETER Experiment Name: At_Petals_P Parameter: Age (day) Value: 23-25 days
  misc_feature: MA Experiment 20000794 PARAMETER Experiment Name: At_Petals_P Parameter: Plant Line Value: WS
  misc_feature: MA Experiment 20000794 PARAMETER Experiment Name: At_Petals_P Parameter: Tissue Value: Petals vs. Whole plant
  misc_feature: MA Experiment ID: 20001757 Result: Down-regulated in Transcription
  misc_feature: MA Experiment 20001757 PARAMETER Experiment Name: At_50mM_NH4NO3_L-to-H_P Parameter: Timepoint (hr) Value: 6
  misc_feature: MA Experiment 20001757 PARAMETER Experiment Name: At_50mM_NH4NO3_L-to-H_P Parameter: Tissue Value: Leaf
  misc_feature: MA Experiment 20001757 PARAMETER Experiment Name: At_50mM_NH4NO3_L-to-H_P Parameter: Treatment Value: 50mM NH4NO3 vs 100mM Mannitol
aaacccacttcgcagattcactcttcaccatcttcacctctcaaagaaacccctttcttcctcttctctgttcctctgctccgccgcaaaaatgaacgaccatatccaccgtgttccggctctcaccgaggaagagattgactccgtcgccataaaaacatttgagagatacgcattaccttcttcttcctccgttaagagaaaggggaaaggagtaacgattctctggttcagaaacgatctcagagttcttgacaatgacgcattgtacaaagcttggtcttcctctgataccattttgcctgtttactgtctcgatcctcgtctctttcacactactcatttcttcaacttccctaaaaccggagctttaagaggcggttttcttatggaatgtttggttgatttgagaaagaatcttatgaaacgaggattgaatcttcttattagaagtggtaaaccagaagagattcttccttctcttgctaaagattttggagctcgtacagtttttgcgcataaagaaacgtgtagtgaggaggtagacgttgaaagacttgtgaatcaaggtttgaaaagggttggaaatagtactaagcttgagctcatttggggaagtactatgtatcacaaagatgatcttccttttgatgtttttgacttgcctgatgtctacactcagtttcgtaagtcggtggaagctaagtgtagtatcagaagctctactcgcattccactatctctagggccaacaccttctgttgatgattggggagatgttccaactcttgagaaacttggggttgagcctcaagaggtaaccagaggaatgcgattcgttggtggtgaaagtgcaggagtaggcagagtatttgagtacttttggaaaaaggatctattgaaagtatacaaagagacgaggaacggaatgttaggacctgattattcgacgaaattctctccttggcttgcctttgggtgtatctctcctcgttttatctatgaagaggtccaaagatatgaaaaggaaagagtagcaaataattcaacatactgggtactttttgaactaatatggagagattacttcaggtttctttcaattaagtgtggaaactcactttttcatctaggtggcccgagaaatgtgcaagggaagtggagccaagatcagaaactatttgagtcttggagagatgccaagacagggtatcctcttatagatgcaaacatgaaggagttatccactacaggtttcatgtcaaatcgaggccgacagattgtttgttcgtttcttgtccgggacatggggttggattggcgtatgggtgcagaatggtttgagacatgtctattagactatgatccttgttctaattatggaaactggacctatggagcaggagttggaaatgatccacgggaagaccggtacttcagcattcccaagcaagcacaaaactatgatccagaaggagaatacgttgcgttttggctgcagcagctacgtcggcttccgaaagagaaaagacattggccagggagattgatgtatatggacacagttgtgccattgaagcatggtaatggtccaatggctggagggtcaaagtctgggggtggcttcagagggagtcacagtgggagacgttctagacacaatggtccttagagagaaactattctttacacgaacttgtatcttatttttatttctgtgattcttcattcttgtgcacaaggatctctgattctctcggtctaaattacattgactt

SEQ ID NO: 36853 - protein, 556 aa, Arabidopsis thaliana
  peptide (1)..(556): Ceres Seq. ID no. 12488348
  misc_feature (280)..(540): Pfam Name: FAD binding domain of DNA photolyase Pfam Description: FAD binding domain of DNA photolyase
  misc_feature (70)..(498): Homolog of NCBI NO: 28900058 NR Description: deoxyribodipyrimidine photolyase
  misc_feature (70)..(498): Homolog of NCBI NO: 15641816 NR Description: deoxyribodipyrimidine photolyase [Vibrio
  misc_feature (73)..(500): Homolog of NCBI NO: 23135973 NR Description: hypothetical protein [Cytophaga hutchinsonii]
  misc_feature (74)..(516): Homolog of NCBI NO: 32477278 NR Description: DNA photolyase [Pirellula sp.]
  misc_feature (74)..(517): Homolog of NCBI NO: 37520404 NR Description: probable bacterial cryptochrome [Gloeobacter
  misc_feature (102)..(513): Homolog of NCBI NO: 16330358 NR Description: DNA photolyase [Synechocystis sp. PCC 6803]
  misc_feature (74)..(513): Homolog of NCBI NO: 28374085 NR Description: Chain A, Crystal Structure Analysis Of
  misc_feature (70)..(517): Homolog of NCBI NO: 23040111 NR Description: hypothetical protein [Trichodesmium erythraeum
  misc_feature (32)..(556): Homolog of NCBI NO: 28971609 NR Description: cryptochrome dash [Arabidopsis thaliana]
  misc_feature (31)..(556): Homolog of NCBI NO: 22327046 NR Description: DNA photolyase - like protein
NPLRRFTLHHLHLSKKPLSSSSLFLCSAAKMNDHIHRVPALTEEEIDSVAIKTFERYALPSSSSVKRKGKGVTILWFRNDLRVLDNDALYKAWSSSDTILPVYCLDPRLFHTTHFFNFPKTGALRGGFLMECLVDLRKNLMKRGLNLLIRSGKPEEILPSLAKDFGARTVFAHKETCSEEVDVERLVNQGLKRVGNSTKLELIWGSTMYHKDDLPFDVFDLPDVYTQFRKSVEAKCSIRSSTRIPLSLGPTPSVDDWGDVPTLEKLGVEPQEVTRGMRFVGGESAGVGRVFEYFWKKDLLKVYKETRNGMLGPDYSTKFSPWLAFGCISPRFIYEEVQRYEKERVANNSTYWVLFELIWRDYFRFLSIKCGNSLFHLGGPRNVQGKWSQDQKLFESWRDAKTGYPLIDANMKELSTTGFMSNRGRQIVCSFLVRDMGLDWRMGAEWFETCLLDYDPCSNYGNWTYGAGVGNDPREDRYFSIPKQAQNYDPEGEYVAFWLQQLRRLPKEKRHWPGRLMYMDTVVPLKHGNGPMAGGSKSGGGFRGSHSGRRSRHNGP

SEQ ID NO: 36854 - protein, 526 aa, Arabidopsis thaliana
  peptide (1)..(526): Ceres Seq. ID no. 12488349
  misc_feature (250)..(510): Pfam Name: FAD binding domain of DNA photolyase Pfam Description: FAD binding domain of DNA photolyase
  misc_feature (40)..(468): Homolog of NCBI NO: 28900058 NR Description: deoxyribodipyrimidine photolyase
  misc_feature (40)..(468): Homolog of NCBI NO: 15641816 NR Description: deoxyribodipyrimidine photolyase [Vibrio
  misc_feature (43)..(470): Homolog of NCBI NO: 23135973 NR Description: hypothetical protein [Cytophaga hutchinsonii]
  misc_feature (44)..(486): Homolog of NCBI NO: 32477278 NR Description: DNA photolyase [Pirellula sp.]
  misc_feature (44)..(487): Homolog of NCBI NO: 37520404 NR Description: probable bacterial cryptochrome [Gloeobacter
  misc_feature (72)..(483): Homolog of NCBI NO: 16330358 NR Description: DNA photolyase [Synechocystis sp. PCC 6803]
  misc_feature (44)..(483): Homolog of NCBI NO: 28374085 NR Description: Chain A, Crystal Structure Analysis Of
  misc_feature (40)..(487): Homolog of NCBI NO: 23040111 NR Description: hypothetical protein [Trichodesmium erythraeum
  misc_feature (2)..(526): Homolog of NCBI NO: 28971609 NR Description: cryptochrome dash [Arabidopsis thaliana]
  misc_feature (1)..(526): Homolog of NCBI NO: 22327046 NR Description: DNA photolyase - like protein
MNDHIHRVPALTEEEIDSVAIKTFERYALPSSSSVKRKGKGVTILWFRNDLRVLDNDALYKAWSSSDTILPVYCLDPRLFHTTHFFNFPKTGALRGGFLMECLVDLRKNLMKRGLNLLIRSGKPEEILPSLAKDFGARTVFAHKETCSEEVDVERLVNQGLKRVGNSTKLELIWGSTMYHKDDLPFDVFDLPDVYTQFRKSVEAKCSIRSSTRIPLSLGPTPSVDDWGDVPTLEKLGVEPQEVTRGMRFVGGESAGVGRVFEYFWKKDLLKVYKETRNGMLGPDYSTKFSPWLAFGCISPRFIYEEVQRYEKERVANNSTYWVLFELIWRDYFRFLSIKCGNSLFHLGGPRNVQGKWSQDQKLFESWRDAKTGYPLIDANMKELSTTGFMSNRGRQIVCSFLVRDMGLDWRMGAEWFETCLLDYDPCSNYGNWTYGAGVGNDPREDRYFSIPKQAQNYDPEGEYVAFWLQQLRRLPKEKRHWPGRLMYMDTVVPLKHGNGPMAGGSKSGGGFRGSHSGRRSRHNGP

SEQ ID NO: 36855 - protein, 427 aa, Arabidopsis thaliana
  peptide (1)..(427): Ceres Seq. ID no. 12488350
  misc_feature (151)..(411): Pfam Name: FAD binding domain of DNA photolyase Pfam Description: FAD binding domain of DNA photolyase
  misc_feature (1)..(369): Homolog of NCBI NO: 28900058 NR Description: deoxyribodipyrimidine photolyase
  misc_feature (1)..(369): Homolog of NCBI NO: 15641816 NR Description: deoxyribodipyrimidine photolyase [Vibrio
  misc_feature (1)..(371): Homolog of NCBI NO: 23135973 NR Description: hypothetical protein [Cytophaga hutchinsonii]
  misc_feature (1)..(387): Homolog of NCBI NO: 32477278 NR Description: DNA photolyase [Pirellula sp.]
  misc_feature (1)..(388): Homolog of NCBI NO: 37520404 NR Description: probable bacterial cryptochrome [Gloeobacter
  misc_feature (1)..(384): Homolog of NCBI NO: 16330358 NR Description: DNA photolyase [Synechocystis sp. PCC 6803]
  misc_feature (1)..(384): Homolog of NCBI NO: 28374085 NR Description: Chain A, Crystal Structure Analysis Of
  misc_feature (1)..(388): Homolog of NCBI NO: 23040111 NR Description: hypothetical protein [Trichodesmium erythraeum
  misc_feature (1)..(427): Homolog of NCBI NO: 28971609 NR Description: cryptochrome dash [Arabidopsis thaliana]
  misc_feature (1)..(427): Homolog of NCBI NO: 22327046 NR Description: DNA photolyase - like protein
MECLVDLRKNLMKRGLNLLIRSGKPEEILPSLAKDFGARTVFAHKETCSEEVDVERLVNQGLKRVGNSTKLELIWGSTMYHKDDLPFDVFDLPDVYTQFRKSVEAKCSIRSSTRIPLSLGPTPSVDDWGDVPTLEKLGVEPQEVTRGMRFVGGESAGVGRVFEYFWKKDLLKVYKETRNGMLGPDYSTKFSPWLAFGCISPRFIYEEVQRYEKERVANNSTYWVLFELIWRDYFRFLSIKCGNSLFHLGGPRNVQGKWSQDQKLFESWRDAKTGYPLIDANMKELSTTGFMSNRGRQIVCSFLVRDMGLDWRMGAEWFETCLLDYDPCSNYGNWTYGAGVGNDPREDRYFSIPKQAQNYDPEGEYVAFWLQQLRRLPKEKRHWPGRLMYMDTVVPLKHGNGPMAGGSKSGGGFRGSHSGRRSRHNGP

SEQ ID NO: 36856 - DNA, 1272 bp, Arabidopsis thaliana
  misc_feature (1)..(1272): Ceres Seq. ID no. 13491032
  misc_feature: MA Experiment ID: 108434 Result: Down-regulated in Transcription
  misc_feature: MA Experiment 108434 PARAMETER Experiment Name: At_Root_Tips_cDNA_P Parameter: Tissue Value: Root Tips
  misc_feature: MA Experiment ID: 108473 Result: Up-regulated in Transcription
  misc_feature: MA Experiment 108473 PARAMETER Experiment Name: At_Drought_Flowers_cDNA_P Parameter: Timepoint (hr) Value: 7 d
  misc_feature: MA Experiment 108473 PARAMETER Experiment Name: At_Drought_Flowers_cDNA_P Parameter: Tissue Value: Flower
  misc_feature: MA Experiment 108473 PARAMETER Experiment Name: At_Drought_Flowers_cDNA_P Parameter: Treatment Value: Drought vs. No Drought
  misc_feature: MA Experiment ID: 108474 Result: Down-regulated in Transcription
  misc_feature: MA Experiment 108474 PARAMETER Experiment Name: At_Drought_Flowers_cDNA_P Parameter: Timepoint (hr) Value: null
  misc_feature: MA Experiment 108474 PARAMETER Experiment Name: At_Drought_Flowers_cDNA_P Parameter: Treatment Value: Drought vs. No Drought
  misc_feature: MA Experiment ID: 108569 Result: Up-regulated in Transcription
  misc_feature: MA Experiment 108569 PARAMETER Experiment Name: At_0.001%_MeJA__cDNA_P Parameter: Timepoint (hr) Value: 6
  misc_feature: MA Experiment 108569 PARAMETER Experiment Name: At_0.001%_MeJA__cDNA_P Parameter: Tissue Value: Aerial
  misc_feature: MA Experiment 108569 PARAMETER Experiment Name: At_0.001%_MeJA__cDNA_P Parameter: Treatment Value: 0.001% MeJA vs. No Treatment
  misc_feature: MA Experiment ID: 108572 Result: Down-regulated in Transcription
  misc_feature: MA Experiment 108572 PARAMETER Experiment Name: At_Drought_cDNA_P Parameter: Timepoint (hr) Value: 1
  misc_feature: MA Experiment 108572 PARAMETER Experiment Name: At_Drought_cDNA_P Parameter: Tissue Value: Aerial
  misc_feature: MA Experiment 108572 PARAMETER Experiment Name: At_Drought_cDNA_P Parameter: Treatment Value: Drought vs. No Drought
  misc_feature: MA Experiment ID: 108573 Result: Up-regulated in Transcription
  misc_feature: MA Experiment 108573 PARAMETER Experiment Name: At_Drought_cDNA_P Parameter: Timepoint (hr) Value: 6
  misc_feature: MA Experiment 108573 PARAMETER Experiment Name: At_Drought_cDNA_P Parameter: Tissue Value: Aerial
  misc_feature: MA Experiment 108573 PARAMETER Experiment Name: At_Drought_cDNA_P Parameter: Treatment Value: Drought vs. No Drought
  misc_feature: MA Experiment ID: 108574 Result: Up-regulated in Transcription
  misc_feature: MA Experiment 108574 PARAMETER Experiment Name: At_Wounding__cDNA_P Parameter: Timepoint (hr) Value: 1
  misc_feature: MA Experiment 108574 PARAMETER Experiment Name: At_Wounding__cDNA_P Parameter: Tissue Value: Aerial
  misc_feature: MA Experiment 108574 PARAMETER Experiment Name: At_Wounding__cDNA_P Parameter: Treatment Value: Wounding vs. No Wounding
  misc_feature: MA Experiment ID: 108585 Result: Up-regulated in Transcription
  misc_feature: MA Experiment 108585 PARAMETER Experiment Name: At_5mM_NaNP_cDNA_P Parameter: Timepoint (hr) Value: 6
  misc_feature: MA Experiment 108585 PARAMETER Experiment Name: At_5mM_NaNP_cDNA_P Parameter: Tissue Value: Aerial
  misc_feature: MA Experiment 108585 PARAMETER Experiment Name: At_5mM_NaNP_cDNA_P Parameter: Treatment Value: null
  misc_feature: MA Experiment ID: 108594 Result: Up-regulated in Transcription
  misc_feature: MA Experiment 108594 PARAMETER Experiment Name: At_Ler-rhl_Root_cDNA_P Parameter: Plant Line Value: null
  misc_feature: MA Experiment ID: 108595 Result: Up-regulated in Transcription
  misc_feature: MA Experiment 108595 PARAMETER Experiment Name: At_Ler-pi_Ovule_cDNA_P Parameter: Plant Line Value: null
  misc_feature: MA Experiment ID: 108608 Result: Down-regulated in Transcription
  misc_feature: MA Experiment 108608 PARAMETER Experiment Name: At_100uM_ABA_cDNA_P Parameter: Timepoint (hr) Value: 1
  misc_feature: MA Experiment 108608 PARAMETER Experiment Name: At_100uM_ABA_cDNA_P Parameter: Tissue Value: Aerial
  misc_feature: MA Experiment 108608 PARAMETER Experiment Name: At_100uM_ABA_cDNA_P Parameter: Treatment Value: 100uM ABA vs. No Treatment
  misc_feature: MA Experiment ID: 108668 Result: Up-regulated in Transcription
  misc_feature: MA Experiment 108668 PARAMETER Experiment Name: At_2mM_SA_cDNA_P Parameter: Plant Line Value: WS
  misc_feature: MA Experiment 108668 PARAMETER Experiment Name: At_2mM_SA_cDNA_P Parameter: Timepoint (hr) Value: 6
  misc_feature: MA Experiment 108668 PARAMETER Experiment Name: At_2mM_SA_cDNA_P Parameter: Treatment Value: 2mM SA vs. No Treatment
  misc_feature: MA Experiment ID: 20000071 Result: Up-regulated in Transcription
  misc_feature: MA Experiment 20000071 PARAMETER Experiment Name: At_100uM_ABA_Mutants_cDNA_P Parameter: Plant Line Value: CS8104
  misc_feature: MA Experiment 20000071 PARAMETER Experiment Name: At_100uM_ABA_Mutants_cDNA_P Parameter: Timepoint (hr) Value: 6
  misc_feature: MA Experiment 20000071 PARAMETER Experiment Name: At_100uM_ABA_Mutants_cDNA_P Parameter: Tissue Value: Aerial
  misc_feature: MA Experiment 20000071 PARAMETER Experiment Name: At_100uM_ABA_Mutants_cDNA_P Parameter: Treatment Value: 100uM ABA vs. No Treatment
  misc_feature: MA Experiment ID: 20000072 Result: Up-regulated in Transcription
  misc_feature: MA Experiment 20000072 PARAMETER Experiment Name: At_100uM_ABA_Mutants_cDNA_P Parameter: Plant Line Value: CS8105
  misc_feature: MA Experiment 20000072 PARAMETER Experiment Name: At_100uM_ABA_Mutants_cDNA_P Parameter: Timepoint (hr) Value: 6
  misc_feature: MA Experiment 20000072 PARAMETER Experiment Name: At_100uM_ABA_Mutants_cDNA_P Parameter: Tissue Value: Aerial
  misc_feature: MA Experiment 20000072 PARAMETER Experiment Name: At_100uM_ABA_Mutants_cDNA_P Parameter: Treatment Value: 100uM ABA vs. No Treatment
  misc_feature: MA Experiment ID: 20000086 Result: Up-regulated in Transcription
  misc_feature: MA Experiment 20000086 PARAMETER Experiment Name: At_100uM_ABA_Mutants_cDNA_P Parameter: Plant Line Value: CS22
  misc_feature: MA Experiment 20000086 PARAMETER Experiment Name: At_100uM_ABA_Mutants_cDNA_P Parameter: Timepoint (hr) Value: 6
  misc_feature: MA Experiment 20000086 PARAMETER Experiment Name: At_100uM_ABA_Mutants_cDNA_P Parameter: Tissue Value: Aerial
  misc_feature: MA Experiment 20000086 PARAMETER Experiment Name: At_100uM_ABA_Mutants_cDNA_P Parameter: Treatment Value: 100uM ABA vs. No Treatment
  misc_feature: MA Experiment ID: 20000087 Result: Up-regulated in Transcription
  misc_feature: MA Experiment 20000087 PARAMETER Experiment Name: At_100uM_ABA_Mutants_cDNA_P Parameter: Plant Line Value: WS
  misc_feature: MA Experiment 20000087 PARAMETER Experiment Name: At_100uM_ABA_Mutants_cDNA_P Parameter: Timepoint (hr) Value: 6
  misc_feature: MA Experiment 20000087 PARAMETER Experiment Name: At_100uM_ABA_Mutants_cDNA_P Parameter: Tissue Value: Aerial
  misc_feature: MA Experiment 20000087 PARAMETER Experiment Name: At_100uM_ABA_Mutants_cDNA_P Parameter: Treatment Value: 100uM ABA vs. No Treatment
  misc_feature: MA Experiment ID: 20000112 Result: Down-regulated in Transcription
  misc_feature: MA Experiment 20000112 PARAMETER Experiment Name: At_42deg_Heat_cDNA_P Parameter: Temperature (deg C) Value: 42 vs. 22
  misc_feature: MA Experiment 20000112 PARAMETER Experiment Name: At_42deg_Heat_cDNA_P Parameter: Timepoint (hr) Value: 2
  misc_feature: MA Experiment 20000112 PARAMETER Experiment Name: At_42deg_Heat_cDNA_P Parameter: Tissue Value: Aerial
  misc_feature: MA Experiment ID: 20000117 Result: Up-regulated in Transcription
  misc_feature: MA Experiment 20000117 PARAMETER Experiment Name: At_100uM_ABA_Mutants_cDNA_P Parameter: Plant Line Value: Columbia
  misc_feature: MA Experiment 20000117 PARAMETER Experiment Name: At_100uM_ABA_Mutants_cDNA_P Parameter: Timepoint (hr) Value: 6
  misc_feature: MA Experiment 20000117 PARAMETER Experiment Name: At_100uM_ABA_Mutants_cDNA_P Parameter: Tissue Value: Aerial
  misc_feature: MA Experiment 20000117 PARAMETER Experiment Name: At_100uM_ABA_Mutants_cDNA_P Parameter: Treatment Value: 100uM ABA vs. No Treatment
  misc_feature: MA Experiment ID: 20000166 Result: Down-regulated in Transcription
  misc_feature: MA Experiment 20000166 PARAMETER Experiment Name: At_100uM_ABA_P Parameter: Age (day) Value: 14
  misc_feature: MA Experiment 20000166 PARAMETER Experiment Name: At_100uM_ABA_P Parameter: Organism Value: A. thaliana
  misc_feature: MA Experiment 20000166 PARAMETER Experiment Name: At_100uM_ABA_P Parameter: Plant Line Value: WS
  misc_feature: MA Experiment 20000166 PARAMETER Experiment Name: At_100uM_ABA_P Parameter: Timepoint (hr) Value: 1
  misc_feature: MA Experiment 20000166 PARAMETER Experiment Name: At_100uM_ABA_P Parameter: Tissue Value: Aerial
  misc_feature: MA Experiment 20000166 PARAMETER Experiment Name: At_100uM_ABA_P Parameter: Treatment Value: 100uM ABA vs. No Treatment
  misc_feature: MA Experiment ID: 20000180 Result: Down-regulated in Transcription
  misc_feature: MA Experiment 20000180 PARAMETER Experiment Name: At_Germinating_Seeds_P Parameter: Age (hr) Value: 24 vs. 0
  misc_feature: MA Experiment 20000180 PARAMETER Experiment Name: At_Germinating_Seeds_P Parameter: Tissue Value: Germinating Seeds
  misc_feature: MA Experiment ID: 20000182 Result: Up-regulated in Transcription
  misc_feature: MA Experiment 20000182 PARAMETER Experiment Name: At_2mM_SA_P Parameter: Age (day) Value: 14
  misc_feature: MA Experiment 20000182 PARAMETER Experiment Name: At_2mM_SA_P Parameter: Organism Value: A. thaliana
  misc_feature: MA Experiment 20000182 PARAMETER Experiment Name: At_2mM_SA_P Parameter: Plant Line Value: WS
  misc_feature: MA Experiment 20000182 PARAMETER Experiment Name: At_2mM_SA_P Parameter: Timepoint (hr) Value: 6
  misc_feature: MA Experiment 20000182 PARAMETER Experiment Name: At_2mM_SA_P Parameter: Tissue Value: Aerial
  misc_feature: MA Experiment 20000182 PARAMETER Experiment Name: At_2mM_SA_P Parameter: Treatment Value: 2mM SA vs. No Treatment
  misc_feature: MA Experiment ID: 20000184 Result: Down-regulated in Transcription
  misc_feature: MA Experiment 20000184 PARAMETER Experiment Name: At_Shoots__P Parameter: Age (day) Value: 7
  misc_feature: MA Experiment 20000184 PARAMETER Experiment Name: At_Shoots__P Parameter: Tissue Value: Shoots vs. Whole Plant
  misc_feature: MA Experiment ID: 20000211 Result: Up-regulated in Transcription
  misc_feature: MA Experiment 20000211 PARAMETER Experiment Name: At_0.001percent_MeJA__P Parameter: Age (day) Value: 14
  misc_feature: MA Experiment 20000211 PARAMETER Experiment Name: At_0.001percent_MeJA__P Parameter: Organism Value: A. thaliana
  misc_feature: MA Experiment 20000211 PARAMETER Experiment Name: At_0.001percent_MeJA__P Parameter: Plant Line Value: WS
  misc_feature: MA Experiment 20000211 PARAMETER Experiment Name: At_0.001percent_MeJA__P Parameter: Timepoint (hr) Value: 1
  misc_feature: MA Experiment 20000211 PARAMETER Experiment Name: At_0.001percent_MeJA__P Parameter: Tissue Value: Aerial
  misc_feature: MA Experiment 20000211 PARAMETER Experiment Name: At_0.001percent_MeJA__P Parameter: Treatment Value: 0.001percent MeJA vs. No Treatment
  misc_feature: MA Experiment ID: 20000224 Result: Up-regulated in Transcription
  misc_feature: MA Experiment ID: 20000234 Result: Down-regulated in Transcription
  misc_feature: MA Experiment 20000234 PARAMETER Experiment Name: At_Siliques_P Parameter: Age (day) Value: 21
  misc_feature: MA Experiment 20000234 PARAMETER Experiment Name: At_Siliques_P Parameter: Organism Value: A. thaliana
  misc_feature: MA Experiment 20000234 PARAMETER Experiment Name: At_Siliques_P Parameter: Plant Line Value: WS
  misc_feature: MA Experiment 20000234 PARAMETER Experiment Name: At_Siliques_P Parameter: Tissue Value: Less Than 5mm Siliques vs. Whole Plant
  misc_feature: MA Experiment ID: 20000286 Result: Up-regulated in Transcription
  misc_feature: MA Experiment 20000286 PARAMETER Experiment Name: At_Open_Flower_P Parameter: Age (day) Value: 21
  misc_feature: MA Experiment 20000286 PARAMETER Experiment Name: At_Open_Flower_P Parameter: Plant Line Value: WS
  misc_feature: MA Experiment 20000286 PARAMETER Experiment Name: At_Open_Flower_P Parameter: Tissue Value: Half Open vs. Whole Plant
  misc_feature: MA Experiment ID: 20000308 Result: Up-regulated in Transcription
  misc_feature: MA Experiment 20000308 PARAMETER Experiment Name: At_100mM_NaCl__P Parameter: Age (day) Value: 17
  misc_feature: MA Experiment 20000308 PARAMETER Experiment Name: At_100mM_NaCl__P Parameter: Organism Value: A. thaliana
  misc_feature: MA Experiment 20000308 PARAMETER Experiment Name: At_100mM_NaCl__P Parameter: Plant Line Value: WS
  misc_feature: MA Experiment 20000308 PARAMETER Experiment Name: At_100mM_NaCl__P Parameter: Timepoint (hr) Value: 72
  misc_feature: MA Experiment 20000308 PARAMETER Experiment Name: At_100mM_NaCl__P Parameter: Tissue Value: Whole Plant
  misc_feature: MA Experiment 20000308 PARAMETER Experiment Name: At_100mM_NaCl__P Parameter: Treatment Value: 100mM NaCl vs. No Treatment
  misc_feature: MA Experiment ID: 20000456 Result: Up-regulated in Transcription
  misc_feature: MA Experiment 20000456 PARAMETER Experiment Name: At_100uM_BA_P Parameter: Age (day) Value: 14
  misc_feature: MA Experiment 20000456 PARAMETER Experiment Name: At_100uM_BA_P Parameter: Organism Value: A. thaliana
  misc_feature: MA Experiment 20000456 PARAMETER Experiment Name: At_100uM_BA_P Parameter: Plant Line Value: WS
  misc_feature: MA Experiment 20000456 PARAMETER Experiment Name: At_100uM_BA_P Parameter: Timepoint (hr) Value: 6
  misc_feature: MA Experiment 20000456 PARAMETER Experiment Name: At_100uM_BA_P Parameter: Tissue Value: Aerial
  misc_feature: MA Experiment 20000456 PARAMETER Experiment Name: At_100uM_BA_P Parameter: Treatment Value: 100uM BA vs. No Treatment
  misc_feature: MA Experiment ID: 20000460 Result: Up-regulated in Transcription
  misc_feature: MA Experiment 20000460 PARAMETER Experiment Name: At_10percent_PEG_P Parameter: Age (day) Value: 12
  misc_feature: MA Experiment 20000460 PARAMETER Experiment Name: At_10percent_PEG_P Parameter: Organism Value: A. thaliana
  misc_feature: MA Experiment 20000460 PARAMETER Experiment Name: At_10percent_PEG_P Parameter: Plant Line Value: WS
  misc_feature: MA Experiment 20000460 PARAMETER Experiment Name: At_10percent_PEG_P Parameter: Timepoint (day) Value: 12
  misc_feature: MA Experiment 20000460 PARAMETER Experiment Name: At_10percent_PEG_P Parameter: Tissue Value: Whole Plant
  misc_feature: MA Experiment 20000460 PARAMETER Experiment Name: At_10percent_PEG_P Parameter: Treatment Value: 10percent PEG vs. No Treatment
  misc_feature: MA Experiment ID: 20000495 Result: Down-regulated in Transcription
  misc_feature: MA Experiment 20000495 PARAMETER Experiment Name: At_Guard_Cells_P Parameter: Harvest Date Value: 8/2/2002
  misc_feature: MA Experiment 20000495 PARAMETER Experiment Name: At_Guard_Cells_P Parameter: Organism Value: A. thaliana
  misc_feature: MA Experiment 20000495 PARAMETER Experiment Name: At_Guard_Cells_P Parameter: Tissue Value: Guard Cells vs. Leaves
  misc_feature: MA Experiment ID: 20000496 Result: Down-regulated in Transcription
  misc_feature: MA Experiment 20000496 PARAMETER Experiment Name: At_Guard_Cells_P Parameter: Harvest Date Value: 7/19/2002
  misc_feature: MA Experiment 20000496 PARAMETER Experiment Name: At_Guard_Cells_P Parameter: Organism Value: Canola
  misc_feature: MA Experiment 20000496 PARAMETER Experiment Name: At_Guard_Cells_P Parameter: Tissue Value: Guard Cells vs. Leaves
  misc_feature: MA Experiment ID: 20000506 Result: Up-regulated in Transcription
  misc_feature: MA Experiment 20000506 PARAMETER Experiment Name: At_Wounding_P Parameter: Organism Value: A. thaliana
  misc_feature: MA Experiment 20000506 PARAMETER Experiment Name: At_Wounding_P Parameter: Plant Line Value: WS
  misc_feature: MA Experiment 20000506 PARAMETER Experiment Name: At_Wounding_P Parameter: Timepoint (hr) Value: 6
  misc_feature: MA Experiment 20000506 PARAMETER Experiment Name: At_Wounding_P Parameter: Tissue Value: Aerial
  misc_feature: MA Experiment 20000506 PARAMETER Experiment Name: At_Wounding_P Parameter: Treatment Value: Wounding vs. No Wounding
  misc_feature: MA Experiment ID: 20000527 Result: Down-regulated in Transcription
  misc_feature: MA Experiment 20000527 PARAMETER Experiment Name: At_10percent_PEG_P Parameter: Age (day) Value: 20
  misc_feature: MA Experiment 20000527 PARAMETER Experiment Name: At_10percent_PEG_P Parameter: Organism Value: A. thaliana
  misc_feature: MA Experiment 20000527 PARAMETER Experiment Name: At_10percent_PEG_P Parameter: Plant Line Value: WS
  misc_feature: MA Experiment 20000527 PARAMETER Experiment Name: At_10percent_PEG_P Parameter: Timepoint (day) Value: 20
  misc_feature: MA Experiment 20000527 PARAMETER Experiment Name: At_10percent_PEG_P Parameter: Tissue Value: Whole Plant
  misc_feature: MA Experiment 20000527 PARAMETER Experiment Name: At_10percent_PEG_P Parameter: Treatment Value: 10percent PEG vs. No Treatment
  misc_feature: MA Experiment ID: 20000573 Result: Up-regulated in Transcription
  misc_feature: MA Experiment 20000573 PARAMETER Experiment Name: At_100uM_ABA_Mutants__P Parameter: Organism Value: A. thaliana
  misc_feature: MA Experiment 20000573 PARAMETER Experiment Name: At_100uM_ABA_Mutants__P Parameter: Plant Line Value: CS22 vs. Ler wt
  misc_feature: MA Experiment 20000573 PARAMETER Experiment Name: At_100uM_ABA_Mutants__P Parameter: Timepoint (hr) Value: N/A
  misc_feature: MA Experiment 20000573 PARAMETER Experiment Name: At_100uM_ABA_Mutants__P Parameter: Tissue Value: Whole Plant
  misc_feature: MA Experiment 20000573 PARAMETER Experiment Name: At_100uM_ABA_Mutants__P Parameter: Treatment Value: None
  misc_feature: MA Experiment ID: 20000574 Result: Up-regulated in Transcription
  misc_feature: MA Experiment 20000574 PARAMETER Experiment Name: At_100uM_ABA_Mutants__P Parameter: Organism Value: A. thaliana
  misc_feature: MA Experiment 20000574 PARAMETER Experiment Name: At_100uM_ABA_Mutants__P Parameter: Plant Line Value: CS23 vs. Ler wt
  misc_feature: MA Experiment 20000574 PARAMETER Experiment Name: At_100uM_ABA_Mutants__P Parameter: Timepoint (hr) Value: N/A
  misc_feature: MA Experiment 20000574 PARAMETER Experiment Name: At_100uM_ABA_Mutants__P Parameter: Tissue Value: Whole Plant
  misc_feature: MA Experiment 20000574 PARAMETER Experiment Name: At_100uM_ABA_Mutants__P Parameter: Treatment Value: None
  misc_feature: MA Experiment ID: 20000576 Result: Down-regulated in Transcription
  misc_feature: MA Experiment 20000576 PARAMETER Experiment Name: At_100uM_ABA_Mutants__P Parameter: Organism Value: A. thaliana
  misc_feature: MA Experiment 20000576 PARAMETER Experiment Name: At_100uM_ABA_Mutants__P Parameter: Plant Line Value: CS23
  misc_feature: MA Experiment 20000576 PARAMETER Experiment Name: At_100uM_ABA_Mutants__P Parameter: Timepoint (hr) Value: 6
  misc_feature: MA Experiment 20000576 PARAMETER Experiment Name: At_100uM_ABA_Mutants__P Parameter: Tissue Value: Whole Plant
  misc_feature: MA Experiment 20000576 PARAMETER Experiment Name: At_100uM_ABA_Mutants__P Parameter: Treatment Value: 1uM ABA vs. No Treatment
  misc_feature: MA Experiment ID: 20000709 Result: Up-regulated in Transcription
  misc_feature: MA Experiment 20000709 PARAMETER Experiment Name: At_15mM_NH4NO3_L-to-H_P Parameter: Age (hr) Value: 14
  misc_feature: MA Experiment 20000709 PARAMETER Experiment Name: At_15mM_NH4NO3_L-to-H_P Parameter: Organism Value: A. thaliana
  misc_feature: MA Experiment 20000709 PARAMETER Experiment Name: At_15mM_NH4NO3_L-to-H_P Parameter: Plant Line Value: WS
  misc_feature: MA Experiment 20000709 PARAMETER Experiment Name: At_15mM_NH4NO3_L-to-H_P Parameter: Timepoint (hr) Value: 4
  misc_feature: MA Experiment 20000709 PARAMETER Experiment Name: At_15mM_NH4NO3_L-to-H_P Parameter: Tissue Value: Aerial
  misc_feature: MA Experiment 20000709 PARAMETER Experiment Name: At_15mM_NH4NO3_L-to-H_P Parameter: Treatment Value: 15mM NH4NO3 vs. 30mM Mannitol
  misc_feature: MA Experiment ID: 20001450 Result: Down-regulated in Transcription
  misc_feature: MA Experiment 20001450 PARAMETER Experiment Name: At_Far-red-induction_P Parameter: Age (day) Value: 7
  misc_feature: MA Experiment 20001450 PARAMETER Experiment Name: At_Far-red-induction_P Parameter: Light Value: Far-red vs. White
  misc_feature: MA Experiment 20001450 PARAMETER Experiment Name: At_Far-red-induction_P Parameter: Organism Value: A. thaliana
  misc_feature: MA Experiment 20001450 PARAMETER Experiment Name: At_Far-red-induction_P Parameter: Plant Line Value: Columbia
  misc_feature: MA Experiment 20001450 PARAMETER Experiment Name: At_Far-red-induction_P Parameter: Timepoint (hr) Value: 8
  misc_feature: MA Experiment 20001450 PARAMETER Experiment Name: At_Far-red-induction_P Parameter: Tissue Value: Whole Plant
  misc_feature: MA Experiment ID: 20001556 Result: Down-regulated in Transcription
  misc_feature: MA Experiment 20001556 PARAMETER Experiment Name: At_Drought_Soil_Dry_P Parameter: Age (day) Value: 26
  misc_feature: MA Experiment 20001556 PARAMETER Experiment Name: At_Drought_Soil_Dry_P Parameter: Organism Value: A. thaliana
  misc_feature: MA Experiment 20001556 PARAMETER Experiment Name: At_Drought_Soil_Dry_P Parameter: Plant Line Value: WS
  misc_feature: MA Experiment 20001556 PARAMETER Experiment Name: At_Drought_Soil_Dry_P Parameter: Post Timepoint (hr) Value: None
  misc_feature: MA Experiment 20001556 PARAMETER Experiment Name: At_Drought_Soil_Dry_P Parameter: Post-Treatment Value: None
  misc_feature: MA Experiment 20001556 PARAMETER Experiment Name: At_Drought_Soil_Dry_P Parameter: Timepoint (day) Value: 12
  misc_feature: MA Experiment 20001556 PARAMETER Experiment Name: At_Drought_Soil_Dry_P Parameter: Treatment Value: Drought vs. No Drought
  misc_feature: MA Experiment ID: 20001557 Result: Up-regulated in Transcription
  misc_feature: MA Experiment 20001557 PARAMETER Experiment Name: At_Drought_Soil_Dry_P Parameter: Age (day) Value: 27
  misc_feature: MA Experiment 20001557 PARAMETER Experiment Name: At_Drought_Soil_Dry_P Parameter: Organism Value: A. thaliana
  misc_feature: MA Experiment 20001557 PARAMETER Experiment Name: At_Drought_Soil_Dry_P Parameter: Plant Line Value: WS
  misc_feature: MA Experiment 20001557 PARAMETER Experiment Name: At_Drought_Soil_Dry_P Parameter: Post Timepoint (hr) Value: 3
  misc_feature: MA Experiment 20001557 PARAMETER Experiment Name: At_Drought_Soil_Dry_P Parameter: Post-Treatment Value: Re-Water vs. No Drought
  misc_feature: MA Experiment 20001557 PARAMETER Experiment Name: At_Drought_Soil_Dry_P Parameter: Timepoint (day) Value: 13
  misc_feature: MA Experiment 20001557 PARAMETER Experiment Name: At_Drought_Soil_Dry_P Parameter: Treatment Value: Drought vs. No Drought
  misc_feature: MA Experiment ID: 20001755 Result: Down-regulated in Transcription
  misc_feature: MA Experiment 20001755 PARAMETER Experiment Name: At_50mM_NH4NO3_L-to-H_P Parameter: Timepoint (hr) Value: 2
  misc_feature: MA Experiment 20001755 PARAMETER Experiment Name: At_50mM_NH4NO3_L-to-H_P Parameter: Tissue Value: Leaf
  misc_feature: MA Experiment 20001755 PARAMETER Experiment Name: At_50mM_NH4NO3_L-to-H_P Parameter: Treatment Value: 50mM NH4NO3 vs 100mM Mannitol
  misc_feature: MA Experiment ID: 20001904 Result: Down-regulated in Transcription
  misc_feature: MA Experiment 20001904 PARAMETER Experiment Name: At_Drought_Reproduction_P Parameter: Age (day) Value: 37
  misc_feature: MA Experiment 20001904 PARAMETER Experiment Name: At_Drought_Reproduction_P Parameter: Organism Value: A. thaliana
  misc_feature: MA Experiment 20001904 PARAMETER Experiment Name: At_Drought_Reproduction_P Parameter: Plant Line Value: WS
  misc_feature: MA Experiment 20001904 PARAMETER Experiment Name: At_Drought_Reproduction_P Parameter: Timepoint (day) Value: 7
  misc_feature: MA Experiment 20001904 PARAMETER Experiment Name: At_Drought_Reproduction_P Parameter: Tissue Value: Rosettes
  misc_feature: MA Experiment 20001904 PARAMETER Experiment Name: At_Drought_Reproduction_P Parameter: Treatment Value: Drought vs. No Drought
accatctacaactttcattcttccactacatttctctccttgagtatcttcttatcctattttccaaattccaaaacaattcacaaaatggctacatgctggcctgagccgattgtttccgtgcaatccttgtcccaaaccggtgtaccaactgtaccaaaccgctatgtgaagccggctcatcagagaccggtctttaacaccacccaatccgatgctgggatagaaatccctgttctagacatgaacgacgtttgggggaaaccagaggggctaaggctcgtgaggagcgcgtgtgaggagtggggtttcttccaaatggtgaaccatggtgtgacccactcgttgatggagagagtgagaggagcgtggcgagagttcttcgagctaccgctagaggagaaacggaagtatgcaaactcaccggacacgtacgagggatatggaagccgccttggggttgtgaaagatgctaaattagattggagtgattatttcttcctcaattacttgccttcttccataagaaacccttccaagtggccatctcagcctcctaagatcagagaattgatcgaaaagtacggagaagaagtgagaaaactgtgcgaaaggctaacagagacgttgtcagagagtttaggtttaaaaccaaacaagctcatgcaggctttaggaggaggcgacaaagtcggagcttctctgaggacaaacttctacccaaaatgccctcagccgcagctcactttaggtctctcttctcattctgaccctggaggcatcaccattcttctcccggacgagaaggtcgctggccttcaggtccgtcgtggtgatggctgggtcaccattaaatcagtccctaatgctttgatcgttaacattggagatcaacttcagatacttagcaatggaatttacaaaagcgtggaacatcaagtgatcgttaattccggtatggaacgagtctctttggcattcttctataacccgagaagtgatatcccggttggaccaatcgaagaactagtaactgcaaaccgacctgctctttataaaccaatcaggttcgacgagtaccgttctctgataaggcaaaagggtccttgtggaaaaaaccaagtcgactcactgttattaactagataataattgataaacattccaagtattatctgttattcctatgtccttgatatagtcgttactaaataatatgtaaaccgtatcttcactttttcttattatattgctgctctctcttgaggtttg

SEQ ID NO: 36857 - protein, 382 aa, Arabidopsis thaliana
  peptide (1)..(382): Ceres Seq. ID no. 13491033
  misc_feature (231)..(331): Pfam Name: 2OG-Fe(II) oxygenase superfamily Pfam Description: 2OG-Fe(II) oxygenase superfamily
  misc_feature (29)..(378): Homolog of NCBI NO: 15219988 NR Description: oxidoreductase, 2OG-Fe(II) oxygenase family
  misc_feature (41)..(360): Homolog of NCBI NO: 34907194 NR Description: putative ethylene-forming enzyme
  misc_feature (34)..(378): Homolog of NCBI NO: 15228785 NR Description: oxidoreductase, 2OG-Fe(II) oxygenase family
  misc_feature (297)..(378): Homolog of NCBI NO: 34907994 NR Description: leucoanthocyanidin dioxygenase-like protein
  misc_feature (30)..(302): Homolog of NCBI NO: 34907994 NR Description: leucoanthocyanidin dioxygenase-like protein
  misc_feature (34)..(382): Homolog of NCBI NO: 15229694 NR Description: oxidoreductase, 2OG-Fe(II) oxygenase family
  misc_feature (34)..(382): Homolog of NCBI NO: 21537324 NR Description: leucoanthocyanidin dioxygenase-like protein
  misc_feature (34)..(382): Homolog of NCBI NO: 15239179 NR Description: oxidoreductase, 2OG-Fe(II) oxygenase family
  misc_feature (30)..(382): Homolog of NCBI NO: 21554535 NR Description: putative anthocyanidin synthase [Arabidopsis
  misc_feature (30)..(382): Homolog of NCBI NO: 15224472 NR Description: oxidoreductase, 2OG-Fe(II) oxygenase family
TIYNFHSSTTFLSLSIFLSYFPNSKTIHKMATCWPEPIVSVQSLSQTGVPTVPNRYVKPAHQRPVFNTTQSDAGIEIPVLDMNDVWGKPEGLRLVRSACEEWGFFQMVNHGVTHSLMERVRGAWREFFELPLEEKRKYANSPDTYEGYGSRLGVVKDAKLDWSDYFFLNYLPSSIRNPSKWPSQPPKIRELIEKYGEEVRKLCERLTETLSESLGLKPNKLMQALGGGDKVGASLRTNFYPKCPQPQLTLGLSSHSDPGGITILLPDEKVAGLQVRRGDGWVTIKSVPNALIVNIGDQLQILSNGIYKSVEHQVIVNSGMERVSLAFFYNPRSDIPVGPIEELVTANRPALYKPIRFDEYRSLIRQKGPCGKNQVDSLLLTR

SEQ ID NO: 36858 - protein, 353 aa, Arabidopsis thaliana
  peptide (1)..(353): Ceres Seq. ID no. 13491034
  misc_feature (202)..(302): Pfam Name: 2OG-Fe(II) oxygenase superfamily Pfam Description: 2OG-Fe(II) oxygenase superfamily
  misc_feature (1)..(349): Homolog of NCBI NO: 15219988 NR Description: oxidoreductase, 2OG-Fe(II) oxygenase family
  misc_feature (12)..(331): Homolog of NCBI NO: 34907194 NR Description: putative ethylene-forming enzyme
  misc_feature (5)..(349): Homolog of NCBI NO: 15228785 NR Description: oxidoreductase, 2OG-Fe(II) oxygenase family
  misc_feature (268)..(349): Homolog of NCBI NO: 34907994 NR Description: leucoanthocyanidin dioxygenase-like protein
  misc_feature (1)..(273): Homolog of NCBI NO: 34907994 NR Description: leucoanthocyanidin dioxygenase-like protein
  misc_feature (5)..(353): Homolog of NCBI NO: 15229694 NR Description: oxidoreductase, 2OG-Fe(II) oxygenase family
  misc_feature (5)..(353): Homolog of NCBI NO: 21537324 NR Description: leucoanthocyanidin dioxygenase-like protein
  misc_feature (5)..(353): Homolog of NCBI NO: 15239179 NR Description: oxidoreductase, 2OG-Fe(II) oxygenase family
  misc_feature (1)..(353): Homolog of NCBI NO: 21554535 NR Description: putative anthocyanidin synthase [Arabidopsis
  misc_feature (1)..(353): Homolog of NCBI NO: 15224472 NR Description: oxidoreductase, 2OG-Fe(II) oxygenase family
MATCWPEPIVSVQSLSQTGVPTVPNRYVKPAHQRPVFNTTQSDAGIEIPVLDMNDVWGKPEGLRLVRSACEEWGFFQMVNHGVTHSLMERVRGAWREFFELPLEEKRKYANSPDTYEGYGSRLGVVKDAKLDWSDYFFLNYLPSSIRNPSKWPSQPPKIRELIEKYGEEVRKLCERLTETLSESLGLKPNKLMQALGGGDKVGASLRTNFYPKCPQPQLTLGLSSHSDPGGITILLPDEKVAGLQVRRGDGWVTIKSVPNALIVNIGDQLQILSNGIYKSVEHQVIVNSGMERVSLAFFYNPRSDIPVGPIEELVTANRPALYKPIRFDEYRSLIRQKGPCGKNQVDSLLLTR

SEQ ID NO: 36859 - protein, 301 aa, Arabidopsis thaliana
  peptide (1)..(301): Ceres Seq. ID no. 13491035
  misc_feature (150)..(250): Pfam Name: 2OG-Fe(II) oxygenase superfamily Pfam Description: 2OG-Fe(II) oxygenase superfamily
  misc_feature (1)..(297): Homolog of NCBI NO: 15219988 NR Description: oxidoreductase, 2OG-Fe(II) oxygenase family
  misc_feature (1)..(279): Homolog of NCBI NO: 34907194 NR Description: putative ethylene-forming enzyme
  misc_feature (1)..(297): Homolog of NCBI NO: 15228785 NR Description: oxidoreductase, 2OG-Fe(II) oxygenase family
  misc_feature (216)..(297): Homolog of NCBI NO: 34907994 NR Description: leucoanthocyanidin dioxygenase-like protein
  misc_feature (1)..(221): Homolog of NCBI NO: 34907994 NR Description: leucoanthocyanidin dioxygenase-like protein
  misc_feature (1)..(301): Homolog of NCBI NO: 15229694 NR Description: oxidoreductase, 2OG-Fe(II) oxygenase family
  misc_feature (1)..(301): Homolog of NCBI NO: 21537324 NR Description: leucoanthocyanidin dioxygenase-like protein
  misc_feature (1)..(301): Homolog of NCBI NO: 15239179 NR Description: oxidoreductase, 2OG-Fe(II) oxygenase family
  misc_feature (1)..(301): Homolog of NCBI NO: 21554535 NR Description: putative anthocyanidin synthase [Arabidopsis
  misc_feature (1)..(301): Homolog of NCBI NO: 15224472 NR Description: oxidoreductase, 2OG-Fe(II) oxygenase family
MNDVWGKPEGLRLVRSACEEWGFFQMVNHGVTHSLMERVRGAWREFFELPLEEKRKYANSPDTYEGYGSRLGVVKDAKLDWSDYFFLNYLPSSIRNPSKWPSQPPKIRELIEKYGEEVRKLCERLTETLSESLGLKPNKLMQALGGGDKVGASLRTNFYPKCPQPQLTLGLSSHSDPGGITILLPDEKVAGLQVRRGDGWVTIKSVPNALIVNIGDQLQILSNGIYKSVEHQVIVNSGMERVSLAFFYNPRSDIPVGPIEELVTANRPALYKPIRFDEYRSLIRQKGPCGKNQVDSLLLTR

SEQ ID NO: 36860 - DNA, 1333 bp, Arabidopsis thaliana
  misc_feature (1)..(1333): Ceres Seq. ID no. 13493836
  misc_feature: MA Experiment ID: 108488 Result: Down-regulated in Transcription
  misc_feature: MA Experiment ID: 20000069 Result: Up-regulated in Transcription
  misc_feature: MA Experiment 20000069 PARAMETER Experiment Name: At_100uM_ABA_Mutants_cDNA_P Parameter: Plant Line Value: CS23
  misc_feature: MA Experiment 20000069 PARAMETER Experiment Name: At_100uM_ABA_Mutants_cDNA_P Parameter: Timepoint (hr) Value: 6
  misc_feature: MA Experiment 20000069 PARAMETER Experiment Name: At_100uM_ABA_Mutants_cDNA_P Parameter: Tissue Value: Aerial
  misc_feature: MA Experiment 20000069 PARAMETER Experiment Name: At_100uM_ABA_Mutants_cDNA_P Parameter: Treatment Value: 100uM ABA vs. No Treatment
  misc_feature: MA Experiment ID: 20000087 Result: Up-regulated in Transcription
  misc_feature: MA Experiment 20000087 PARAMETER Experiment Name: At_100uM_ABA_Mutants_cDNA_P Parameter: Plant Line Value: WS
  misc_feature: MA Experiment 20000087 PARAMETER Experiment Name: At_100uM_ABA_Mutants_cDNA_P Parameter: Timepoint (hr) Value: 6
  misc_feature: MA Experiment 20000087 PARAMETER Experiment Name: At_100uM_ABA_Mutants_cDNA_P Parameter: Tissue Value: Aerial
  misc_feature: MA Experiment 20000087 PARAMETER Experiment Name: At_100uM_ABA_Mutants_cDNA_P Parameter: Treatment Value: 100uM ABA vs. No Treatment
  misc_feature: MA Experiment ID: 20000111 Result: Down-regulated in Transcription
  misc_feature: MA Experiment 20000111 PARAMETER Experiment Name: At_42deg_Heat_cDNA_P Parameter: Temperature (deg C) Value: 42 vs. 22
  misc_feature: MA Experiment 20000111 PARAMETER Experiment Name: At_42deg_Heat_cDNA_P Parameter: Timepoint (hr) Value: 6
  misc_feature: MA Experiment 20000111 PARAMETER Experiment Name: At_42deg_Heat_cDNA_P Parameter: Tissue Value: Aerial
  misc_feature: MA Experiment ID: 20000224 Result: Up-regulated in Transcription
  misc_feature: MA Experiment ID: 20000437 Result: Up-regulated in Transcription
  misc_feature: MA Experiment 20000437 PARAMETER Experiment Name: At_Drought_P Parameter: Age (day) Value: 8
  misc_feature: MA Experiment 20000437 PARAMETER Experiment Name: At_Drought_P Parameter: Organism Value: A. thaliana
  misc_feature: MA Experiment 20000437 PARAMETER Experiment Name: At_Drought_P Parameter: Plant Line Value: WS
  misc_feature: MA Experiment 20000437 PARAMETER Experiment Name: At_Drought_P Parameter: Timepoint (hr) Value: 24
  misc_feature: MA Experiment 20000437 PARAMETER Experiment Name: At_Drought_P Parameter: Tissue Value: Whole Plant
  misc_feature: MA Experiment 20000437 PARAMETER Experiment Name: At_Drought_P Parameter: Treatment Value: Drought vs. No Drought
  misc_feature: MA Experiment ID: 20001557 Result: Down-regulated in Transcription
  misc_feature: MA Experiment 20001557 PARAMETER Experiment Name: At_Drought_Soil_Dry_P Parameter: Age (day) Value: 27
  misc_feature: MA Experiment 20001557 PARAMETER Experiment Name: At_Drought_Soil_Dry_P Parameter: Organism Value: A. thaliana
  misc_feature: MA Experiment 20001557 PARAMETER Experiment Name: At_Drought_Soil_Dry_P Parameter: Plant Line Value: WS
  misc_feature: MA Experiment 20001557 PARAMETER Experiment Name: At_Drought_Soil_Dry_P Parameter: Post Timepoint (hr) Value: 3
  misc_feature: MA Experiment 20001557 PARAMETER Experiment Name: At_Drought_Soil_Dry_P Parameter: Post-Treatment Value: Re-Water vs. No Drought
  misc_feature: MA Experiment 20001557 PARAMETER Experiment Name: At_Drought_Soil_Dry_P Parameter: Timepoint (day) Value: 13
  misc_feature: MA Experiment 20001557 PARAMETER Experiment Name: At_Drought_Soil_Dry_P Parameter: Treatment Value: Drought vs. No Drought
gatctgccaatcacaaattaacagaaaacacaactaaattgcgatttgaatttattaaatcgtaaaactgagatcttctctgagatttttctcctcctaaagtttgaaactttgaacataaaaattgtattttttttttttttttgaagtttccagcaaaaaaaaaattgaaactttcagtgattggaattttaatttgtgttttagtttggtgggtttctttatcgggatcgttgtcgtggatttttgtttgtagcagcttgaaagacgatgtcgtcgtcgccggacattgccggaatcttagataatacgaaggagcttgatcggttaagaaaagaacaagaggaagttcttgtggagattaataagatgcataagaagcttcaagctacgccggagatagttgagaagcctggtgatatttcattgtcaaagcttaaaaatttgtacattcaagcaaaagagctttcagaaagtgaagtaaccgtttcaaatattctgcttactcagttggattctctgcttccatctggaccaactgggcaacaacgcagaaaattagtggcagaaggcaacgaacagaagagaaagagaatgaaagtagatacagatgtaacaagagtttctccttccatgagaaatcaaatcgaggcatatgctagtctaaagggtgaacaggttgctgcaagagtcacagctgaagatgccgagaaggatgaatggtttgtggtgaaagttattcacttcgacagagaaacaaaagaagttgaagtacttgatgaagaaccaggagatgatgaagaaggaggtggccagaggacgtataaactatcaatgtcatgtattttaccgtttccaaaacggaatgatccttcaagcacacaagagtttataccagggaaacacgtcttagctgtatatccaggaaccacagccctctacaaggcaactgttataagtaccccacgaaagaggaaatctgacgagtacttgctagaatttgatgatgatgaagaagacggagcattacctcaaagaacagtgccattccacaaagtggtagctttaccagaaggccatcgccagtaattttagatggatacaatgaaataagagacgatttctttgggccagagtgtaagttaagagttgttgcctttgtttgtgatgatgactttgaagaataaaaaggtatgttttaactttttattatttcaatttgtggcaaaactactctagcaacatttgtaacatttaaatgtgtatatatgaatggaaccatgggtatgtatatcatattgagacacaatttaaaaaaaaattacatttttct

SEQ ID NO: 36861 - protein, 272 aa, Arabidopsis thaliana
  peptide (1)..(272): Ceres Seq. ID no. 13493837
  misc_feature (129)..(268): Homolog of NCBI NO: 16552568 NR Description: unnamed protein product [Homo sapiens]
  misc_feature (129)..(268): Homolog of NCBI NO: 19923935 NR Description: hypothetical protein BC011981 [Homo sapiens]
  misc_feature (129)..(268): Homolog of NCBI NO: 34859208 NR Description: similar to hypothetical protein BC011981 [Rattus
  misc_feature (134)..(269): Homolog of NCBI NO: 28828907 NR Description: similar to Plasmodium falciparum. Hypothetical
  misc_feature (240)..(272): Homolog of NCBI NO: 9758081 NR Description: dbj|BAA95721.1~gene_id:MNF13.7~strong similarity
  misc_feature (3)..(234): Homolog of NCBI NO: 9758081 NR Description: dbj|BAA95721.1~gene_id:MNF13.7~strong similarity
  misc_feature (3)..(272): Homolog of NCBI NO: 30693623 NR Description: expressed protein [Arabidopsis thaliana]
  misc_feature (1)..(272): Homolog of NCBI NO: 7939518 NR Description: gene_id:K1G2.17~unknown protein [Arabidopsis
  misc_feature (1)..(272): Homolog of NCBI NO: 22331369 NR Description: expressed protein [Arabidopsis thaliana]
MSSSPDIAGILDNTKELDRLRKEQEEVLVEINKMHKKLQATPEIVEKPGDISLSKLKNLYIQAKELSESEVTVSNILLTQLDSLLPSGPTGQQRRKLVAEGNEQKRKRMKVDTDVTRVSPSMRNQIEAYASLKGEQVAARVTAEDAEKDEWFVVKVIHFDRETKEVEVLDEEPGDDEEGGGQRTYKLSMSCILPFPKRNDPSSTQEFIPGKHVLAVYPGTTALYKATVISTPRKRKSDEYLLEFDDDEEDGALPQRTVPFHKVVALPEGHRQ

SEQ ID NO: 36862 - protein, 239 aa, Arabidopsis thaliana
  peptide (1)..(239): Ceres Seq. ID no. 13493838
  misc_feature (96)..(235): Homolog of NCBI NO: 16552568 NR Description: unnamed protein product [Homo sapiens]
  misc_feature (96)..(235): Homolog of NCBI NO: 19923935 NR Description: hypothetical protein BC011981 [Homo sapiens]
  misc_feature (96)..(235): Homolog of NCBI NO: 34859208 NR Description: similar to hypothetical protein BC011981 [Rattus
  misc_feature (101)..(236): Homolog of NCBI NO: 28828907 NR Description: similar to Plasmodium falciparum. Hypothetical
  misc_feature (207)..(239): Homolog of NCBI NO: 9758081 NR Description: dbj|BAA95721.1~gene_id:MNF13.7~strong similarity
  misc_feature (1)..(201): Homolog of NCBI NO: 9758081 NR Description: dbj|BAA95721.1~gene_id:MNF13.7~strong similarity
  misc_feature (1)..(239): Homolog of NCBI NO: 30693623 NR Description: expressed protein [Arabidopsis thaliana]
  misc_feature (1)..(239): Homolog of NCBI NO: 7939518 NR Description: gene_id:K1G2.17~unknown protein [Arabidopsis
  misc_feature (1)..(239): Homolog of NCBI NO: 22331369 NR Description: expressed protein [Arabidopsis thaliana]
MHKKLQATPEIVEKPGDISLSKLKNLYIQAKELSESEVTVSNILLTQLDSLLPSGPTGQQRRKLVAEGNEQKRKRMKVDTDVTRVSPSMRNQIEAYASLKGEQVAARVTAEDAEKDEWFVVKVIHFDRETKEVEVLDEEPGDDEEGGGQRTYKLSMSCILPFPKRNDPSSTQEFIPGKHVLAVYPGTTALYKATVISTPRKRKSDEYLLEFDDDEEDGALPQRTVPFHKVVALPEGHRQ

SEQ ID NO: 36863 - protein, 164 aa, Arabidopsis thaliana
  peptide (1)..(164): Ceres Seq. ID no. 13493839
  misc_feature (21)..(160): Homolog of NCBI NO: 16552568 NR Description: unnamed protein product [Homo sapiens]
  misc_feature (21)..(160): Homolog of NCBI NO: 19923935 NR Description: hypothetical protein BC011981 [Homo sapiens]
  misc_feature (21)..(160): Homolog of NCBI NO: 34859208 NR Description: similar to hypothetical protein BC011981 [Rattus
  misc_feature (26)..(161): Homolog of NCBI NO: 28828907 NR Description: similar to Plasmodium falciparum. Hypothetical
  misc_feature (132)..(164): Homolog of NCBI NO: 9758081 NR Description: dbj|BAA95721.1~gene_id:MNF13.7~strong similarity
  misc_feature (1)..(126): Homolog of NCBI NO: 9758081 NR Description: dbj|BAA95721.1~gene_id:MNF13.7~strong similarity
  misc_feature (1)..(164): Homolog of NCBI NO: 30693623 NR Description: expressed protein [Arabidopsis thaliana]
  misc_feature (1)..(164): Homolog of NCBI NO: 7939518 NR Description: gene_id:K1G2.17~unknown protein [Arabidopsis
  misc_feature (1)..(164): Homolog of NCBI NO: 22331369 NR Description: expressed protein [Arabidopsis thaliana]
MKVDTDVTRVSPSMRNQIEAYASLKGEQVAARVTAEDAEKDEWFVVKVIHFDRETKEVEVLDEEPGDDEEGGGQRTYKLSMSCILPFPKRNDPSSTQEFIPGKHVLAVYPGTTALYKATVISTPRKRKSDEYLLEFDDDEEDGALPQRTVPFHKVVALPEGHRQ

SEQ ID NO: 36864 - DNA, 1457 bp, Arabidopsis thaliana
  misc_feature (1)..(1457): Ceres Seq. ID no. 12394548
  misc_feature: MA Experiment ID: 108434 Result: Down-regulated in Transcription
  misc_feature: MA Experiment 108434 PARAMETER Experiment Name: At_Root_Tips_cDNA_P Parameter: Tissue Value: Root Tips
  misc_feature: MA Experiment ID: 108462 Result: Up-regulated in Transcription
  misc_feature: MA Experiment 108462 PARAMETER Experiment Name: At_Germinating_Seeds_cDNA_P Parameter: Age (day) Value: 2 vs. 0
  misc_feature: MA Experiment 108462 PARAMETER Experiment Name: At_Germinating_Seeds_cDNA_P Parameter: Tissue Value: Germinating Seeds
  misc_feature: MA Experiment ID: 108463 Result: Up-regulated in Transcription
  misc_feature: MA Experiment 108463 PARAMETER Experiment Name: At_Germinating_Seeds_cDNA_P Parameter: Age (day) Value: 3 vs. 0
  misc_feature: MA Experiment 108463 PARAMETER Experiment Name: At_Germinating_Seeds_cDNA_P Parameter: Tissue Value: Germinating Seeds
  misc_feature: MA Experiment ID: 20000179 Result: Up-regulated in Transcription
  misc_feature: MA Experiment 20000179 PARAMETER Experiment Name: At_Germinating_Seeds_P Parameter: Age (hr) Value: 6 vs. 0
  misc_feature: MA Experiment 20000179 PARAMETER Experiment Name: At_Germinating_Seeds_P Parameter: Tissue Value: Germinating Seeds
  misc_feature: MA Experiment ID: 20000180 Result: Up-regulated in Transcription
  misc_feature: MA Experiment 20000180 PARAMETER Experiment Name: At_Germinating_Seeds_P Parameter: Age (hr) Value: 24 vs. 0
  misc_feature: MA Experiment 20000180 PARAMETER Experiment Name: At_Germinating_Seeds_P Parameter: Tissue Value: Germinating Seeds
  misc_feature: MA Experiment ID: 20000184 Result: Down-regulated in Transcription
  misc_feature: MA Experiment 20000184 PARAMETER Experiment Name: At_Shoots__P Parameter: Age (day) Value: 7
  misc_feature: MA Experiment 20000184 PARAMETER Experiment Name: At_Shoots__P Parameter: Tissue Value: Shoots vs. Whole Plant
  misc_feature: MA Experiment ID: 20000794 Result: Down-regulated in Transcription
  misc_feature: MA Experiment 20000794 PARAMETER Experiment Name: At_Petals_P Parameter: Age (day) Value: 23-25 days
  misc_feature: MA Experiment 20000794 PARAMETER Experiment Name: At_Petals_P Parameter: Plant Line Value: WS
  misc_feature: MA Experiment 20000794 PARAMETER Experiment Name: At_Petals_P Parameter: Tissue Value: Petals vs. Whole plant
  misc_feature: MA Experiment ID: 20001450 Result: Down-regulated in Transcription
  misc_feature: MA Experiment 20001450 PARAMETER Experiment Name: At_Far-red-induction_P Parameter: Age (day) Value: 7
  misc_feature: MA Experiment 20001450 PARAMETER Experiment Name: At_Far-red-induction_P Parameter: Light Value: Far-red vs. White
  misc_feature: MA Experiment 20001450 PARAMETER Experiment Name: At_Far-red-induction_P Parameter: Organism Value: A. thaliana
  misc_feature: MA Experiment 20001450 PARAMETER Experiment Name: At_Far-red-induction_P Parameter: Plant Line Value: Columbia
  misc_feature: MA Experiment 20001450 PARAMETER Experiment Name: At_Far-red-induction_P Parameter: Timepoint (hr) Value: 8
  misc_feature: MA Experiment 20001450 PARAMETER Experiment Name: At_Far-red-induction_P Parameter: Tissue Value: Whole Plant
  misc_feature: MA Experiment ID: 20001911 Result: Down-regulated in Transcription
  misc_feature: MA Experiment 20001911 PARAMETER Experiment Name: At_Drought_Reproduction_P Parameter: Age (day) Value: 40
  misc_feature: MA Experiment 20001911 PARAMETER Experiment Name: At_Drought_Reproduction_P Parameter: Organism Value: A. thaliana
  misc_feature: MA Experiment 20001911 PARAMETER Experiment Name: At_Drought_Reproduction_P Parameter: Plant Line Value: WS
  misc_feature: MA Experiment 20001911 PARAMETER Experiment Name: At_Drought_Reproduction_P Parameter: Timepoint (day) Value: 10
  misc_feature: MA Experiment 20001911 PARAMETER Experiment Name: At_Drought_Reproduction_P Parameter: Tissue Value: Flowers
  misc_feature: MA Experiment 20001911 PARAMETER Experiment Name: At_Drought_Reproduction_P Parameter: Treatment Value: Drought vs. No Drought
acttaagctcaatggtggttggtggtgattcggtgttaggtgaagaacctctgtttcttcctcttcttcttcagggtcggtgttaggtgatgaagctccgttttttcgttttcgtcttcttcttcttcaaggtctcttcgttttgtgcttgaaattagggtttttgattgagaaattctgtagcggcggtggcatggcgtgctggtgagccattggttatggaggaagttgaagtgagtccacctcaaccacttgagatcagaattaaagttgtatgtacatctctctgtcgtagtgatctctctgcttgggaatctcagtctcttttgcctcgaatatttggccatgaagctgcaggtatagtggagagcattggagaaggtgtaactgagtttgaaaaaggagatcatgtgcttgctgtattcactggagaatgtgggtcatgtcggcattgcatatctgggaaaagtaacatgtgtcaggttcttggaatggagaggaaaggtttgatgcatagtgatcagaagacacgcttctccatcaaaggcaaacctgtttaccattactgcgcggtttcaagtttcagcgagtacactgtggttcactctggctgtgctgtcaaagtcgatccactggcacctctgcataaaatttgtcttctaagctgtggagtagctgcaggtcttggtgcagcatggaatgttgctgatgtacaaaaaggttcaagtgttgtgatatttggtcttggaactgtcggtctttctgttgctcaaggtgccaaacttagaggagcagctcaaatacttggggttgatataaatcccgctaaggctgaacaagcaaagacatttggtgtcacggatttcatcaattcaaatgacctctctgaacctataccccaggtgatcaaaagaatgacaggaggaggtgcagatttctcatttgaatgtgttggtgatacaggaatagctacaactgctttacaatcgtgctcggatggatggggaatgacggttactctaggtgtaccgaaagctaagcctgaagtttcagctcattacggacttttcctttctgggaaatctttaaaagggactctttttggtggttggaagcctaaatctgatcttccttcactcattgacaagtacatgaacaaggagattatgatcgatgaatttattacgcataacctgtcatttgatgaaatcaacaaagcttttgttcttatgagagaaggaaaatgtttgcgttgtgttcttcacatgccaaagtaatgtctcggaaaacacatgtcacagattcaagaaagattaacgagagctctgtatattctacagctgagttgttgtataaaacaaaagtgatggttttctatagagttatgagacttttttttttcttttggtttgttgtgaagtgatcgttcatacattataaagatggattctcacatg

SEQ ID NO: 36865 - protein, 352 aa, Arabidopsis thaliana
  peptide (1)..(352): Ceres Seq. ID no. 12394549
  misc_feature (1)..(350): Homolog of NCBI NO: 113365 NR Description: Alcohol dehydrogenase 1
  misc_feature (1)..(350): Homolog of NCBI NO: 7427629 NR Description: alcohol dehydrogenase (EC 1.1.1.1) - potato
  misc_feature (1)..(350): Homolog of NCBI NO: 1840425 NR Description: alcohol dehydrogenase
  misc_feature (1)..(350): Homolog of NCBI NO: 9885274 NR Description: alcohol dehydrogenase 2 [Vitis vinifera]
  misc_feature (1)..(350): Homolog of NCBI NO: 113386 NR Description: ALCOHOL DEHYDROGENASE 3
  misc_feature (1)..(350): Homolog of NCBI NO: 113379 NR Description: ALCOHOL DEHYDROGENASE 2
  misc_feature (1)..(350): Homolog of NCBI NO: 7264740 NR Description: alcohol dehydrogenase 6 [Vitis vinifera]
  misc_feature (1)..(352): Homolog of NCBI NO: 10129655 NR Description: alcohol dehydrogenase-like protein [Arabidopsis
  misc_feature (1)..(352): Homolog of NCBI NO: 21553654 NR Description: alcohol dehydrogenase-like protein [Arabidopsis
  misc_feature (1)..(352): Homolog of NCBI NO: 18420834 NR Description: alcohol dehydrogenase - like protein
MEEVEVSPPQPLEIRIKVVCTSLCRSDLSAWESQSLLPRIFGHEAAGIVESIGEGVTEFEKGDHVLAVFTGECGSCRHCISGKSNMCQVLGMERKGLMHSDQKTRFSIKGKPVYHYCAVSSFSEYTVVHSGCAVKVDPLAPLHKICLLSCGVAAGLGAAWNVADVQKGSSVVIFGLGTVGLSVAQGAKLRGAAQILGVDINPAKAEQAKTFGVTDFINSNDLSEPIPQVIKRMTGGGADFSFECVGDTGIATTALQSCSDGWGMTVTLGVPKAKPEVSAHYGLFLSGKSLKGTLFGGWKPKSDLPSLIDKYMNKEIMIDEFITHNLSFDEINKAFVLMREGKCLRCVLHMPK

SEQ ID NO: 36866 - protein, 267 aa, Arabidopsis thaliana
  peptide (1)..(267): Ceres Seq. ID no. 12394550
  misc_feature (1)..(265): Homolog of NCBI NO: 113365 NR Description: Alcohol dehydrogenase 1
  misc_feature (1)..(265): Homolog of NCBI NO: 7427629 NR Description: alcohol dehydrogenase (EC 1.1.1.1) - potato
  misc_feature (1)..(265): Homolog of NCBI NO: 1840425 NR Description: alcohol dehydrogenase
  misc_feature (1)..(265): Homolog of NCBI NO: 9885274 NR Description: alcohol dehydrogenase 2 [Vitis vinifera]
  misc_feature (1)..(265): Homolog of NCBI NO: 113386 NR Description: ALCOHOL DEHYDROGENASE 3
  misc_feature (1)..(265): Homolog of NCBI NO: 113379 NR Description: ALCOHOL DEHYDROGENASE 2
  misc_feature (1)..(265): Homolog of NCBI NO: 7264740 NR Description: alcohol dehydrogenase 6 [Vitis vinifera]
  misc_feature (1)..(267): Homolog of NCBI NO: 10129655 NR Description: alcohol dehydrogenase-like protein [Arabidopsis
  misc_feature (1)..(267): Homolog of NCBI NO: 21553654 NR Description: alcohol dehydrogenase-like protein [Arabidopsis
  misc_feature (1)..(267): Homolog of NCBI NO: 18420834 NR Description: alcohol dehydrogenase - like protein
MCQVLGMERKGLMHSDQKTRFSIKGKPVYHYCAVSSFSEYTVVHSGCAVKVDPLAPLHKICLLSCGVAAGLGAAWNVADVQKGSSVVIFGLGTVGLSVAQGAKLRGAAQILGVDINPAKAEQAKTFGVTDFINSNDLSEPIPQVIKRMTGGGADFSFECVGDTGIATTALQSCSDGWGMTVTLGVPKAKPEVSAHYGLFLSGKSLKGTLFGGWKPKSDLPSLIDKYMNKEIMIDEFITHNLSFDEINKAFVLMREGKCLRCVLHMPK

SEQ ID NO: 36867 - protein, 261 aa, Arabidopsis thaliana
  peptide (1)..(261): Ceres Seq. ID no. 12394551
  misc_feature (1)..(259): Homolog of NCBI NO: 113365 NR Description: Alcohol dehydrogenase 1
  misc_feature (1)..(259): Homolog of NCBI NO: 7427629 NR Description: alcohol dehydrogenase (EC 1.1.1.1) - potato
  misc_feature (1)..(259): Homolog of NCBI NO: 1840425 NR Description: alcohol dehydrogenase
  misc_feature (1)..(259): Homolog of NCBI NO: 9885274 NR Description: alcohol dehydrogenase 2 [Vitis vinifera]
  misc_feature (1)..(259): Homolog of NCBI NO: 113386 NR Description: ALCOHOL DEHYDROGENASE 3
  misc_feature (1)..(259): Homolog of NCBI NO: 113379 NR Description: ALCOHOL DEHYDROGENASE 2
  misc_feature (1)..(259): Homolog of NCBI NO: 7264740 NR Description: alcohol dehydrogenase 6 [Vitis vinifera]
  misc_feature (1)..(261): Homolog of NCBI NO: 10129655 NR Description: alcohol dehydrogenase-like protein [Arabidopsis
  misc_feature (1)..(261): Homolog of NCBI NO: 21553654 NR Description: alcohol dehydrogenase-like protein [Arabidopsis
  misc_feature (1)..(261): Homolog of NCBI NO: 18420834 NR Description: alcohol dehydrogenase - like protein
MERKGLMHSDQKTRFSIKGKPVYHYCAVSSFSEYTVVHSGCAVKVDPLAPLHKICLLSCGVAAGLGAAWNVADVQKGSSVVIFGLGTVGLSVAQGAKLRGAAQILGVDINPAKAEQAKTFGVTDFINSNDLSEPIPQVIKRMTGGGADFSFECVGDTGIATTALQSCSDGWGMTVTLGVPKAKPEVSAHYGLFLSGKSLKGTLFGGWKPKSDLPSLIDKYMNKEIMIDEFITHNLSFDEINKAFVLMREGKCLRCVLHMPK

SEQ ID NO: 36868 - DNA, 1397 bp, Arabidopsis thaliana; identical to SEQ ID NO: 22801
  misc_feature (1)..(1397): Ceres Seq. ID no. 12562342
  misc_feature: MA Experiment ID: 20000087 Result: Down-regulated in Transcription
  misc_feature: MA Experiment 20000087 PARAMETER Experiment Name: At_100uM_ABA_Mutants_cDNA_P Parameter: Plant Line Value: WS
  misc_feature: MA Experiment 20000087 PARAMETER Experiment Name: At_100uM_ABA_Mutants_cDNA_P Parameter: Timepoint (hr) Value: 6
  misc_feature: MA Experiment 20000087 PARAMETER Experiment Name: At_100uM_ABA_Mutants_cDNA_P Parameter: Tissue Value: Aerial
  misc_feature: MA Experiment 20000087 PARAMETER Experiment Name: At_100uM_ABA_Mutants_cDNA_P Parameter: Treatment Value: 100uM ABA vs. No Treatment
  misc_feature: MA Experiment ID: 20000166 Result: Up-regulated in Transcription
  misc_feature: MA Experiment 20000166 PARAMETER Experiment Name: At_100uM_ABA_P Parameter: Age (day) Value: 14
  misc_feature: MA Experiment 20000166 PARAMETER Experiment Name: At_100uM_ABA_P Parameter: Organism Value: A. thaliana
  misc_feature: MA Experiment 20000166 PARAMETER Experiment Name: At_100uM_ABA_P Parameter: Plant Line Value: WS
  misc_feature: MA Experiment 20000166 PARAMETER Experiment Name: At_100uM_ABA_P Parameter: Timepoint (hr) Value: 1
  misc_feature: MA Experiment 20000166 PARAMETER Experiment Name: At_100uM_ABA_P Parameter: Tissue Value: Aerial
  misc_feature: MA Experiment 20000166 PARAMETER Experiment Name: At_100uM_ABA_P Parameter: Treatment Value: 100uM ABA vs. No Treatment
  misc_feature: MA Experiment ID: 20000171 Result: Down-regulated in Transcription
  misc_feature: MA Experiment 20000171 PARAMETER Experiment Name: At_42deg_Heat_P Parameter: Age (day) Value: 14
  misc_feature: MA Experiment 20000171 PARAMETER Experiment Name: At_42deg_Heat_P Parameter: Organism Value: A. thaliana
  misc_feature: MA Experiment 20000171 PARAMETER Experiment Name: At_42deg_Heat_P Parameter: Plant Line Value: WS
  misc_feature: MA Experiment 20000171 PARAMETER Experiment Name: At_42deg_Heat_P Parameter: Temperature (deg C) Value: 42 vs. 22
  misc_feature: MA Experiment 20000171 PARAMETER Experiment Name: At_42deg_Heat_P Parameter: Timepoint (hr) Value: 1
  misc_feature: MA Experiment 20000171 PARAMETER Experiment Name: At_42deg_Heat_P Parameter: Tissue Value: Aerial
  misc_feature: MA Experiment ID: 20000173 Result: Down-regulated in Transcription
  misc_feature: MA Experiment 20000173 PARAMETER Experiment Name: At_42deg_Heat_P Parameter: Age (day) Value: 14
  misc_feature: MA Experiment 20000173 PARAMETER Experiment Name: At_42deg_Heat_P Parameter: Organism Value: A. thaliana
  misc_feature: MA Experiment 20000173 PARAMETER Experiment Name: At_42deg_Heat_P Parameter: Plant Line Value: WS
  misc_feature: MA Experiment 20000173 PARAMETER Experiment Name: At_42deg_Heat_P Parameter: Temperature (deg C) Value: 42 vs. 22
  misc_feature: MA Experiment 20000173 PARAMETER Experiment Name: At_42deg_Heat_P Parameter: Timepoint (hr) Value: 6
  misc_feature: MA Experiment 20000173 PARAMETER Experiment Name: At_42deg_Heat_P Parameter: Tissue Value: Aerial
  misc_feature: MA Experiment ID: 20000179 Result: Up-regulated in Transcription
  misc_feature: MA Experiment 20000179 PARAMETER Experiment Name: At_Germinating_Seeds_P Parameter: Age (hr) Value: 6 vs. 0
  misc_feature: MA Experiment 20000179 PARAMETER Experiment Name: At_Germinating_Seeds_P Parameter: Tissue Value: Germinating Seeds
  misc_feature: MA Experiment ID: 20000180 Result: Up-regulated in Transcription
  misc_feature: MA Experiment 20000180 PARAMETER Experiment Name: At_Germinating_Seeds_P Parameter: Age (hr) Value: 24 vs. 0
  misc_feature: MA Experiment 20000180 PARAMETER Experiment Name: At_Germinating_Seeds_P Parameter: Tissue Value: Germinating Seeds
  misc_feature: MA Experiment ID: 20000184 Result: Up-regulated in Transcription
  misc_feature: MA Experiment 20000184 PARAMETER Experiment Name: At_Shoots__P Parameter: Age (day) Value: 7
  misc_feature: MA Experiment 20000184 PARAMETER Experiment Name: At_Shoots__P Parameter: Tissue Value: Shoots vs. Whole Plant
  misc_feature: MA Experiment ID: 20000185 Result: Down-regulated in Transcription
  misc_feature: MA Experiment 20000185 PARAMETER Experiment Name: At_Roots__P Parameter: Age (day) Value: 7 vs. 21
  misc_feature: MA Experiment 20000185 PARAMETER Experiment Name: At_Roots__P Parameter: Organism Value: A. thaliana
  misc_feature: MA Experiment 20000185 PARAMETER Experiment Name: At_Roots__P Parameter: Tissue Value: Roots vs. Whole Plant
  misc_feature: MA Experiment ID: 20000234 Result: Up-regulated in Transcription
  misc_feature: MA Experiment 20000234 PARAMETER Experiment Name: At_Siliques_P Parameter: Age (day) Value: 21
  misc_feature: MA Experiment 20000234 PARAMETER Experiment Name: At_Siliques_P Parameter: Organism Value: A. thaliana
  misc_feature: MA Experiment 20000234 PARAMETER Experiment Name: At_Siliques_P Parameter: Plant Line Value: WS
  misc_feature: MA Experiment 20000234 PARAMETER Experiment Name: At_Siliques_P Parameter: Tissue Value: Less Than 5mm Siliques vs. Whole Plant
  misc_feature: MA Experiment ID: 20000235 Result: Up-regulated in Transcription
  misc_feature: MA Experiment 20000235 PARAMETER Experiment Name: At_Siliques_P Parameter: Age (day) Value: 21
  misc_feature: MA Experiment 20000235 PARAMETER Experiment Name: At_Siliques_P Parameter: Organism Value: A. thaliana
  misc_feature: MA Experiment 20000235 PARAMETER Experiment Name: At_Siliques_P Parameter: Plant Line Value: WS
  misc_feature: MA Experiment 20000235 PARAMETER Experiment Name: At_Siliques_P Parameter: Tissue Value: 5-10mm Siliques vs. Whole Plant
  misc_feature: MA Experiment ID: 20000264 Result: Up-regulated in Transcription
  misc_feature: MA Experiment 20000264 PARAMETER Experiment Name: At_Open_Flower_P Parameter: Age (day) Value: 21
  misc_feature: MA Experiment 20000264 PARAMETER Experiment Name: At_Open_Flower_P Parameter: Plant Line Value: WS
  misc_feature: MA Experiment 20000264 PARAMETER Experiment Name: At_Open_Flower_P Parameter: Tissue Value: Open Flower vs. Whole Plant
  misc_feature: MA Experiment ID: 20000265 Result: Up-regulated in Transcription
  misc_feature: MA Experiment 20000265 PARAMETER Experiment Name: At_Open_Flower_P Parameter: Age (day) Value: 21
  misc_feature: MA Experiment 20000265 PARAMETER Experiment Name: At_Open_Flower_P Parameter: Plant Line Value: WS
  misc_feature: MA Experiment 20000265 PARAMETER Experiment Name: At_Open_Flower_P Parameter: Tissue Value: Closed Flower vs. Whole Plant
  misc_feature: MA Experiment ID: 20000286 Result: Up-regulated in Transcription
  misc_feature: MA Experiment 20000286 PARAMETER Experiment Name: At_Open_Flower_P Parameter: Age (day) Value: 21
  misc_feature: MA Experiment 20000286 PARAMETER Experiment Name: At_Open_Flower_P Parameter: Plant Line Value: WS
  misc_feature: MA Experiment 20000286 PARAMETER Experiment Name: At_Open_Flower_P Parameter: Tissue Value: Half Open vs. Whole Plant
  misc_feature: MA Experiment ID: 20000439 Result: Down-regulated in Transcription
  misc_feature: MA Experiment 20000439 PARAMETER Experiment Name: At_Roots__P Parameter: Age (day) Value: 14 vs. 21
  misc_feature: MA Experiment 20000439 PARAMETER Experiment Name: At_Roots__P Parameter: Organism Value: A. thaliana
  misc_feature: MA Experiment 20000439 PARAMETER Experiment Name: At_Roots__P Parameter: Tissue Value: Roots vs. Whole Plant
  misc_feature: MA Experiment ID: 20000443 Result: Down-regulated in Transcription
  misc_feature: MA Experiment 20000443 PARAMETER Experiment Name: At_1uM_BR-BRZ__P Parameter: Tissue Value: Shoot Apices
  misc_feature: MA Experiment 20000443 PARAMETER Experiment Name: At_1uM_BR-BRZ__P Parameter: Treatment Value: 1uM BRZ vs. No Treatment
  misc_feature: MA Experiment ID: 20000451 Result: Up-regulated in Transcription
  misc_feature: MA Experiment 20000451 PARAMETER Experiment Name: At_CS6879_Shoots-Roots_P Parameter: Age (day) Value: 14
  misc_feature: MA Experiment 20000451 PARAMETER Experiment Name: At_CS6879_Shoots-Roots_P Parameter: Organism Value: A. thaliana
  misc_feature: MA Experiment 20000451 PARAMETER Experiment Name: At_CS6879_Shoots-Roots_P Parameter: Plant Line Value: CS6879 vs. WS
  misc_feature: MA Experiment 20000451 PARAMETER Experiment Name: At_CS6879_Shoots-Roots_P Parameter: Tissue Value: Roots
  misc_feature: MA Experiment ID: 20000573 Result: Down-regulated in Transcription
  misc_feature: MA Experiment 20000573 PARAMETER Experiment Name: At_100uM_ABA_Mutants__P Parameter: Organism Value: A. thaliana
  misc_feature: MA Experiment 20000573 PARAMETER Experiment Name: At_100uM_ABA_Mutants__P Parameter: Plant Line Value: CS22 vs. Ler wt
  misc_feature: MA Experiment 20000573 PARAMETER Experiment Name: At_100uM_ABA_Mutants__P Parameter: Timepoint (hr) Value: N/A
  misc_feature: MA Experiment 20000573 PARAMETER Experiment Name: At_100uM_ABA_Mutants__P Parameter: Tissue Value: Whole Plant
  misc_feature: MA Experiment 20000573 PARAMETER Experiment Name: At_100uM_ABA_Mutants__P Parameter: Treatment Value: None
  misc_feature: MA Experiment ID: 20000794 Result: Down-regulated in Transcription
  misc_feature: MA Experiment 20000794 PARAMETER Experiment Name: At_Petals_P Parameter: Age (day) Value: 23-25 days
  misc_feature: MA Experiment 20000794 PARAMETER Experiment Name: At_Petals_P Parameter: Plant Line Value: WS
  misc_feature: MA Experiment 20000794 PARAMETER Experiment Name: At_Petals_P Parameter: Tissue Value: Petals vs. Whole plant
  misc_feature: MA Experiment ID: 20001248 Result: Down-regulated in Transcription
  misc_feature: MA Experiment 20001248 PARAMETER Experiment Name: At_Far-red-induction_P Parameter: Age (day) Value: 7
  misc_feature: MA Experiment 20001248 PARAMETER Experiment Name: At_Far-red-induction_P Parameter: Light Value: Far-red vs. White
  misc_feature: MA Experiment 20001248 PARAMETER Experiment Name: At_Far-red-induction_P Parameter: Organism Value: A. thaliana
  misc_feature: MA Experiment 20001248 PARAMETER Experiment Name: At_Far-red-induction_P Parameter: Plant Line Value: Columbia
  misc_feature: MA Experiment 20001248 PARAMETER Experiment Name: At_Far-red-induction_P Parameter: Timepoint (hr) Value: 4
  misc_feature: MA Experiment 20001248 PARAMETER Experiment Name: At_Far-red-induction_P Parameter: Tissue Value: Whole Plant
  misc_feature: MA Experiment ID: 20001450 Result: Down-regulated in Transcription
  misc_feature: MA Experiment 20001450 PARAMETER Experiment Name: At_Far-red-induction_P Parameter: Age (day) Value: 7
  misc_feature: MA Experiment 20001450 PARAMETER Experiment Name: At_Far-red-induction_P Parameter: Light Value: Far-red vs. White
  misc_feature: MA Experiment 20001450 PARAMETER Experiment Name: At_Far-red-induction_P Parameter: Organism Value: A. thaliana
  misc_feature: MA Experiment 20001450 PARAMETER Experiment Name: At_Far-red-induction_P Parameter: Plant Line Value: Columbia
  misc_feature: MA Experiment 20001450 PARAMETER Experiment Name: At_Far-red-induction_P Parameter: Timepoint (hr) Value: 8
  misc_feature: MA Experiment 20001450 PARAMETER Experiment Name: At_Far-red-induction_P Parameter: Tissue Value: Whole Plant
  misc_feature: MA Experiment ID: 20001557 Result: Up-regulated in Transcription
  misc_feature: MA Experiment 20001557 PARAMETER Experiment Name: At_Drought_Soil_Dry_P Parameter: Age (day) Value: 27
  misc_feature: MA Experiment 20001557 PARAMETER Experiment Name: At_Drought_Soil_Dry_P Parameter: Organism Value: A. thaliana
  misc_feature: MA Experiment 20001557 PARAMETER Experiment Name: At_Drought_Soil_Dry_P Parameter: Plant Line Value: WS
  misc_feature: MA Experiment 20001557 PARAMETER Experiment Name: At_Drought_Soil_Dry_P Parameter: Post Timepoint (hr) Value: 3
  misc_feature: MA Experiment 20001557 PARAMETER Experiment Name: At_Drought_Soil_Dry_P Parameter: Post-Treatment Value: Re-Water vs. No Drought
  misc_feature: MA Experiment 20001557 PARAMETER Experiment Name: At_Drought_Soil_Dry_P Parameter: Timepoint (day) Value: 13
  misc_feature: MA Experiment 20001557 PARAMETER Experiment Name: At_Drought_Soil_Dry_P Parameter: Treatment Value: Drought vs. No Drought
  misc_feature: MA Experiment ID: 20001558 Result: Up-regulated in Transcription
  misc_feature: MA Experiment 20001558 PARAMETER Experiment Name: At_Drought_Soil_Dry_P Parameter: Age (day) Value: 27
  misc_feature: MA Experiment 20001558 PARAMETER Experiment Name: At_Drought_Soil_Dry_P Parameter: Organism Value: A. thaliana
  misc_feature: MA Experiment 20001558 PARAMETER Experiment Name: At_Drought_Soil_Dry_P Parameter: Plant Line Value: WS
  misc_feature: MA Experiment 20001558 PARAMETER Experiment Name: At_Drought_Soil_Dry_P Parameter: Post Timepoint (hr) Value: 6
  misc_feature: MA Experiment 20001558 PARAMETER Experiment Name: At_Drought_Soil_Dry_P Parameter: Post-Treatment Value: Re-Water vs. No Drought
  misc_feature: MA Experiment 20001558 PARAMETER Experiment Name: At_Drought_Soil_Dry_P Parameter: Timepoint (day) Value: 13
  misc_feature: MA Experiment 20001558 PARAMETER Experiment Name: At_Drought_Soil_Dry_P Parameter: Treatment Value: Drought vs. No Drought
  misc_feature: MA Experiment ID: 20001560 Result: Up-regulated in Transcription
  misc_feature: MA Experiment 20001560 PARAMETER Experiment Name: At_Drought_Soil_Dry_P Parameter: Age (day) Value: 28
  misc_feature: MA Experiment 20001560 PARAMETER Experiment Name: At_Drought_Soil_Dry_P Parameter: Organism Value: A. thaliana
  misc_feature: MA Experiment 20001560 PARAMETER Experiment Name: At_Drought_Soil_Dry_P Parameter: Plant Line Value: WS
  misc_feature: MA Experiment 20001560 PARAMETER Experiment Name: At_Drought_Soil_Dry_P Parameter: Post Timepoint (hr) Value: None
  misc_feature: MA Experiment 20001560 PARAMETER Experiment Name: At_Drought_Soil_Dry_P Parameter: Post-Treatment Value: None
  misc_feature: MA Experiment 20001560 PARAMETER Experiment Name: At_Drought_Soil_Dry_P Parameter: Timepoint (day) Value: 14
  misc_feature: MA Experiment 20001560 PARAMETER Experiment Name: At_Drought_Soil_Dry_P Parameter: Treatment Value: Drought vs. No Drought
  misc_feature: MA Experiment ID: 20001905 Result: Down-regulated in Transcription
  misc_feature: MA Experiment 20001905 PARAMETER Experiment Name: At_Drought_Reproduction_P Parameter: Age (day) Value: 40
  misc_feature: MA Experiment 20001905 PARAMETER Experiment Name: At_Drought_Reproduction_P Parameter: Organism Value: A. thaliana
  misc_feature: MA Experiment 20001905 PARAMETER Experiment Name: At_Drought_Reproduction_P Parameter: Plant Line Value: WS
  misc_feature: MA Experiment 20001905 PARAMETER Experiment Name: At_Drought_Reproduction_P Parameter: Timepoint (day) Value: 10
  misc_feature: MA Experiment 20001905 PARAMETER Experiment Name: At_Drought_Reproduction_P Parameter: Tissue Value: Rosettes
  misc_feature: MA Experiment 20001905 PARAMETER Experiment Name: At_Drought_Reproduction_P Parameter: Treatment Value: Drought vs. No Drought
  misc_feature: MA Experiment ID: 20001906 Result: Down-regulated in Transcription
  misc_feature: MA Experiment 20001906 PARAMETER Experiment Name: At_Drought_Reproduction_P Parameter: Age (day) Value: 35
  misc_feature: MA Experiment 20001906 PARAMETER Experiment Name: At_Drought_Reproduction_P Parameter: Organism Value: A. thaliana
  misc_feature: MA Experiment 20001906 PARAMETER Experiment Name: At_Drought_Reproduction_P Parameter: Plant Line Value: WS
  misc_feature: MA Experiment 20001906 PARAMETER Experiment Name: At_Drought_Reproduction_P Parameter: Timepoint (day) Value: 5
  misc_feature: MA Experiment 20001906 PARAMETER Experiment Name: At_Drought_Reproduction_P Parameter: Tissue Value: Siliques
  misc_feature: MA Experiment 20001906 PARAMETER Experiment Name: At_Drought_Reproduction_P Parameter: Treatment Value: Drought vs. No Drought
  misc_feature: MA Experiment ID: 20001911 Result: Down-regulated in Transcription
  misc_feature: MA Experiment 20001911 PARAMETER Experiment Name: At_Drought_Reproduction_P Parameter: Age (day) Value: 40
  misc_feature: MA Experiment 20001911 PARAMETER Experiment Name: At_Drought_Reproduction_P Parameter: Organism Value: A. thaliana
  misc_feature: MA Experiment 20001911 PARAMETER Experiment Name: At_Drought_Reproduction_P Parameter: Plant Line Value: WS
  misc_feature: MA Experiment 20001911 PARAMETER Experiment Name: At_Drought_Reproduction_P Parameter: Timepoint (day) Value: 10
  misc_feature: MA Experiment 20001911 PARAMETER Experiment Name: At_Drought_Reproduction_P Parameter: Tissue Value: Flowers
  misc_feature: MA Experiment 20001911 PARAMETER Experiment Name: At_Drought_Reproduction_P Parameter: Treatment Value: Drought vs. No Drought

SEQ ID NO: 36869 - protein, 360 aa, Arabidopsis thaliana; identical to SEQ ID NO: 22802
  peptide (1)..(360): Ceres Seq. ID no. 12562343
  misc_feature (1)..(358): Homolog of NCBI NO: 14279694 NR Description: sinapyl alcohol dehydrogenase [Populus
  misc_feature (11)..(358): Homolog of NCBI NO: 3913193 NR Description: Probable mannitol dehydrogenase 1 (NAD-dependent
  misc_feature (1)..(358): Homolog of NCBI NO: 10720088 NR Description: Probable mannitol dehydrogenase (NAD-dependent
  misc_feature (11)..(359): Homolog of NCBI NO: 15227106 NR Description: putative cinnamyl-alcohol dehydrogenase; protein
  misc_feature (11)..(359): Homolog of NCBI NO: 15227091 NR Description: putative cinnamyl-alcohol dehydrogenase; protein
  misc_feature (1)..(358): Homolog of NCBI NO: 22475166 NR Description: putative sinapyl alcohol dehydrogenase
  misc_feature (5)..(360): Homolog of NCBI NO: 2146727 NR Description: cinnamyl-alcohol dehydrogenase (EC 1.1.1.195)
  misc_feature (1)..(360): Homolog of NCBI NO: 1168728 NR Description: Probable mannitol dehydrogenase (NAD-dependent
  misc_feature (1)..(360): Homolog of NCBI NO: 21592964 NR Description: cinnamyl-alcohol dehydrogenase CAD1 [Arabidopsis
  misc_feature (1)..(360): Homolog of NCBI NO: 15235022 NR Description: cinnamyl-alcohol dehydrogenase CAD1
  misc_feature (1)..(358): Homolog of NCBI NO: 14279694 NR Description: sinapyl alcohol dehydrogenase [Populus
  misc_feature (11)..(358): Homolog of NCBI NO: 3913193 NR Description: Probable mannitol dehydrogenase 1 (NAD-dependent
  misc_feature (1)..(358): Homolog of NCBI NO: 10720088 NR Description: Probable mannitol dehydrogenase (NAD-dependent
  misc_feature (11)..(359): Homolog of NCBI NO: 15227106 NR Description: putative cinnamyl-alcohol dehydrogenase; protein
  misc_feature (11)..(359): Homolog of NCBI NO: 15227091 NR Description: putative cinnamyl-alcohol dehydrogenase; protein
  misc_feature (1)..(358): Homolog of NCBI NO: 22475166 NR Description: putative sinapyl alcohol dehydrogenase
  misc_feature (5)..(360): Homolog of NCBI NO: 2146727 NR Description: cinnamyl-alcohol dehydrogenase (EC 1.1.1.195)
  misc_feature (1)..(360): Homolog of NCBI NO: 1168728 NR Description: Probable mannitol dehydrogenase (NAD-dependent
  misc_feature (1)..(360): Homolog of NCBI NO: 21592964 NR Description: cinnamyl-alcohol dehydrogenase CAD1 [Arabidopsis
  misc_feature (1)..(360): Homolog of NCBI NO: 15235022 NR Description: cinnamyl-alcohol dehydrogenase CAD1
